United States Patent Application Publication US 2006/0123505 A1 - sequence listing, part 6

SEQ ID NO: 10712 - DNA, 1668 bp, Oryza sativa
  ref <308>: DATABASE ACCESSION NUMBER: AK108060
  ref <309>: DATABASE ENTRY DATE: 2002-08-28
atcacatcacgcggcctcctcctcctccaccaccgccgcgccgtcgcgttcgccttttttcctccttcccggacctcgtgcgctcccaccaccaccaccccgcggcttcgctcgcgccaccgccactgattcgccggagagttgctgttcccttcgtgatttcgtcggcggtggcggcggcgggggtggtctcctgttgctgtacagaccagcatcgttggggggaatcggatgagatgagatgagatgagatgcgggggtggtggtgatggaggcgctctcccggaccgagcgtgtaggaggaggaggtggagccatggttgaagtggccttcgcttcgtccgccggatcctccgccgcggccccgcgccgccttcgtggggagctcgtcgtcagggacgctattccgtatgccggggtggctcctccgccgcccgcgctgccgctgccgcagccgcagctgcagccgcaggtgcaggctacgacgagtgggggcggcggcggggggaagattagccccgcggtgctgttcatcatcgtgattctcgcggtggtgttcttcatctccggcttgctccacctcctggtgcggctactcatgaagaagcagcatcgccgcggaggaggagggggtgcggcggccggggtgtcgcggtcggccgccggggatgacgcggggggaggaggggacgcggcgctgcagcggcagctgcagcagctgttccaccttcacgactccgggctggaccaggcgttcatcgacgcgctgccggtgttcgcctaccgggagatcgtcgtgggcggcggcggcgacggcgacaaggagcccttcgactgcgcggtgtgcctgtgcgagttcgacgccgaggaccgcctccggctgctgccgctgtgcgggcacgccttccacctgcattgcatcgacacatggctgctgtccaactccacctgcccgctctgtcgcggggtgctctttgtccctgggctcacggagaacaatccgatgtttgatttcgatgaggggttggaagaagggaggctgtctgaagattgcgataacggattcggatatcccgggcacaaggctacggaggggatgcagacgccagggactgagaagagggtgttccctgtgaggcttgggaagttcaagaatgtcgggacccagggcgctgtcgaaggcggtggcatcggcaatgccaatggtgctgtcttgaggagagaggaaggggagagcagcagcagcagcttggatgcaaggagatgcttctcaatggggacttaccagtatgttctagggacctcagagctcagggtgtctctccagccagaccgaattagaaatggcggcggcggtgtgacgagggcaaggccgacagggttaagctctgtcaatgctgagatcatggaggggaagaagatatgcgcacggaacaaaggggagagcttctctgtgtcgaagatttggcagtggtctaatctgaagggcaagctacctactggctcagatgaatgttcggaagcagggagccttccatggatgaagagaggtggcattggggatacatcaaatatgtgactgtagtctgtattatgatagtggctaatcttttctcttgttggtgctgctcacttaatctcttacctatagttatcttgacttttttc

SEQ ID NO: 10713 - DNA, 1350 bp, Oryza sativa
  ref <308>: DATABASE ACCESSION NUMBER: AK108061
  ref <309>: DATABASE ENTRY DATE: 2002-08-28
ttccgcctcgcctccccttcccctcctcgccgcctcgctcccctccgccgcgccgtcccgtcgaatcccgccatgccgaagggtgccaagaagcgcgccaagctcaagaagaagcagcagggggaccaccccgccggctccgatgacggcggcaacaacaacaacaacaaaaacaacgccgccgaaaacggcagcaatgactccagccgccgccgcgacgccgccagcgacggcaaccaccacctaccgtcgcgaccaaacgttcctcatgtggatgtgagtgaggactccatggagagctccgaggagatggtgacgccgagggccgccgcgtccgaggcggacgaggaggagaggaaggccgccacgtcggaggtgcccgtggaggtggtcgaggccggggaggaggtcatggtggacgccttgccgcccgaagccgccgcaggtgcgcaggagcaacagggtaaggcggaggcgcttgtggtggtgcaggaaccggaggtgaagcgcgaggagttggtggccaaggtgcatccgatgcatgacccggaaccgcagggcgaggaggtgctcatcgtggagttcaacggtcgtctcctgatctacctcttgagcgccgatgcccccgaccaccatgtcctctcctcgcgcagcacggtcgctaccggccgccgccgcctcctgtcctgcttgagcgcagacaccgccggccgctggccgccgactccacgccctccctctccccccaagccccactctggccatctcctcggccagatccagcgccgcggaggttggggacgccggatctgatgcccaagggcggcagcgggaggcctccccgagcttgcgagggggctgccgctgaggtggccacggtgacgagctcagtagtggtagtgtcgtcttcggggcttcggcgacgttgctctctcaccaaccacagcctgcaggtatcagtggaggtcctctaaaaaaatctcagtggaagagatccggttgtggaaatttatatctcatggcactaatggcactacagcatggcacaaattaatatctatgaaatgtcccgttagacctgaagttttgtggcaatacatggagggtgttatcttgctgatgtgtattttacatgtcatttagccgatgaaatttgttcagaaatcaggaatttatttctgacacgagcaggcaaaatatggatgagggctggaatcagtatgtattttgtagacatatataatggagtatttcgttgtagctgaaatatgtaaatttgatggaatcattatgtaacatgtcaaaattttccacactatcattaatacttgggaagtttccatgattttc

SEQ ID NO: 10714 - DNA, 1833 bp, Oryza sativa
  ref <308>: DATABASE ACCESSION NUMBER: AK108062
  ref <309>: DATABASE ENTRY DATE: 2002-08-28
atcccatcagccatggtcctaaagcttcttgatggtggtggcggcggcggcggcgacgacggattcaatccctctgctgccgagcacaagcgacacgagcagatcggcaacctcgccgtcgagctcaagcaccagcgccttgcttctaagccatcagctatggtacggaggtaagctagcttcatggggttgccggcggcggctgatttggtcccttgcagctgagcacaagcgacgcgcgagcagatcggcgacctcaccggcgagctcgagcaccacgcagtgcattaggcgacacaacatcaatctcaagtgcgggccacccaatcgattgccttgcttccgagttctagcctgagctcttggaactagcgcgcaggtacttgtctttgatcctaatcttcttttgtggttttgctttaaatctgttcttttggtacaatatgacaatgatattttgtagcataacaacatttcaaaaatattttgtagcctgaagaagtgaagataatttttgcaatctcagaccccctagaatgtatagtttagtaacttgcaagtgtaaattgtttctgtactaaatacattaaataaattaattgaacatgtagtgaaaataagtgtcatattgctgaatcggtctcccttgatgcaacccttgactttgttgagtcattaacataggagtgtgaactgaagtatgtgtgtatgcatccagagcagcgctatactctgacacgtgtaaaaaattgtggttactgggaacctctagatgatcctagcacaagaaaaagtaatggaaaaagatcaacgacaataatcaacgcaagcagtttcttttaagaaaaacaattatgtgctgagtataccattactgtagtatgtactgcttgtggttgtgcttgcatctctacaggttgaggatgcggtgattgggctaggacatcattgattttctttcttttcctccttgatgaagctttatctaagccgccaataggtcttgctgatccacgaatttcctttttcttgagcttaatgcctaatggcttcctaggcttctaattttctttcacacctgcaaaggcaaattacgacatgcatatttaaaaaaaagctgtgatccaatcataggactaataattactttatagaactgttaaacgaaccttgtggagatgacgaggtctctaaatctggattgcatctgattttcaagcatttctctatgtcttctgccaatttttgagcacaattagtagatatggaatatgtttcttcagactctgcagctcgggaagcaattctaacgaacattctgcacaatgagaagtatcgatctgataactttattctaggatcttcgtgtgtgttaccactgccacttatatgtagtacttttgcatcaattgtccatcattttagtatatacatttgaggaactgatttgatgttattgatgtcaagtactttcagggcatgagagcacaggataccagcaaattcaaacttcttgcagctgcatttgacactagattccaatggccagcggatgaatcatcaggctcaacaagatttgtgaatgacgtcgttgtagcagatgtattgtccaagaacatgggacttgctcctgcatcatgcagttgtgatgcctctgatggaggaatcatgctgttgtttggcatagcaccaagatctggcgtcgatgccggtgcttgataagagagattaatttatcaggatgctaatgcatgtttagatatgagttgtttggatgctggaggatttaacgggagaactgagacaaatggcgccataattctttttcccgcc

SEQ ID NO: 10715 - DNA, 1381 bp, Oryza sativa
  ref <308>: DATABASE ACCESSION NUMBER: AK108063
  ref <309>: DATABASE ENTRY DATE: 2002-08-28
taggtaaactacgcaaatatgcactctgttatcaagtgcttaattattccccatttttgtgaaatgatcaaatctgaccatgtatatcacatccatgttgcctgaagatgcggtatatgtaccctctaattcgcctgcgccaaagaaggcccaaaaaagagacgaaggacgtcatcggtaggaaaagccaccggcgaggaaaaaaaacgagagagacgacgacacacgcaccatcagacgaacacggacacagcaacactgtgaacacacacgcacaccgaaacaaacagaataagcggcagcccgaccgcgtccgtcggtgccagaggtatcgatcggccaatcagtcgcggtagcacacgagcagcgcgacgcagcggaagatgatgcggagcctcgcctcgttcccccgcgcgaccctgcagccgccaccgagctggctggcgcccctgcgcttcttcgccccgtggctcctggcgacgacgagctccatggtctccgcgcggcgcgcgctccttcgtcgctggctctctctgccgcgagagcgagtgagctagctagcaactactagcaaatgcgtccgcgcgcgagagccagctaattaaccgggcgctggcatgccaaaaaaacactttgacgacggtgtgggtgcgcgatggagtcggggctgcttgttgatgtgtttatataccgcgcggcgcgcgctagctctgatcgtacgtacacttggacggacgctggaaggttcaatgtaggtcgcgctaggcgctagctaggtgcagttccagtgcagctatcgagctgtacgtacgtgcaatgcgtacgtacgacgccttgaccgtgggtagctcatggtgagttccgtgcaaacgcatgcaccaacctgcaaactttcctggcccgatccagcaaccagatggatcatcgatacgtcggctcgtccatccggcatttaaagtcaaaccgcctggtgcttgattattaacgtccgttcgttttgttcagggaggttagaaacagtccaggatacacgatcggatcctgcagctaatgttgccatccgccatcggccatccgatgccgggtatgccgatacagccgtcaacccgcttgttgttcgtcatcgctgaccaatgcgtcgtatcgcgagccattaattaccttttctttgtaggtttgcgaatacgtcctgtctgcttccatgccttgaccgagcggcaagaatctttttctttcatctgcagtgcagtgcaatcaaccatcgatctgaacgttagtatcagttcgtcagggttgctatgatacacgtctactccctccgtcccaaaaaaaaacaaactctggttttcgtgcccaacgtttgaccgtccgtcttattttt

SEQ ID NO: 10716 - DNA, 873 bp, Oryza sativa
  ref <308>: DATABASE ACCESSION NUMBER: AK108064
  ref <309>: DATABASE ENTRY DATE: 2002-08-28
aggaaaatcacctcactctcccatcccccttctgttccacgacacggcctgcccacacggcacggtaagcccaacccaagatggaagaacccgccgccgccgccgcctttcccgatccgccggaggacccctccccctccccctcctccgcgccttctccggccgccgcggcgcctcctccggggccgagggagctggcggcggcgatggaggcggtggagcgggacgtcgccgccatctccgacagctacgcctccctcttcgcctccctccgcgtcgccctcgccaacgtcacctcgacgtcggcggagaacatggagtgcctgggagacgtcgtcggccgcctccaagaatccgcactcgaagcttcttcgaaaggaaataagtacatcaattcgtgcttgaggttgaatgaggaaatgagaggtctggaaagcctagccatgcaactaaagattttacggaagaatgttgattcactagacttggctgtcaatcagttgctccgcctcccctagtcagttgctgttatccagtaggcagtagctaatgcaaggaacatgtaatgacattgtttcagcaattatacataataactcgcgctccaagacagcaaatgctataatctgaaatggcacacaccagcaaaggagaagatttaccttgtgtggcaatataaaatactacatccagtgtttcacttcatttcctcttctatatgtgtgcttatgagctccgtatttgtatagtgggttattcaattcaacccatggtgacataatatcattatctgtaaattggctataaagactatcttcatcactttgttctaactccattcaaaagaaagcaataaagatcctttttattgtt

SEQ ID NO: 10717 - DNA, 806 bp, Oryza sativa
  ref <308>: DATABASE ACCESSION NUMBER: AK108065
  ref <309>: DATABASE ENTRY DATE: 2002-08-28
acgactctcggcaacggatatctcggctctcgcatcgatgaagaacgtagcgaaatgcgatacctggtgtgaattgcagaatcccgtgaaccatcgagtctttgaacgcaagttgcgcccgaggccatccggccgagggcacgcctgcctgggcgtcacgcataccattaccatagacgcaggtctttctcaggaagtgaagagagcagcagagttgcatatcttgcagggtttatcagtttgcggcgtaaaaggagcagtgtgtagcaattaactgaaactcaaatcgtcgaccgctaattaactgaggtattcagacaaagaataacaggcatcatgcaacggtggacgcgcaacgggatgctgaacttctcgcagccggcgtcgtcgtcgccgttcggattctacgacgccggccacggggcgtcgagcagcggcggcagccggtcgcacggctgcaggagccagaacaaggaccagcgcaacctggagaagaacctgaccaaggtgaggaaggagtggatgaaggtgaaggaggagatgggctacgcgaggctcctcagcgagcacctcagcgagacggtgacggagaccgaccggaaggtggctgccatgctcgaggagctcgaccggacggacaagtacatgcaggatatactgtcgtcccagcagaaatagtagtgacccatgacatcagatattcagatgcgtattttgatggatttctatgtatttacctagcagctagctagatcgtcagcttcttttctgggcatttttgccattgtggtattcggttttttagc

SEQ ID NO: 10718 - DNA, 954 bp, Oryza sativa
  ref <308>: DATABASE ACCESSION NUMBER: AK108066
  ref <309>: DATABASE ENTRY DATE: 2002-08-28
tattttgtaaataaattgggactcctcgtgtcttctgtgctagtgtaatccagggctggatgcaaagtgaaggggcgacactgagcctgggagggaccaaggcccctgccctctccgtcccccgcggaggtgaggaaggggtgcgtccttctcacagcccagtgacctcctggtctcggcgtcgggccttggcatgtggccgggctagcgggggtgtgcacatcggtgtgctgcctggcaggacgggaccagatcagggaccctcttgggaggctggagatggccagtcttttctttgggattctgcccattcctgccttggcgggaggggagagggggagctggggtccccggcctcgttgctcgcttctccgaggactggcagctccttgtgcaggaacctggactcgggcgcagcctggggcttcaccccgagcccctgtccacctccttgccgtgggagcacacggcaatctcacggtcggtgcagaccctctgagcgcttggtttggagacgccagcaggcctgagggatctgcagatttgctgaaacgacaccccatggccccaaggcagtgctcgactccccgtcctccgcagagtcctggggtcaagcccacgcccagcaggtggggtagggcaagggaagctaaaacccctaaagccctcgggttttcagtaacatgtaaaactttaatttctaaaacggggggagataattttgaacactgttctgtgatcataactgctagtttcgaggacactgccagctgtcctgcgtcctgtgtggccatccccccatgtgctgtcgctgtagctgctctgtttagacaatgggtagacgctctgtggaggcgggcccgtctatagccgccgcggtgtcacttttcagatgtgtatattgatgataggtcagaaagtgtatacactacaataaagtctggttctaactcc

SEQ ID NO: 10719 - DNA, 1380 bp, Oryza sativa
  ref <308>: DATABASE ACCESSION NUMBER: AK108067
  ref <309>: DATABASE ENTRY DATE: 2002-08-28
aacatgaggctgcagaaggtagcatgctctcgggagccatgtcgctcgcgtcgcagccgagcctccgttcccttccttcccttgacgtccatgacctgaacacaagcccttcgctccaccagttcatcgccacgatcaaaggccactcgtcggcgtcggcgtacgtctccgctctcgccgtcgacggtgactcgctgtacatcgcctcgtcggacgggagcatcaggctgtgggcactggacggcgcaaggagaagtcaggaggagcagcagcaggatgacggttgcagcagcagcagcagcagcacgacggtcgccgacaccgacagctccgtcaagtctctcctcgccacgggcaatggcgggctcctcctgagctcccaccaggacggcaagatcagggcgtggcgtgccggtagccggcggagggacggcgagacacggccgcagctcgtcctgcgcgcggtgctcccgaccgccgtggaccgcctccggacgtgcctgcggccgtggagctacgtggagatccggcggcacaggaggtgcacctgggtgcaccacgtggacgcggtcaccgcgctcgcggtgtccccggacggcgcgctcctctactccgcgtcgtgggaccggagcatcaaggtgtggagcctgcccggcttccggtgcgtggagtccatcgcggcggcgcacgacgacgccatcaacgcgctcgcggtctcccccgacgggcgcgtgtacacgggctcggccgacaagaagatcaaggcgtggacccgcggccccgggcagaggaagcacgcgctggtcggcacgatggagcgccacaggtcggcggtgaacgcgctcgctctcggagccaacggcaaggtgctctactccggcgcgtgcgaccgctccgttgtcgtctgggagagcgccggcggcggcgacggcggcatggaggccacgggcacgctcagagggcacgcgagagcgatactttgcctggcggcggccggcgagctggtgtgcagcggctcggcggacaggacggtcagggtgtggaggaggggaggtgcggagaacaacggctacacttgcctcgccgtcatggaaagccatggcgcggccgtgaagagcctggcattggtgcgcggcggacgcgacgacgatggatcgtgctcgtcggagggatcttctgccctcgtttgcagcggagccctggatggagatgtgaagatctggagcgtgtttattccatgtttgtagctagttcgtgttcgttgtcctctgtggacggttattgtaaattctgtccacgtctcttaaggatgatgcaccaccaccaattctcctcacgatctacctacgaccatacattttttaagaccattttttagtc

SEQ ID NO: 10720 - DNA, 844 bp, Oryza sativa
  ref <308>: DATABASE ACCESSION NUMBER: AK108068
  ref <309>: DATABASE ENTRY DATE: 2002-08-28
atttctcggaggaacccagaacactcttctcaatctttaacccgaagatgtttgatccatttcttgtcttctctggtgatcttaggcgcatttcatccatggaaacgtgatcttctacctctacctgatccatctgtgtgtgaaatctcattttgcacaggtcgaacaccctgcgtcgagctcatcgtcgctcccgacgtcgcgatgccgttcccgtccatccggtgggtctctggccgaaccactgcgccatcatcatcacaaaggttccagaaagctgcttactgaagcaatcgacccaagacaccgccgttgaagagatcgccgtcgtcttcctcaagtccggctaccggctatcgtcgtcgaatccttgcatccgagccgaagcatggggagtggtcgtcgccgtcgctctgccattctttgccgccgccggagtacttctaaggtcgccatcgccgtccatccatcaccgacctacaggcgaccttccactagtggtcaccgccgctcgcgctgtttccggcatccatcccggccatctccggcgacaagacgaacatcgtcggatgcgcaagagcctggtgcacttttctccttttgggtgcgacgtcagaatccccgccgttcgccgccgacgtcgacgtcaagcccgccggccggtgaagctctgctgctgctgctgtttcctcctctgccgagcctatgacaggtggtccccacttcattaagcattaagaactgtgattagaaatagatcaaagcatatggggttctatttgtaaataactagagcatgacatgtgggacctagacctaattataaatacataaaactttgagt

SEQ ID NO: 10721 - DNA, 1464 bp, Oryza sativa
  ref <308>: DATABASE ACCESSION NUMBER: AK108069
  ref <309>: DATABASE ENTRY DATE: 2002-08-28
atggcggcgccgcccgtctccgacttcgcctgcgccttccgctcccgcgccgcctgggtgctcctctccgcgcgcaacccgtcaaggctcgcgtgggccgccgcggtgccgggagctgcacgaccgcgtcgcggcgtccccttccctgcagcggcaccccgcgctgcggtccctcctccgcctcgtcgccgccgagcagcggttcctcgactcgagccggcccgaccagggggcgccgctctccaccaacctgccccacctcgccgcgctgcacctcctcctcgccgcccaccccgccgtgcggtgcccgtcccgcctcgcgccgctcccgggggtcgacttcgcctgcgccttccgctgggcgccgcgcgcggggcgcctcccgccacccgccccgagaagctgctcctcgtcttcgcccgcggcgtcggcgcggaccccgcgcgggggctcgcggaggagttcggggccgtggagatcgacctgctcgtggacttcgtcggcgaggccgaccacgatagcgaggaggaggaggggtgggttagcgtgagcttccacccaaatgaggacatgaggagcttcagggcgttcgagattgacgtcgtggagtgtggtgatgagatgctgtcgtcgccgctgccgccgccgccgccaccgttgccggagatggaggtgaaggagggtagtttgggcggcgagtttagtgtctttgtgaggaagatgaatatgggatcgagggagatggtgaatttggacaccacggctctggttgctatagtgtcagggatcagcaatggtggtgtaggtaagctgatgagcataccggaggcagagaccagggcaaggttcaagtgcaactacaagttcgtcatggatcaggcacattccgaacttcagtctccaatacttgttgagctggggaatgcagtggatggaaagaaatgtatcatatgtgaaaccgttaactcggagtttaaagaaattgttacaatgtgtggtgggcctgaggagcaaacaagatcaagtcagttactgaagcggcttatagttgtcccagacagtccttcagcccgtatgatggatctaccaacgacaaggaagcttgccatgaagaacaaggtggttttcggcacaggtgaccattggcgtgctcccactttgactgctaatatggggtttgtaagagccgtttcacagagtggcatgcctttgttgaccatcgagcacagacctcgcgcgctgattggcttgtgacaacctgataaccctgttgtacgttttgccagccaatttgtaaaagtgcatttgtagtcgtagtgttttgctaacaatactccttagatgttccttgttcctagaactgcagttcacttttgttattctacctcagttaagtcttgtacagctaaacacacattttctttagtgatgtactacgcagcatcagcagtttagcacattgtc

SEQ ID NO: 10722 - DNA, 620 bp, Oryza sativa
  ref <308>: DATABASE ACCESSION NUMBER: AK108070
  ref <309>: DATABASE ENTRY DATE: 2002-08-28
aaaacaaagacagcttgctacagataatctcgtgtgacctaatttgcatggagaaggtaagcatgaggctggtcatggtggccttggtgttagtgggcatcgtgctggcggcgagccaggaggtcgtcgatgcatccacgtgcgtggcaacagattcccctgaacttgctgaagaaaggaaaaaacttgagaagctcacggcaatcttctctcggcctcgcggtgtttgccacgcaagcgagggttgccgcgatgaaccactactaattgatgactgatgccaccaaatgtaccagtccacacaaaatcggtgtgtgtgaggcatttcccatcttccccgacctgtgcaggaggccaaaattaggaaccggcaaatatatcccttgcaccgatttattttgctgagaaccgacgcttacagatgtttgtctatgtgtcagttctcaacagaaaccagcatatatgtactttcatatgtaccggtccttgaaaaatggcactaatgatgccactactcaattgtgctcttttgtacgtaacatttttttttatctcaagtcgtatgttgacaaactttgtgtttgtttttatatctttattggcatttcttaatcggcctc

SEQ ID NO: 10723 - DNA, 1698 bp, Oryza sativa
  ref <308>: DATABASE ACCESSION NUMBER: AK108071
  ref <309>: DATABASE ENTRY DATE: 2002-08-28
agctgacgtcacgctgctcgcgcagccgcggctatctcgtcgactcgtcgccggcgaccgccgccgccgccgcgtagacgggttccacggagagatcagccgcacaggctgagacatacctgccgttgccgccttgccggcatgtcacgtcggggtctcccgtggcagagccctgcgggggagcggtgggacgccacctccctcgccggcgccctgaaggccgccgccggcgtgcgctcggcgacgcacgtcatgccactctacgcggtgctcctcaagctcggtctctcggcctccgccatcctggccacctccctcgcccacctcgcgctccggtgcgggctccctggctacgcccggagggtgttcgacgaaatgccccaccgggatgtggtctcctggacgtccctcatcaccggccacgcgcatcagggcctgtaccaggattcactcgcccttctccgccgcatggtgatatctggtgtagtgcccaatggatattccctgtcaggtgcattgcttgcttgtgccggaattgggccaggcgctctcgctgctgggaaggaaatacatgccagggttgtcaagatgagtttgcatgggtcggttgatgcggttgtggagaatggggttctcgacatgtacacgagatgcgggaaaatcgactatgcgaggaaattgtttggggtgatgctggtgagggacattgttgcatggaactcgatgatggctgggtgtctcaggagtgggcaggctgaggaggctcttggtttattctcgtcgatggtgtcttctggggttgacgcagatggcttctcgtttgccatatctgtggatgcatgtggggagctagcattgttgaagcaagggatgcaagcacatgcacgggtaattcgcggtggatttgattcagatgtggtcgtcaggaattccttagtggatatgtatgcaaaatgtgggtgtgttgattcagcagggcttgtctttagggatgcactgtcgtcggatgctgttctttggaccacaatgatctcagcttatggcaagtttggccgtgtacatgatgcaatctgcatgtttgataggatgtcacaattgggaataaaacgagatggtgtcgcatatcttgcagtgctatcagcttgtagccatagcggacttgtgaaagaaggctggaactacttcaagttgatgtttcatggtcagaactcagttaagatgcagcctgagcactatggttgtatggcagatctcttatgcaggagcggttacctagaagaagctcttgatttcattacaaatatgccatttgagtccagtattgctgcttggagtgctctactcaattcatgtagaatccacgggaatgctaaacttggtcaacttgcggcatcccgtctggtccagcttgatccagagaatcacagcaactgggttgctctatcaaatgtacatgcatcggaaagcgattggcatgagacctggatgatcagagagagcatgagcatagagtgtgtgaagaaagagcctggatgtagttgggttgagttgcatgatggagtccatgtctttctaatggctgaccaatctcagcctgaattagttgatgtattgcagactcttgattcactaaaagaggatatatattggttgatgcctacatgaggtccataaggaccacactgtgggtaatttctt

SEQ ID NO: 10724 - DNA, 1642 bp, Oryza sativa
  ref <308>: DATABASE ACCESSION NUMBER: AK108072
  ref <309>: DATABASE ENTRY DATE: 2002-08-28
atttcgcctcgggattgctcgacggcgagcgattccgacttcacgcgctcccatggcaggcggcggcggcggcggcagagcttccgcgcagcggcgggcggcgctcgcggcgctgatcacgctcctcttgcttgcgtccctcgctttcctcctgtcggcgacgggcaccgcctccgccccgaactccgcacccttccggctggccgccattcgccgccacgccgaggaccacgccgccgttctcgccgcctacgcggcccaggcgcggaaactcagcgcggcctccgcctcccagacggagtctttcttgtctatctccgggcatctcagctcgctctcgtcccgcatctccctgtccaccgtcgcgctcttggagaaggagacgcgcgggcaaatcaagcgcgcccgctccctggcaggcgccgccaaggaggcgttcgacacgcagtccaagatccagaagctctccgacaccgtcttcgccgtcgaccagcagctcctccgcgcccgccgcgcgggcctcctcaactcccgcatcgccgccggctccacgcccaagtcgctccactgcctcgtcatgcgcctcctcgaggcacgcctcgccaacgcctccgccatccccgacgacccgcccgtcccgccccctcagttcaccgacccggcgctgtaccactacgccatcttctccgacaacgtgctcgccgtgtccgtcgtggtggcctccgcggcgcgcgcagccgccgagccggcgcgccacgtcttccacgtggtcaccgcgcccatgtacctcccggccttccgcgtctggttcgcgcgccggccgccgccgctcggcacgcacgtgcagctcctcgccgtctcggacttcccgttcctgaacgcctccgcctccccggtcatcaggcagatcgaggacggcaacagggacgtgccgctgctcgactacctccggttctacctcccggagatgttcccggcgctgcggcgggtggtgctcctggaggacgacgtggtggtgcagagggacctggccgggctgtggcgcgtcgacctcggcggcaaggtgaacgccgcgctggagacctgcttcggagggttccgccgatacggcaagcacatcaacttcttcgaccccgccgtgcaggagcggttcaacccgcgcgcgtgcgcctggtcctacggcctcaacgtgttcgatctccaggcttggcgccgggaccaatgcacccagcgattccaccagctcatggaaatgaacgagaacggcacgctgtgggatccagcgtccgttctgccggcggggctcatgacgttctacggcaacacgaggccgctggacaagtcgtggcacgtgatgggactcgggtacaacccgcacatcaggccggaggacatcaagggagccgcggtgatacacttcaacgggaacatgaagccgtggctcgacgtcgccttcaaccagtacaagcatctctggaccaagtacgtcgacaccgagatggagttcctgacattgtgcaacttcggactctgatctttgctacgatttcaatggtaatgatcagatgtaggttcagtcgtttctgcctgccgctgttgttgcaacttgcaaaagcagacgagttaatggctctgctccgct

SEQ ID NO: 10725 - DNA, 1442 bp, Oryza sativa
  ref <308>: DATABASE ACCESSION NUMBER: AK108073
  ref <309>: DATABASE ENTRY DATE: 2002-08-28
actgcttgttctttcttttcttcctcaagctgagctctcatctcacttctcctccccaaatcccatccaatagcccaagatcaatccctgcaagttagaccacaacaatccccatcatccaagctttccatccatcccaacatcttgcacatgcatggagagttgagagagatcgaaataggagaagagagtggtggtttcagcctgcatggttgcagcagcaacatgactttgtttcccaccatttggtcatccatctacattattgcagctaggaggtggctgtagctcatccggtgttaatctcttttgatttcggttgaaacagccctaggcaacgtctcttaccgtcagcccgaggccttgctccatctcttgccatcagcccgaggccttagcctcgcacgaccctacgaccaggttgctgccatgtgagcgaagtccggtggaagttggagaaaagggggagtgaaaatagaaatcgatttttgagatagcttttgagctgaaagagattcggagattccggggagtaacgagccatatcccgaggaggatagtgactaccctcagcagcaaggcaagcacctaagcatatagaatctatgctttctctaaaaatgatttggttgcaatctatacgtatatatatgcatgcattgcctagatattaatattgtcggtttatggtgtatgggtagaacctatttatgcatttagttcttgtgatattgctgtccttaccctattaccactggttggaattacttgggatgtcttattcattaatgcttagccatgcttagtgctaatagaactatagggatggacaatgctattaattgtggtatatagacaacttgcatttttaggcataaaacttgagcacttacactaaataatggttgatgaaatatgttggacttggacgggtgatagggcgatgatgggaggttggtttcccctgatgcaagttgccccgtctaggtcgttaaggatcgaacattttgacatctaatcaagcatcctacgttttttccacatgccttatttgggatcggcttgttcttactagttctactgtgataatttataccacgttggagagtcgtgaggcaggtagcctttggagggcctcaggtgcctaggtttggccgggggtgtctcccgcgtggcgcgcccgccttggtgacatcacgcacgcacgtgactgagtcgtcgggaaccccagcatggtataggtggttgggtggggctaagaaagggcatgtaatgagcttgaatcaattgtgtaccgcactcgacggggtgtgtagcatttgatctttgttcatttcgtgtgggtccagttgtacacctctgatcagagtataatctattcgaatagacgcgtcctcggttatggacaatgcttgatgtgttagtcagttatgattagcatc

SEQ ID NO: 10726 - DNA, 1137 bp, Oryza sativa
  ref <308>: DATABASE ACCESSION NUMBER: AK108074
  ref <309>: DATABASE ENTRY DATE: 2002-08-28
catttcttcccgaacccgaacccgcacccgcctcgctcgcacgctgcctcctcctcgtcgtcctcctcctcctcgctgctccgcaagtccgcatcgcctcccccctcgatcccatctcggatcgccgccgccgcagcagcagccgggtggggctgcgcttggcgggagggaggggagggtataggataggggagatgggcggggcggtctccggcggcggcgcgggggcggcgggggcgggggcgggggcggagggggaaggggcgtacacggtggtgctgaatgtgtacgacctcacgccgctcaacaactacctccactggtgcggcctcgggatcttccactccgccgtcgaggtccatggatcggagtacagttttggagctcatgatcacccaacgagtggggtttttgaggtggaaccaaagtgctgcccagggttcatgtacagatgttcaattttcataggccgtacgagtttgaatcccttagaatttcgagatttcattcagagaatggcttcagaataccatggagatacttatcacctcatttccaaaaactgtaaccactttacggatgatctcagtaccagattgacaggaaaaccgattcctggctgggttaaccgacctgcgaagctaggtgccttttgcaactgccttctgccagaaagcatgcggttggagtcaactgggacaaagcacctcgcggactgtcatttctcagatgattcccgcacatccagcaatgagcattttgaagatgaagatcttgaagacaagcacctgctttcacaatcttctgtttctgaagatgcaattgtaaaggaagttcacaggtgacaaactgctgaggctatacagaataatttggtgtgtagtttgtcattcattttgtacattgtaattctgtattccaaaatttagtgcgctctttgtattctaagttgatattcatattattgtggccggtttattgtcatgattaattttgttcattccatttgtacaaacactgtaataccctacctactgaggctccttataggtagtctggaagtcactctgcatgtgtactcttaagtcttaaattcgtttcttgtaaaaatgtgagttcaaagagcgagttgatccc

SEQ ID NO: 10727 - DNA, 792 bp, Oryza sativa
  ref <308>: DATABASE ACCESSION NUMBER: AK108075
  ref <309>: DATABASE ENTRY DATE: 2002-08-28
aaattcacaaccatgctgtccttgcttccccttcgcttgccgttctccgcagccgcgacgcatccaaactccactttcctcctccaacgcgccgttaggcttcccatcctcccgatctcaccgcgagccagcatgagcgccaccgccgccacgccggattcctcggcttccgccgccgccgccgccgttggcggggaagtggggaaggaggcggaggatgtggtggtgcagtacgtggtgcttcggcgcgacctggcggacgcgtggccgctggggagcgtggtggcgcaggggtgccacgccgccgttgccgccgtgtgggcgcaccgcgaccacccggacactgccgcctactgcgggccagacaacctcgaccggatgcacaaggtaacactggaggtgaaaggagagacacaactgaagaacctggctgagaagctggaaaccgctggtgtccggcacaaggtgtggatagagcagccagagaacataccaacttgcatagcgactgcgccgtgcccaaagtcacaggtttcttcattcttcaagaagctcaagctttgtaaatgagccactatttaggatcctcaaaattcaaaactttgcaagcaatctgtcttttcattactggttttatcgtcaaaggttggcattagaagtcacaccagatactgcagccatgtactgtctatacctgttccatttttggatttattgatcgtgcatgtttttgccatgggaccatggtggcgggttgatgaagcaatcagtgagaaattgacatttttgttc

SEQ ID NO: 10728 - DNA, 1462 bp, Oryza sativa
  ref <308>: DATABASE ACCESSION NUMBER: AK108076
  ref <309>: DATABASE ENTRY DATE: 2002-08-28
cttcttttctctccctttcctcctcagttcggcagtgggcagggcagccgcccggtaggggaggcgggagtccggtggccggcgacgaggtggcgacggcgccgcatggcctcttgcgcccgccctcccacaccgctgccgccgccaggggaggagctggcgcgcggccgtcggggagcggagtagggctcggccggcggggcggagctgggcgcgggcgctgtgcgctgtgcattgtcgaaaagatggtgggggtgcatcgccgtggggctcttcttctccatgccgttcagggaggccaccatgctggcgctgatgctcaacatccggggcatcgtgaaggtggccgccatcaacaactggggggacacgatgaaggcgacggcggagcactactcgacggctcgacgctggcgctgtcgatggtggtgatcacggcggtggcgacgccgctgataaagctgttgtaccacctgtcggggaggttcgggcgggcgaagcggcggacgatggagggatggcggcccaacgcggagctgcgcgtgatggcgtgcctgttcagtgaggaccacgcggcgccgctgttgaacctgatcgaggagtcgggctcatcgcgcgacgcgccgatgtcgctgatcgtgctccacctgacggtgctcgtggggcatgcgacgtcagtgctgaagccgcataggaagtcaaggagcagctgtggcaacccgacgccgttgccgacgtcctcgccgagctcgacctcctcaattccgagcttggccgcatcgccctcaacgcctcactcatcaccgaggcgctggagttgttcgtggtgttgtgcgtcgccggcaagatggtggggtcgccgcggggctcttcgaggaacccgtcccggatcccgcccccacctcccgccacggtaggcaccacagctcgagcttgaacccgccactcccgaagccctcaaatccgatcacgcctccatcgccgcgacacgcggcggctgcggctgcagcgacgaccgtggcaaatggcagcgaagcggtggacgacaccggcgagtggaccgaccaagagatggacatcacccgccgccgccgcgcacgcctgagagcgtcatccgcgcggcgaagttcggcagcaggggcgctgctattgcgggccgcacgccgcaccgccggtcggccgtcggacctcctcgtcccggcagcctcctccccgccgccggccagcctgcccagggagatgagtgagagagagaggaggaagggagaggaggggaaagagagagcatgatgacgtggcgtcctgacatgtggggccacgtaggtctcatgatgactcacccgctacgtaggataaaaccggggttaaaaccattaaaggatgtaaagcgaacggttttgtaagttaagtgatgttatatatctggttttacggttgggggatgattttgtaatttgatgac

SEQ ID NO: 10729 - DNA, 1481 bp, Oryza sativa
  ref <308>: DATABASE ACCESSION NUMBER: AK108077
  ref <309>: DATABASE ENTRY DATE: 2002-08-28
aaccactaacgtgcgttcacccccctaacaactatctcacccccctaacaactatctcaccggctcgatcaatctctcaccggagatggtgcccgtccggccgtccgcggcggcgctgctgctcgccgccaccgctttcctcgtcgtcgcggtgggcgcccagccgctgagcccggacagccccatcctgagggaccccaacgtgatccccatctacatgacccccggctcgtcgcccaccgtggcgagctgctacaaccagaacaacacggcgtcgggccccgactgcacggtcgagccgcgcgcgtgcccgcgcggctgccgcgacatgtgctacgttcactgccccacctgcaagctcgtctgcctgtgtgagctgaccggcacggagtgctacgacccgcggttcgtcggcggcgacggcaacaagttcctgttccacgggcgcaaggacgccgacttctgcctgctctccgacgccaacctgcacatcaacgcgcacttcatcggcaagcgcaacgcggcggcggcacgggacttcacctgggtgcaggccctcggcatccgcttcggcggccaccgcctctacctcggcgtcaggaggaccgtcaggtgggacgccgccgtcgaccgcctcgtgatcaccttcgacggcgcgcccgtcgagctggacgccgtccccgccgccagctggagcccagcctccgttccggcgctctcggtcttccgcaccggcccggccaacggcgtggtggtgcgcctcgacggccggttccgcatcgtcgccaacgcggtgcccgtcacggaggaggactcgaggatccacggctacggcctcaccgccgacgacagcctcgcccacctcaatgtggcgttcaagttctactccatcagcgccgacgtgcacggcgtgctgggccagacctaccgccccgactacgtcagcgccggcgtggacgtgggcgccaagatcccggtcatgggtagcgccgggaagtacgccgtttccgacatcttcgccacggactgcgaggtggcgcgcttcgccggcgaggacggcgcgctcgcctcgtccgttggcatggtcgacgcgccggccgacgcgctcttcggcagcgggaagggcagcgccggcctggtctgcaagaagtgaggtgagaaagcgaagtcgtagagctgttttttctcggtgtttaattacctatataaactaatatagtaatatatacgtgcttagctgctgctacggttattagtggtagttcaaagaataaaagatttggtgataattgtcgcgtgttagtcgtcgtcgaacgagcaaacgctgggaagggaacaaagtgtttctcacttgtcagtgccgtgatttaggatgagattgcccggttcaaacttcaaaatcgtgtcgttgcaatcctatatcctcttttgtaatcgtgtttgagaataaaagttgaacactgaagcttaatttgttacgt

SEQ ID NO: 10730 - DNA, 1296 bp, Oryza sativa
  ref <308>: DATABASE ACCESSION NUMBER: AK108078
  ref <309>: DATABASE ENTRY DATE: 2002-08-28
atctcatcccaatcccccaaatccacccgagcattcgaagcttgtagaagaagccctagcctctcctcctcatcaccgatggcccgcaccaagcagacggcgaggaagtccaccggcggcaaggcgccgaggaagcagctggcgacgaaggcggcgcgcaagtcggccccggccaccggcggcgtgaagaagccccaccgcttccgccccggcaccgtcgcgctccgggagatccgcaagtaccagaagagcaccgagctgctgatccgcaagctgccgttccagcgcctggtgcgggagatcgcgcaggacttcaagaccgacctccgcttccagagctccgccgtcgccgcgctgcaggaggcggccgaggcctacctcgtcgggctcttcgaggacaccaacctctgcgccatccacgccaagcgcgtcaccatcatgcccaaggacatccagctcgcccgccgcatccgtggcgagagggcctaggcgtgatctgctcgagaggctgtgataccctggtagttctagtggtggttcctgtgtctagtctgcacatgtagagatttgatggggttccttggttggtgtttgatctcagatctgtcatggcctagttggggtgttgcgtatgtaatttatctgtcttactcttatgtgatcccatggtgttggaatgaaatggaagtgaagaattctacttatcaccaaaaaaaaaaaaaaaaaaaccttccctggtcttttcactctaccccaatctcaggaggaagcagaactattgaggaattatctgaagcaaataagggaggaaacaagtggaaggttgcttaactgcgcatacagagctaatggtactccaaacaaatggtggttggcttttgcaaagaggaaattcatgaacattgtcattctttgaagtataggtattttccgcgacatgtttgagcaattgagcagcttgtaggaatggtaattgcacttgcgtacttatttctgcgaatactttagagaattaaaggaacgacaatgattctacacctcgattgatggagccaaaggttctaatgaaacaatggatagaatgtcaacaatttgtttattgcaatggatgaacacaaggacacctttcagctgttatgttgaatttctatttttcatttttattgtactccgtccgtgcccttaaattgggcatgtatttttcagatgatgtttgaatagcgaatgttccgtgtaggacatttgtacagatttaatcaggtgtaatgagaatgtgaatatatattttcctgatcc

SEQ ID NO: 10731 - DNA, 1517 bp, Oryza sativa
  ref <308>: DATABASE ACCESSION NUMBER: AK108079
  ref <309>: DATABASE ENTRY DATE: 2002-08-28
acacagccaaagcgtttagcaagaacagagcaaagagctagcctagctagatcatcgcatcgcatttgttagttttccatcgccgattgatacatacatcatccaagcagagcaatcaccaatcaaccgagacaagatggtgcagcatcatcaagcggcggcgaacgacgatcatcaggctatcccgctgctgacaccgtacaagcaggctgggcgcccggggtcgaagcttgacctctcccaccgtgtgctgctcgcgccgatgacgcggtgccgatcctacggcaacgtgccgcagccgcacgcggcgctgtactacacgcagcgcgccacccgcggcggcctcctcatcacggaggccaccggcgtctccgccaccgcgcagggctacccggagacacccggcgtccggacgcgggagcacgtcgaggcgtggaagcccatcgtcgacgccgtccaccgcaagggcgccctcttcatctgccagctctggcacgtcggaagagtctccaacaacggtttccagcctgacggattggctcccatctcaagcaccgacaaggcgatcacaccggacggctatgggatggtgtactccaagccgcgacggcttcggacagacgagatcccgcaaatcgtcgacgatttcaggctcgctgccaggaacgcagtcgaggccgggttcgacggtgttgagatccacggcgcgaacggctacctcctcgagcaattcatgaaggacagctccaacgaccgcaccgacgagtacggcggcagcctcgagaaccggtgccgcttcgccgtcgaggtgatcgacgccgtcgtcggcgagatcggcgcccacagcgtcggcatcaggctgtcgccgttcctggactacatggactgcgtcgactccgacccggaggcactcggctcgtacatggtggagcagctgaacaagcacgaggatttcctctactgccacatggtggagcctcgcatggccatcgtcgacggccgccggcaaattcagcacggcctcttgcccttcaggaagcagttcaatggcacgttcatcgccgccggagggtacgaccgggaagaagggaacaaggcggttgccgatggctatgccgacctcgtcgcctatgggaggctcttcttggcgaatcctgatctgcccaagaggttcgagctcgatgcgcccatgaataactacgatcgcaacaccttctacacgcaggatcctgtggttgggtacaccgactatcctttccttgacgagcatcaccatgacgacgacgatgactctaatgctccttctgcttaaaaccagtcatgcaactcttcaaatcgatcggcatcaataatcaataatgcaggcacccgtgctatcgatttcactatttaccgctacattttctttaagtgatttatgtactcttgtactattgtttatgtttagtgtgagaagacatcaagacatgcatcatgcgtgtatatatttactggaataaaacacgagttatatgaac

SEQ ID NO: 10732 - DNA, 1308 bp, Oryza sativa
  ref <308>: DATABASE ACCESSION NUMBER: AK108080
  ref <309>: DATABASE ENTRY DATE: 2002-08-28
ccttaaccacttcatcacttctctcgtcgatctagtctaaaaggtttagtagatgcgattagccaggcagcagcagcaggtggtggtggctgcgacgatggagcatgacgtgcaccaccaccggcagatgatgcagcagcagcagcagcaggagatggacctgccgccgggcttccggttccaccccaccgacgaggagctcatcacgcactacctcctccgcaaggccgccgaccccgccgggttcgccgcgcgcgccgtcggagaggccgacctcaacaagtgcgagccatgggacctgccatcgagggcgacgatgggggagaaggagtggtacttcttctgcgtgaaggaccggaagtacccgacggggctgaggacgaacagggcgacggagtccgggtactggaaggcgacggggaaggaccgggagatcttcagggggaaggccctcgtcggcatgaagaagacgctcgtcttctacaccgggagggccccccgcggcggcaagaccggatgggtcatgcacgggtaccgcatccacggcaagcacgccgccgccaattccaaggatcaggagtgggtgctgtgcagggtgttcaagaagagcctcgagctggcgccggcggcggcggcggcggtcggcaggagaggcgcgggcgcggggacggacgttgggccgtcgtcgatgcccatggcggacgacgtcgtcggcctcgccccgtgcgcgctcccgccagcgcacgtgacctgcttctccaacgcgctggagggccagttcctggacacaccgtacctcctccccgccgccgatcccgcggatcacctcgccatgtcctccgcctcgccgttcttggaggccctgcagatgcagtacgtccaggacgccgccgccgccggaggagcgggcatggtgcacgagctgctcatgggcggcggctggtattgcaacaagggcgagagggagaggctgagcggcgcctcgcaggacaccggcctcacgtcgtcggaggtgaaccccggcgagatctcgtcgtcgtcgcggcagcaacgcatggatcatcacgacgcgtccctctgggcctattgaaatattcattcatcatcattgaaaattgcattagccattattattagtactgttggccaccgattattgattgtgttgtaatattggtattgttgattataattaattagtacgccaaagagacaaatcacaagagaacgaagtgtgtatgctgtagattaattccgtatgtttgtgaaaatattcttgaacccaagtgaatgttactagtgcttttc

SEQ ID NO: 10733 - DNA, 1417 bp, Oryza sativa
  ref <308>: DATABASE ACCESSION NUMBER: AK108081
  ref <309>: DATABASE ENTRY DATE: 2002-08-28
aattcctccacgccgagtgcggcttggtcccgttccggctggcctccacctcgttcttgaggacgttgtagatcggagtcaccacgcggatgaggaaggcgtcctcgccgcacacggcgggcatcgcaggccgccctgtctcgatgtcgatggactgctcgacgacgtggtggaggtcgagggccatgtagtggaagatgtagcagaggcactccggcatgaacctcaggttggcggcctccccccagatgagcaggtacagcgccgtgtagaggaggtccatgcggacgtcgttgccggtggcggcgccggtgcggcggccgccgccgccgccgctgggcacgcggaagtggcgcttctggccgaggtaggcgcaccaggaggtgtagttcttgaggagcttcctgcggatgccgcgggcgacggtgaggtggaggacgtcgatggggtggtccttggggaatcccggcgcggcgcggagctgcgcgttggcgaggaggagcaccaggtgctcccgctggttccggacgttgtccgcctggaacccgaaggtggcgccgagccagtcgaagatgtcggcgcggtgcgggtcccagacgcgggccagcggcggcgccgggaagtccgacgcgtgcgacagcgcctccaccgccgcccgcacttccggcacctgcagcgacgggtggtccccgtgcatcaccacgtcctggatcgggatgatgttgtacgccgcctgcaccaccgtctgctcccccgaacccgccgccgccgcggcgcggcggttccgcagcaagctcatctccccgtctcacgcagccagctgcaaaaaaatcactcgacgagtgtgagccctttgaagcgaagaagtacacgggatgatgggaggaacctaggtgggaatcacatgctgcgcagctggtttattcgggctgccgcttttgttcgcttgtttgatttgcttgtctccttcggattaggcggaagcgaggcgtgcgtgatcgcttcaacagtttgcatcatagccgccgcctagtaggcgggtgtgggtttggggctcggtttggttgctttgcttgtggggtttctaaccatgccgctagtgtttctgtgcgctggattttccggtgggggcaaaatgaactaatgatgatggcgatgagaagatgtgactccttttttggaggagggatatgcaatggatttgtgatctactggtaggctacggattactgatgcactgtaagcaaaaaaaaggggaggtcagcaaagcaagtctacaagtgaatgggacagattggtgtaatggtctggagtaaatctcaccatccactcgcactcaggttttgttagcttgtgttgtatggcatctggtgtggtaggaatcgatgaaagaagataaaggtaagaccatactagt

SEQ ID NO: 10734 - DNA, 1501 bp, Oryza sativa
  ref <308>: DATABASE ACCESSION NUMBER: AK108082
  ref <309>: DATABASE ENTRY DATE: 2002-08-28
tatgtagaagaagtctttccatatctgtaacttagcacaattatactatgttaagctgattaaccttaaaatctgaactttttggtgaatgacaaggcgatagattgtccttgagataagttgggactttttgttatgatgaacatgtctcacttctgccttttactgcaggccatggattatagctggtggaaaggtaattgctacaaaaataagaaatgcaactcagcttctgagttgtaaacttggagaattggttccagaagcatggagggaatgcccaaactgcaaatgtcacattgataatagcgatgttactttacagtggccagaattccctgacggtgttaaatttgatccatctgatcttgaagtacttgaacatttagaaagaaaaattaacctgggaaatccagggcctcagggtcttattgatcacttcatcccaactctagaaaaggtggaaggaatctgctatacacatcctgaaaatctccccggtatcaagctggacggcaccagcagccatttcttccacagaatatcaaacgcatatggttctggtcagcgcaagcgtagaaagatcagccacaccggccatgctgcttctgacgagaacataagatggcacaaaactggaaaatccaacagatttaccataacggtgtcttaaaaggatggaagaaaatactggttctttacaaaggctccaaaaagaacaagatagtacaagctaattgggttatgcatcaatataatcttggtgtggaagaaggcggggaggacggagagcttgttgtttccaaggtattctaccaattatcctccaagcaaactggcacgcctgaaatggactctgttactgaagaagcatctgatgcactgaccataagaagtgatcccattacacccataacgaaccctccgctgcctcgctgcctgatgaacagcccgtgtgacacggagcagaatggcaccatttcacatgatcaggagggggaatgcagcacatccactctccggcccatggtagaagctggaaaccgtgcagggtgttctgctggagcgtcaacagccggggacttcaacgaagatctgctgcagcgctgcgagtttccggaggaccccgtcccaactcttgatgacacgctgccttttctttacacggacgaaacggaccttttcagctgggaagattttcaattcgggtcgcaggaaagcttcggctgggtggatggggatcacacgtaagtgatgctctgaggagttgtgggaagcagcggtgctgcaggaagacgccttcagggtttagggtctagggttcgccactctagtgagctgcaacactcttttagagctgcagcgctttttataagagtgacgaaatttggagtggtcaacccttcatataactgatctccgaaaattttgtatatggatttgcgtattaacaccagctctatgtagccgagcagtaagtatagtagtctctcttccccgt

SEQ ID NO: 10735 - DNA, 1436 bp, Oryza sativa
  ref <308>: DATABASE ACCESSION NUMBER: AK108083
  ref <309>: DATABASE ENTRY DATE: 2002-08-28
agacgcgtcgccactcttcacccaccattccagtgccgatccatccgagggagagcatcctcgctgctcttctccactggttctccatcgccggccacgaagaagacaatggccgcaatcgttgatgagccgcggttgtttcctcttctcttgcgttccatactctcctcaccatgccgaatatttctccttttgatttcatcctctctggtgcagccaatcggcgggaacgctgccgtgcacaccggagctctggagcgcgctctgcgcaccgccgcagcgacatcgtcgccgttgccatcaatctagatcgagccggagcgagccaccacgccaccagcttcacctcaacctcctctccatttcccctcaagaatcttgaagaatggtgctacgagtgtggagatcgtccaccgtcttctccacctccggtcgccgtcgccattgtcgattccgcctcctccgccgttgccgtcttcccggagctctacaccgtcgccggaccatcttcttctccgctgccgctgtccagactttccggcgcctcgttcaagatgattgcttaatcggtgaagaagtgatttaggtgctgatattttcctgattcaaggatttagacttagcctttgagtgatgcgggtgatcgactgcttcttctaggacttgaacttaatggggtaaagacaaaacaacaatggtagatgtatttgccgttgtcggagactgaggtactggagaaggagacctcattgctaccagggaatgatctgcaggagaagctgacgtagctgctactggagaagatggcctggaagctgacggagactgagcaactagagaaggcactctcacaataattgcagttgcatcattcatctcacaacaattcgctaaaatttatggtaatccatggaagaagcatggaatgtttaggcttacctctgaaaattgctcgtgggccaatgatcttgagtgcccaaggtgaaaccaaagctccttagccatgtgtggtgcaaaagaagaaagcaacagaacaaaggattcaataaactgactttggttgggtgtcccaccgtaagaagaaagcattataagagaagtaaaagaaacacgtttactagagtacagatattgtggccaatgccatgttaaactgatcttgtcatccattcttttacagttcaatttgaatattcaaggcatcctattgggttttactaacatcaggtttataaattgcaaaaggttatgtgcgaatttagcaagtgctaagcagaaaataaagaagtacatgcataaaagttcttaagcacattttaagcctttactgcacgaaagcacatatataagcttgtttggatttgaataattgcagtacagacatgaaagatctatgtactagaattgccttgtaaggggagattggaatatctatt

SEQ ID NO: 10736 - DNA, 1108 bp, Oryza sativa
  ref <308>: DATABASE ACCESSION NUMBER: AK108084
  ref <309>: DATABASE ENTRY DATE: 2002-08-28
aactctgccatttcgtcgattgtcctcctcttcccttgacggtgcaaagcagcatctccatcgcaatggattaccaccgaatccacccggtgggcgtcggctcgccggcgccggcgccggacagccagcagcaggtcggcaaggggaggtcgacggcgagctacggtgagaaggagcagctgccgatcaccgcgccacggccgtacgcgccggcaccgctgccgccgccgccgccgcggcgcaggagccgcgggcggcggtgctgccggtgcgtgtgctggacgctgctcgccgtactcgtcctcgccgtggcgctgggcgccacggcgggcatcctgtacgcggtgttcaagcccaagataccggacttccacgtggaccggctcaccgtgacgcggttcgacgtgaacgcgacggcggcgacggtgagcgacgcgttcgaggtggaggtgacgtcgacgaacccgaaccggcggatcgggatctactacgacggcggcgaggtgacggcgtcgttcaacggcacggagctgtgccgcggcgggttcccggcgctgtaccagggccaccggagcacggtgcgccccgtcatcctgctcgccggcgagacgcggctggacagcgccgtggcgctgcagctggcgcggcagcagcaggccgggttcgtgccgctcacggtgtgggcgcgcgtgccgatccgcatcaagttcggcaccatcaagctgtggaagatgaccgggaaggcgacctgcaacctcgtcgtcgacaacctcgtcgccggcaggcagatccgcatccgctccaacagctgcagcttcaagctcaaggtctgatcgagctttgtagaggcgttgatccatctccatttctgtgaatccatccgttgagttgagattagcaggtggtagaggcgcgtatttttacatttttaccaatactagtttctgtgaatccatccgtttttggaagctctgctactcagattaggtttaatgtatgagcaccgatgtatatatgaaaatgcatacgcgatgaatttctttgaaaatggcaataaagatggcgaatttgttcgtctggcatgccccaactgaagcaatttcagtat

SEQ ID NO: 10737 - DNA, 1343 bp, Oryza sativa
  ref <308>: DATABASE ACCESSION NUMBER: AK108085
  ref <309>: DATABASE ENTRY DATE: 2002-08-28
agacctcatccggctctcgagccgcgtcgtgcgcatcctcggccagaatcccgggccctacacgctcgccggcacaaacacgtacctcatctcgacgccgcccgtcgcgcacgcaaagctcgagtcaagaccctcgatcctcgtcgacacgggcgagggcaccgaagcatacctaccattgctcgagcgcgcgctcaaagggtccgtcgacggcgtgccttccaaggatgccgctcgtacaaatcaggatgccatggaagaggacgacgacgacgaggatgagctcaccgcctggatctcggacatcgtcttgacacacaagcaccacgaccacgttggcggtctgccttccatcctctcgctcctttcgaaacttcgcgccgaagcaaccgtgacgctcccggcaccgcgtatacacaagctgccagatccggagtccgatccggagctcgtcaagatgctgcacggcctgcccaagggctccttcattccctgctcggattccggcgatgcagcctcgccgctttggccgctccaatagggctccgtcattcaagtggctggtgccagcgaccagtcgtctctgcgcgtcttgcatacgcccgggcacactgccgaccatatctgcttggtgctcaacgaggagaagacgctgctcacgggcgaccacgtgctcggccagggcaccaccgtattcgaggatctcaccgcctacatgtcgagcttgcgcaagtgctctcgtgcgctcgaggagctcggaccctctttgcccaccaacgaagggacgagcacggctgcaacggagaaccgtctttacccagcgcacggtcctgtcgtcgaggaaggccgcaagatgctcaagcagtacctggatcaccgtcttgagcgcgaggcacaggtggtcgagttgctaaaggcatcgcccgacggtaactccatcacaacctcttctgtcacggtaggtgggatagagtaccagctgggtgcgccatggaagatccgacagatggtgctcaagctttactcgaactatccggagaatctgttccccgccgctgcgcgcgggctctatctgcacctgcgcacgctctcttcgccggaccccgagcaaggcaaggcttcgcgcgtgcggtgtctgcagaccacctcgttcgctcgcagggcgtcggcagaagcagcagccgacgtaggcaattgcccgcccttgccccagtccgaccacgagtggatcgaggccatggagctcgagtgggccctcatcgcgcctcagcaggcgtcatccaatcaccaacacttgtaacgcacgaatataccacttgtcaatgctactgtgccatcaattg

SEQ ID NO: 10738 - DNA, 600 bp, Oryza sativa
  ref <308>: DATABASE ACCESSION NUMBER: AK108086
  ref <309>: DATABASE ENTRY DATE: 2002-08-28
atgtcccgctccccgaccagcgtcctcaccgccgacctctgcaacggcgaggtcgcgtcgctccgtcgccgccgttcccttctgccccgccggcgccgggggtggacccggatgcattcccccaaggacatcgtcgccaagaacacgctctgacgggatcgaggtgagtgggaactgggaaggccccctcccatggtgaaccccaactccatggtgctccaggccctcgcggcggcgaatcgaggaggaggccgagaagaatgaagaggaaggcagggccgccgcggcttcaccaccaatgcttcttcttcttcttggtcgtcgtcgtcgtcgtcttgtatgtatacagatacagctatacacataattttaggatcaaaagacgtacagctatatgtatttctgggggctaatttcagtgcagagtgaattaatgcgttgttgctaattggattgctagaatatgtgtagcagagtgaaagctagtgtgaattgagaccattgaacaaatggtttagagataataacttagctgctttctttgaattgccacatgttcagttcaatcacctaattttatctgaaaagaaatgttcgatc

SEQ ID NO: 10739 - DNA, 997 bp, Oryza sativa
  ref <308>: DATABASE ACCESSION NUMBER: AK108087
  ref <309>: DATABASE ENTRY DATE: 2002-08-28
aaaaaaaaaaaaacaaagaaagaggagcgagacgtcaccgacatggagctctcgccgccgtcgccggcgccggcgccggaggggaggtgggccgacctccccggggacatcgccatctccgtagcttctcgcctccaagaggccgacgtgtgcgcgctcggcggctgctcgcgatcgtggcgccgcgcctgcgacgccgactgcgtgtgggaggccctcttccgccgccgctggccgctcgccgccgcggcagggggaggaggaggaggggaaggggaaggggcttctggtgtccagggttggaaagctctatacattaaccatcatagaagaactgctgttgctatatctggtgtggctgaatttgtggagaataatttgcgtaatgggtcacttgaagctgaatactatctgaaagctattgctaatttggcctcgatgagggatataggttttattgatgcccagttctttttgttgtcaaggaattacagtgcaatcatgaatctaattggattgcactactcaatttcatcactaaatataccgccaaatgaagtgtataaagcacttcaagctcggaaagtggaggaaaggaaagtgtgtgtgagcttatacaagcttggtagatggttctacggtttccggttgcctgatgaatccgagtctcatgaaatttcattgagtgagctcaccatgtcagagggggcaacaattctagccattcttaagcgtggtgctgttcatgaggtatttcgcctccaggtcagtttggtggacataaataagtaaactaaaagcatgcaagccctatcaacttgaccagctgtgcgtttttgtaaatatgtttaccctcttctgttttgatgttgatgcttttgtggcactcttcatgtaaatgggatcatagataaggatggaagtttgaaaccatctaggattgtaactgttccttgatagctcatatataataaaagtattgtgctgtgtaaattag

SEQ ID NO: 10740 - DNA, 878 bp, Oryza sativa
  ref <308>: DATABASE ACCESSION NUMBER: AK108088
  ref <309>: DATABASE ENTRY DATE: 2002-08-28
aaacttccgccggcgtgtgggcacatcgcaccggcgccccccgccagccagtcttcgcgtgcagctaccttgccgggctccgtctccatcggcttcgcctcctgctgcacagccatcacgtgccagcagtcctcgacatcgctggccacgctgcatggctaccggctgcacggctgtcagccacaacatgccggcatcggccagtcatagccccccccggccctcgccgtcacccacgcacctcctgcccctccgccgccgtcgcggcctccgcctccgtctccagcgcctccgcgctgttgcgcctgccgccgccagccacaccctccgtcactggcgcccgcaaccaccgcatccacaagatgctaccaccgccaccagtcgtcatcccgctccaccaccgccagatccggccgccgtggcgtcggcgccgccgtcgccatcccacaacaagtgcggtgggaagtgtgctagcacttgtcctcgccagatccagcgcgaatctggcggccttgtcctccgcagccagcgcctccaaactccgccgccacccccgccaaacgcagccgcctgaacgcccttccccgccaggtctggccggtcggcgcggatttgggcggtttccgcctcccaacgccgggcaatccccctgcccttgtgcggtgagacggagcgaagccccgccaccgctgtccttgtggccgtacggctttgccggcagctgctcgggcggcgacgaggtggaggagggagggcggtgggcgacggcgaacggggcgcctcccgtgtcacctgagaggaggtgacgcgagagtagatgctctagtttgtgtgataacagcttgctagttccataaataagaacaaatgaatcggcc

SEQ ID NO: 10741 - DNA, 791 bp, Oryza sativa
  ref <308>: DATABASE ACCESSION NUMBER: AK108089
  ref <309>: DATABASE ENTRY DATE: 2002-08-28
atcacccggctcttcgaggatcttcgacactaacaaacagtcaattgaatcaatatgtcggacggagaagaggttccccagcaggaggtcgaggcggccgaggaggtcgaggtgccggccgacaacgccagcggcagcatgtctgtcctcgacgcgctcaagggcgtgctcaagatctccctcatccacgacggtcttgcccgcggtctccgtgaggcctccaaggcccttgaccgtcgccaggcccacatgtgcgtcctcaacgaggcttgcgaggaggaggcctacaagaagctcgttgtcgctctctgcggcgagcacaagatccctctgatcaaggtccccgacggcaagcagctcggcgagtgggctggtctctgccagatcgaccgcgagggcaacgcccgcaaggtcgtcaactgctcttgcgtcgtcgtcaaggactggggtgaggagtcccaggagcgcagcatcctgctcaactacttccagaccgagcagtaagcgtcgcctcgacttacccgcttccaagcagcacacagcttgcggtctcggcattcttcgacaaacaaaactttctatcatgacgagtacatagttcacgcgatgacatttccggagacgaacatcgccaaaagtcatggtcattagcgagtgtatttggcagggttggaaggttgacgagtgtgaggaggaattatttcctttggcagcgtatatcatgctcgccagctgcatggctggagctgtcttgaaagtaaaatgggaaaccacggacattttatgttctc

SEQ ID NO: 10742 - DNA, 1063 bp, Oryza sativa
  ref <308>: DATABASE ACCESSION NUMBER: AK108090
  ref <309>: DATABASE ENTRY DATE: 2002-08-28
tactttccactctaccatcgcatctccaccagcgccggcaacacatacgacatcccatcatggcttcggaatccgcaagcgcatcccagtgggtctcgccatccacgcgccccgagcacatcgagcagctcatctccggcgtcgaccgatacaacccgcagaacctcgacgtgctccacgactacctcgcccagcagctcgacgatggctcgtacgacttgctcgccaacctcgccatcctcaaattgtaccaattcaaccctgccgacttcaactatgtcgttgtgatcaacatcctgctaaaggctcttgtagccgcgccgttcccagacttcaacctgtgcgtgtctctgctcggcgaggcgccattgtccaccgtgcccgtcaaggcagagaaggaggcgacggctggtgacgatgccggctcgctcgcgggcgacgaggaggaggcggtggcggagaagcccaaggacattgcttctgcgggccaccttacggacgcattgatcgtgcgcctttcgcagctcagcacgctgctcttccaggcgcgtttccgcgagttctggtcgacgctcaacagcgccgagtactcggacgtgcgcgagtacgccgccaagatcagcgagtttgaggacgcggcacgcaaggtggcgctcaactcggtcaagggctccttcacctcgatcagcgagaagcgcatcggcagctacctcaacctttcgggctccgagctggagagcttcgtcaatgcgcagcccggctggaagctcgccaacggcaccgttagcgtgcctgccaacccagacaacgagatcaaggccaccgtaatccgcgaagagatctcgctcgaccagatgcacaagttcctctcccaggcacagtcgcccatcctccgtgcatagatccgctccccccgcaccgcgcgtccatcaaggtctctcttggctcacgtaagagtggcaaggacgtccatcccaaaatcgagcctccttgacctgctttctcttgtttctgtaccatatccaagcatcagtctcggcccaaaaaacacgcatatccaagc

SEQ ID NO: 10743 - DNA, 665 bp, Oryza sativa
  ref <308>: DATABASE ACCESSION NUMBER: AK108091
  ref <309>: DATABASE ENTRY DATE: 2002-08-28
atcttttccacacagtctcaaccaccccccccatctacactattccaagatgagctacgtcgccaaggacaaggatgtcgatgcttcggcccctgctgccaagatccacaagatccgcatcaccctcacctcgcgcaacgtcaagaacctcgagaaggtctgcactgaccttgtgaaccgctccaaggacaagcagctgcgcgtcaagggccccgttcgtctgcccaccaaggtgctctcgcacaccacgcgcaagtcgccctgcggtgagggttccaagacctgggaccactttgagatgcgcatccacaagcgtctcatcgacctccactcgccctcggagatcgtcaagcagatcacctccatctcgctcgagcccggtgtcgaggtcgaggtgaccatcctctcgtccaactaagctgccactctggcagtgctagctggtcactggatgcacaggtggtccctcgcgcgtgaggttttctcagaagagtgcgtggagcaagcacctcgctccgcgctccctctcttttcaaaaggaggtggcactgcaagcctgcacggatacgtcttcattgtgcgccgtccttctgctcgctcacgatgcgcccccattggcccaagcttgggtttcacgaaatttcacgacactccttttcatcctc

SEQ ID NO: 10744 - DNA, 615 bp, Oryza sativa
  ref <308>: DATABASE ACCESSION NUMBER: AK108092
  ref <309>: DATABASE ENTRY DATE: 2002-08-28
gtggcttaattaatatacgcaagcacgatcaatgcctcctgtcaacgcgggcacggcggcgccggactccggcaccggcagcattgccgcgaacgacggcgacggcgacctgcacggcgagcagagcaagctggtcgcgatctccgacgaggcgccaaacgtcgacagggcgctcgccaccagccgcccggcgaccgccgacggcgcaggcggcggggacgacgtctcgccgagactgcggcggcgtcagcggcggcggctgctggagatcaagaaacgtggtctggaggtcgaggagcagacgctggcgctggagcagcggcggctgaggtgggccgccgcggacgccgaggcgcgcagggaggaggacgcggagctggagaagatgcgggtggagaacggcgtggcgagggcggagaacgcgcggctgtggaggcggctgctccggcggcggcgggaacgggagctcggcgtcggcggcgtcaggtcgaacaagtgtcgcgacggcgctgcagcaatggaaggagaagagaaatctgtaccgtagtgtcatatgtttcttttctcaatttttttctttttcttttttctctgaattctagaaaaaaattgttg

SEQ ID NO: 10745 - DNA, 904 bp, Oryza sativa
  ref <308>: DATABASE ACCESSION NUMBER: AK108093
  ref <309>: DATABASE ENTRY DATE: 2002-08-28
gacaacgccgccgtggggagcacttcccatcgtggtgcccttcctagaccccaagtcctaggcggcggcctcctgcgtctgcacctcctggagcgccgccttcggcgccgacggtctctgggtgcagctctgccgctcctagttcccgtccgcgctcgggctccttcacctgctcggcggcgccgaggctagaggcccccactcgtccccgcatcgccgcctcttcgggctgttccacgccgcctcccacggccagcaggtcaagcccccgctctcgccctcgacgacgtctccttcgccgtcgacatcatcggggccagcggcaacgccatcctctccttcgcagttgccgcccgagacgccggacccaagaacagttccagttcggggtggacacgagcgacaggaacgcggcgcttttgccgggggaacgctggagcgtgcggttgacggccgtgcgtgccggggcggggctcgcgcctacggcgttcgtgatggtgtacgcggagaataaggagatgcctgcgcccctcactatcggcattcgcttgcgtggggtgctccccatacctggctgcagcgcgcgcggcacgagcattctggtggcggaggtggagatcatggtgagcatagaggagaggtttgtgcgggaggttaatttctgggtgatgcagcctgactacaggcccaggttcgttagcatcgacgatgggctcagatacttgcagcaattcctcctgtgaaatgcgcgtttctcttttagccttcagggtcagtgtagcggtgatgaaccgttgttgatcggcagaacgtacctatgtgttttgcgtcgtaaatcgatctccgtgtttctgttgtaaatcgtcttagttctctctctggataataaattgcgctctaaatc

SEQ ID NO: 10746 - DNA, 1431 bp, Oryza sativa
  ref <308>: DATABASE ACCESSION NUMBER: AK108094
  ref <309>: DATABASE ENTRY DATE: 2002-08-28
acacacttcctatccatctctctctaatctaatcacacccacctcccccgcctaatctccaattacctagctaagctaagctccgaactcctctcgccatggcggaccggacgacgcgctcgacgccgccgccgcagtgggcggagctgccgacggactgcctcgtgcacgtgttccggcggctggaccttgacgagctggcgtccgccgcgccgctggtgtgccgcgggtggcgccgtgcggccgcggacccatcgctgtggcgggcgctcgacctgcgccgcgaccacctcgtccgcttcatgccgtggggcgcgctggcgggcgccctcgcgcgcctccacggcgtccaccgcttcaccctcgccggcttcctcaggctctgcgtcgcccgcgccgccggcaccgtcgccgacctcgccctcccgccgctactctcctcgtcggagctcgaccacgtcgccgccgagtgcccggcgctgcggcggctcgcactgcccgagctcccccccgccgacgacgcgcgcctcccgtcactcctcccgcggtggcgccgcctcacccacctggagctcgactccaagccgtcctccttcccggccgtcgccgcggcgctcgcgctgcactgccccgacctcgccgtcctcagggtcacctccggctccgtcaagcccgaggacgccgcggccatggcggcggcgtcgccgctgcgtggccgcctccggtcgctgtgcctggaccgctgctacctccccaggcaggagctgctcgccatcctcgccggctgcggcggcgcggcgccgctccgcgagttcacggcgaggttctgcgtcggcttcgacgacaaggacgaggaggtgctcgcgcgaggcgccgccatcgagcgcttcgacatcggagggtccagattgctcgacgagcccgacggcgacgcgaccaacggtgatgattactgcgactcctcctacgtcgatgtcatctgattttcttttaatacttttgattttctttttcttctatatatataggtgtatacgtgtagtcagacgacgtgtaatttttgtgagcattttctgaatttttctctagaaagaaagtgtttgatttatccggtattgttgcatctggtctttcaatggctaaactagctagctcccgggctgatcggacgactatcatgtgtagtaattaaaaatcattatgagaaattgttgtcagatagtaaaatctatttagatgtctagagcctcgactacatcgttggctcagccaatgttggccttgtatttgataggtgtcaaagtagttgaagtggttgacagggcatttctttcttttggatgggattttttgtgtttacatttgggtgtacagatagtttggtgtatataggtaacgaccaaagagttgtgcagctcatgtagggctgtt

SEQ ID NO: 10747 - DNA, 570 bp, Oryza sativa
  ref <308>: DATABASE ACCESSION NUMBER: AK108095
  ref <309>: DATABASE ENTRY DATE: 2002-08-28
ggcgtacggtacggggactactggttcccctcgcctcgcggcggggcgcggccgcggcggcaatggcgcatcaaattagggtttcgctctcaccctcttcctccttctcggcccccacccggcgcggctcgcaaggtgcacatgcccactgatattggaggaacatagatggtgaggataatggagtacatgaagaataaagtgggtgacaagtgttgggaagcgggaacatagtgttggagaggtctttgagtccaaagcacaatggtgtcgcgactcgtgtacaaatggtgcatatcatatggtgggggtggtgatgccgattgaaagcagtgtggcaagttcgatgcggacatctagtacggcagcgatttttctttttcaagataggcacgccaccgtgctagcttcctcccctctccccttagcagaatcatgcatttcgtaccgtccttgatgacttctcttattctgctgcttaagctctgctttgccatatgctttatagcctgctagaatttgataccttgagatttttcagaataaagatttgcaagacgttccccatcc

SEQ ID NO: 10748 - DNA, 1294 bp, Oryza sativa
  ref <308>: DATABASE ACCESSION NUMBER: AK108096
  ref <309>: DATABASE ENTRY DATE: 2002-08-28
atgcatgctgcatcgcgatctccacttcactaaccactatatactcactagctagctagctgcccagcttcgctagtgttgaggatgacgatgtcggtgagcggcatggcgtgggcgcacgcggtgatgggctgggcggcggtggcgttcgccctcttcgtcctcgccatcaccaccgccgacgcgtcgtcgtcgcaggggccctgcgccgcctacggcggcggcagcggcggcgccacgttcatgcgcgccggggcggcgctggtgctgctgtcggcgacggcgcaggcggtggcggcgacggcggcgcgggcggctgcgaacggggcgcggttcctgtcggggttctttgccctggtggcgcacttcgccggcgcgtacaccgccgccgtcctctccgagctggtccccgtcgtggtcgccgccgccggcggggtctgcgccgcgtccggctacaagcacatgctggtcgcccactacgtcgttctcgacataccgctcatcgtcttctacctcgccggctttgtcgcgcttattaatcagtatcatctagaataggctagctatatactccctcatcccctaaatatttaacgccgttaaccattttaaacatgtttgaccgttcgtcttatttaaaaaaatttgtgaaatatgtaaaactatatgtatacattaaagtatatttaacaataaatcaaataatagaaaaaaattaataattacttaattttttttaataagacgaatggtcaaatatgtttaaaaaaagtcaacggcgtcaaatattttggaacggagggaatatatataggttagctacatctacatgcactgcaccatgaataatttatagttcctctggttctaaatattcgacgcgttcgatttttttaaacatatttaaccgtttgtcttatttaaaaacttttataaaataatatatatatacataaaattatatttaacaataaatcaaatgtataaaaaataattaataattatttaatttttttaaataagacgatcagttaaacatatttaaaaaaatcaaaggcgtcaaatatttagaaacggacgagagagtactatgcaatgttgatcgatcgatggatcggtacgtagttcgttgatgttgccgtttcagtcctacgctgatcgaatgtatagcaagtttgttttatgtgccagccatatgtaatgtacgtaatatcgatcgatcgatcttgcaacattggcagtgtcaccgtattatttatcatctcatattatatatatatatatcattctgctt

SEQ ID NO: 10749 - DNA, 859 bp, Oryza sativa
  ref <308>: DATABASE ACCESSION NUMBER: AK108097
  ref <309>: DATABASE ENTRY DATE: 2002-08-28
atccatcaggtcttccacatacattttgctgtctcgccaccggagacaggtagtatagctatggccggtcaggtgttcgtccatcacctcggcggcggctccggcggcgacgaccccacccacccatggctgtccctcaagtcgtcccatgagatggacgacgccgtggcgagctggcgcgagaagctggcggacatggccgccgccgacgaacgcgccggcaggtacccgtgcccgctgtgcgaccgccacttccccacggagaaggccgtgcacgggcacatgcgcagccacccggggcgcggctggcgcggcatggagccgccccgcgagccgtcccccggcgacctcgccctcgccgccgacgggaagcggtaccgctacgtgtgcgaccgatgcaaggcgccgttcgagacgcggcaggcgctgggtgggcaccgtgccagccacagcaccaagaagggctgctcctggcacgccaagcagctcgccatggccaagccgcccaagaacgacttcgacctcaaccatctctcacttgaggccatccaggcggcggcgcaagaggaacaagctgctcaagaggggaacaaggatgaggagcctaagaattaattaattaggaataattgaacttgcttagggttcgttcggtcggtcgatcgatcgacttcttgtgcttgcgttgcgtcggtctgggcttgtgttggttcgtagctagccaactccatggctcatgcagcatatgcacatatgtctctttctcttctttttcttttttagtttttgtttctctttgattttttgtaagctcgatcgatcgacaagaaaaataaacaaatattgcaacctggatgat

SEQ ID NO: 10750 - DNA, 1042 bp, Oryza sativa
  ref <308>: DATABASE ACCESSION NUMBER: AK108098
  ref <309>: DATABASE ENTRY DATE: 2002-08-28
atcttgagtcggaccatcgttgtctcgttctcctcttcttccgtcgccggcgcggggagctgctcgtcgccggcgcgcggtgatggcggaggactccggcgccatcctccgccacatatcctccctcaaggacatgcttgacaagtctcatcatggtggatccattcgccagcgaagggagtcagtatgacccatccaaggatcctgaacggaagtctaagtcaaaagatccgggatggaaatactgcttctggccagacttgagcaacagagatttgatccactgctcgctttgtggcaagcaaatgattgcaggattcaagagagtcagcaacatcttgcaacaggatttggagatgtgcagtgcagcggtgccccaatactaccacagctatcatgaaagagatgagagcatatctgaagaagaattcgagaattggcaaatatctcaacttacacccctcctcttatcggccaatgccaagttctgagacagctgccaaaaggaaacaagctcctgacgctcttcaatttggacgaccaaccccaaaacaaacaacatctgttgcttctatgctttgcaaggcacctgaagaggttgacgaagatatccatgccaaggggccttctcaatctaccattgagcaatgtacaaggcagtacaatggaaaacaaatggtccatcagcaaatagcaaatttgttttctgaatttgacataccatttgctgctgcgcactcaaggagctttgagactatggttcaatccatcatacaatttggacctggttataagcctcctagtcatcaggattggtgggttccgttgcttgttggggcaaaggagactacgttgggagccagtggtaatatgggagatttgaatgaatcggacgatgatatttggtagttaagaccagaatcatttacctatgatgtcatgctagtatactattatgctgtttatctgtctcggagaacgctgatgcttatgacctatgtacttttggtggatgatttttgctatatttattacctttgat

SEQ ID NO: 10751 - DNA, 2224 bp, Oryza sativa
  ref <308>: DATABASE ACCESSION NUMBER: AK108099
  ref <309>: DATABASE ENTRY DATE: 2002-08-28
agctcccatcatcgtcatcactagcatacatcaagccaccgcgcaagacgcgaccggtagctctcgaacatttgcgagcgaacacagcggtgctgctattcctacgcctgcacttcccgcccagcgagctgctcgttgtcggcacgacagcatggctgccgccgacgggacgagcggcacggacccggcccacgagcttatccgctgcctagcagggctccccacctcggagctggcgcgctttacgctgcagcgtccggaagtcgctcgcgtctttgctgcgtcgctcaatgcgctggccgtgcataccgcctcgagcctcgtgccgcccgccaacgtacactcgcacgcgcagagctacgtcgagatcctcgcacgactcatcgagcgcggcgatccgtccctcgcaaggacgttcgtacccacacacggcgcgctcgtcgacctcgccatcgtcacgccgccaacggcaacgcccttgctggtggcggttctcgaacgcctgctcgacacgagcaacgcgcagcagatcctcgcagggttgcacgcgcagctggaaagcatcgcaggctcgttgtccgaagatggcagtgcggtggtgttgacgcgtacgctggctaggcttgcatatgcattcctcagcgcatgccctgcacgactgctcaaggacagcgcagacaccctcgccgcgttcgcgcgaacctgcttccagctctacgaccagacgcttccgcacgccgctagccttgcaggtggtgcaggcgcacgaggctcagcgggcgaggtgcttagtttggacgcagcgcaggtagacacaggaagctggcaggcacagtggctgacgtgccgcgtcgacgtgctgcagctgctcgtgctcgtgctggccagcctcgagagctacatcgcgctgacgggcgagctcaagcaggcgctcgtcgttacgcagcagctgcttgtacgaggcggatcgtcggcgctcatcaactcgaccgcactactcgatgtggctgcgacggcggatgcgtggctcgcagtgcgcgcgcaaatcctcgccgcgcttgccaacgatcgctcgtacggggagaccttgtcgtccatcgaggcgctcacgtcgacggtgcccagattcagcggcgcagcatagtcggttctgcagcgtctgacttctggcccgcgtgcaccttcgtccgtagcgacggcgacggcggcggcgggggtatcggacgaggtggtggcggcagtcgactcggtgctgccacactacggcgtggcgcggcttcgcaccatccttgctcagccgtcgtttgtggggcagaatgcagagatggtcatccagcgtctgctggaaggcgacgagggtgccgccgtttccgcgtcgccgagcgtggaagccggagcaagtacatcgcatcttgcgcctgcgatggaggcctgcgcatccgaggttgggcggtcgctggtcaagtcgcgagcgaacgtgtttggtgcgtttgactttgacgcgtcgacgatcgcagcatccaagacggcgcgtacggcgcgggtggatgagctgacaccctcgctgaaagcggcgattctggcgcgtgccgaagcggagtcgtcggacgaggacgaggagtggaatcccttcgcggccccggcacgcactgtgggtgttgaagacgagcttgacctcgatgaggatggacgcgaaacgcgcgccgcgtcggacgacgaagacgatgcagaggccaaggtgcgcgagcgaatgctgttgcgccactacgtcgaacagggagcttcgtctttcggctcggatgccgcggctagacgcagtgcagagaggcagaagctgcgcgatgcaacaggatggtcggacgacctgctcgagtcgtgggcagtcatgctggatcgtaatccccgcaaagatcggctgctcgctgcggcgtcccaggcccaactggatgaccatcttgcatcagtcaatgcggcgcgagaagaaaagctcttcggcccagataagggtcgcggcggaagaatgcccaagcccaatcctcaaccgggcaagacggggcagggagttcccaaacaggcaccctcgcaacgcgcagccaaacacaaggagaaacagggcaacaaagcgcgtcgacaaggccacgacaaaaagatggcgcgcgtcaacacctagaacacaccccgccatcatttgaggcaatcaaaaagcaagatgctgtgcatttct

SEQ ID NO: 10752 - DNA, 1319 bp, Oryza sativa
  ref <308>: DATABASE ACCESSION NUMBER: AK108100
  ref <309>: DATABASE ENTRY DATE: 2002-08-28
acattctctcttccagctgccaccctgttgagttttgcttgcacagagtcacacagctgggtgatctcctttaattaggaatttagggaggctgtcagttctgaaccccaatcataaaaccatccctggtttctctgtcctgtcctgccatcattcctgcctgcttctgctttctctctcttctcttctctcctttcctcttgagaaagaggaaagggagagagaaagaggagaagagcaatcagcccaagaaggagaggccttcatcttcacctgatcggttcttcttcttcttcagcaggcagcatagtacttcatggctggacaaggccccgtggtgcccaaattcggatcgtgggacgccgagaacatcggctacaccgtcttcttcgacaaggtgcgcgagaacaagaccgcgcccacgccggcgacggcggcgccggcgacgcacgacgacgactacgagttcgatccctacgagcactacgagaacctgagcaggaaagcggcgtcgcgcccgccgagctcgcacggccacgggcacggccacgcgccgccgccggcgcaccaccaccaccaccaccgggcgccgccgccgccgcagcagcagcagcatcaccaccactacccggcgtcgcagcgtagcggcaatggctaccaccggaggagcggcagcaacggcagcagcgcggcgtccgaggccagcagccgcggcagcaagttctcgccgcccaagccgtaccagccgcggtacagcagcaacagcaacagcggtggcggcggcggcggctacgggtacggcggccccggcgccggcgcgtacgcggcgccgccgcagatgcatcaccaccaccagcagcagcagcacgccgcgcagccgagggtggccgcgtcgccgccgcgccacgcgctgccgcaggtgagccgcgccgcgaaggcggcatcggccgtgcccaagttcggcgtgtgggacgagcagaacgcggcggcggcggggcagggcttcacggtgcagttcgagaaggtgaagcggcaccgggaggttgcgaaggccgccgccgccgccgggccggacgtcacgccgcgcatgtcgccggcgcaggcggcgccggcgcggcatcctcggagaaaagccgagaagaggtccttcttatcaaaggtgtacaggtgcatgttcccaagggtgagggagtgatgcagaagctggatttgtattattaatccgaccttaattaattactgtaaaactcccaatcgtatacgtatttccgacaggaaatgtactgtgtaattaattaatttgttcgttcttgttcttt

SEQ ID NO: 10753 - DNA, 717 bp, Oryza sativa
  ref <308>: DATABASE ACCESSION NUMBER: AK108101
  ref <309>: DATABASE ENTRY DATE: 2002-08-28
aacagcaatggccatcatctccattgccggccatctccttgctctcatcctcgcggtggcggtgccggcctcggccggtgggctcccggtgcggctgcggttgtacatgcacgacatcaccggcgggccggggcagacggccgtgcaggtggtgaacggcaccgggccgctgcacccggccatgccgccgggcagccacttcggcgacaccatggtggtggacgacctcctcaccgacgtcgacgactccaagcccgtcggccgcgcgcagggctcctacacgctggcgtgcctgcgcgcccccgtgtttgtggtctccatcaccctcgtcctcaccgacgggccctacaaggggagcaccatcctcatcgccggccgcgacgacatctccgaggaggtcagggagctggcggtggtgggcgggacgggcaagctccggcgagccaccgggcacgtgctgtggacgacggcgaggcgggagtctccggtgcacatggtgctggagctcgacgtgtacgcgtgggtgcccgcgtcatcttctccggctcgccgttggtcgtcactgctgcgtggcacaaacgtcgtcacggctgatgttgacgacgctgattcttatttctaattactatactttactactcgagttggttgtgcatttgtcgcaaccgcaacaaacattttccttcaataataagaaaaaggacaaaatgattgatc

SEQ ID NO: 10754 - DNA, 1191 bp, Oryza sativa
  ref <308>: DATABASE ACCESSION NUMBER: AK108102
  ref <309>: DATABASE ENTRY DATE: 2002-08-28
accaccaccacaacaccctcatctccggagtcgacgtgcacctagcaccgttggcagaccttcgctacgatggagtttgtttcgcagcagttcaactcgaccgtcgggtcgctgctcaacccggccaccacgcagctggcggcggacctgtacaagaacacggatctggcgtcgctcaacgtcttcgaaaaggcatgggcgaactggtacctgtactggggcaacccggtactggcgacgggcatcatgtcgtttatgctgcacgaggtggtgtactttggccgtgcgatcccgtggatcatcatcgacgccatgccgagcatgcgcaagtacaagctgcaggacgacaaggtacccaccccggagcagcagtggaagtgcaccaagtacgtgctgctgtcgcactttaccgtggaactgccgcagatctggtcgttccaccccatctgcgagtactttggcctggcgacgcacgaggtgcccttcccgcactggaccaagatcgcatggcagatcgggctcttcttcctgtttgaggatgccttccactactgggcgcaccgcgcgctgcactggggcccgctgtacaagcacatccacaagaagcaccacgagtactcggcacccttcggtctggcggccgagtacgcgcatccgctcgaggtgctgattctcggcatgggcaccatcggcggaccgttcatgctgtgcgcgttcaccaaggacatgcacatcctcaccgtgtacatttggatcgtgctgcgcctcttccaggcgattgacgcgcactcgggctacgacttccccatctcgatgcacaactggattcccttctgggcgggcgccgaccaccacgactaccaccaccaggcgttcgtcggctgctactccacctccttccgctggtgggacagcttcatgggcaccgacctctcgtacaagcgtgctcgtgcgcgccaggccgagaagaagcgccaggctctcgagggcagcgccaaggcggccaccgccaaggctcagtaagctattgctggcccgcccgctggcattcctttacggacaccccttatctatccctaacgctccatctttggcagtgtcccgggtgggctcctcgctcgcctcggcctgccactaatcacgcccgtccttgtacatagccagcatgtgaatcttgcttatccccccgct

SEQ ID NO: 10755 - DNA, 844 bp, Oryza sativa
  ref <308>: DATABASE ACCESSION NUMBER: AK108103
  ref <309>: DATABASE ENTRY DATE: 2002-08-28
agctcactctagctctagctaaagcttagccatggccagcaccgcccgcgtcgccgccgcgctgttcctcctcctgctcgggctctccgccacagcccccctcgccgcccgcgacctcatgtccgccgcgccatccgccaagaagcagccggcggggaggaagccgtccgtgcagccgggttacccgggcaccaatcccggcggcggcggtggcggcggcatcccgaccatcccggggttcgggagcatcccggggatgggcggcggcatgggcgggttcaacgtgcccgggatgggcggcgggtggggcggagggtacggcacgccgagcggcgggtactcgcgcggcggcgtggtggtgcccacggtggtgtgctccgacaagggcccgtgctacaggaagaaggtgacgtgccccaagaagtgcttctcgtcctacagcagctccggcaagggctacggcggcgggggcggcggcggcggctgcaccatcgactgcaagaccaagtgcaccgcctactgctgaatctcccaaacgccgagttcgatatatcggcgccggcaccacggattcactgggttctgtgaagagtacaagtagggtgtgtgatgaagaggatatatatatatatatatatatatatatatatatatatatatatatatatgtgcggttaaaagtttgaggtgatgctttctggtgtttaattaattagctataatcagatcagatgcatgcagtgtgttcttgtttaagttcctttctctgtttattagctggttgtggtacgtgtgtgtggtatagtacatcgccatgaatcaataaagagaactagctatgtgt

SEQ ID NO: 10756 - DNA, 607 bp, Oryza sativa
  ref <308>: DATABASE ACCESSION NUMBER: AK108104
  ref <309>: DATABASE ENTRY DATE: 2002-08-28
attcgatctcctcaagcgttggcattcccaagttgttatcattcaacagcgtggtatatatagggatcgaccgaaacagccatggcgaactgccgcaggaggatgacctcccctctctcgagtttggtcgccgtcctcctcatcgtcgtcgccgtgcagtcccgagcatgggcgttggatcagctggatgacatggtgccgatgaagacggcgaagccggtggtggtggccatcgccggcggcggcggcagcggcgtagtagggacgttggcggcgccgttgtgcctgcagtgccggtgctgctcgaaggcgaacccgagcaactgccagctcactagctgcagctccaccttcaactgcgaccctgccggcaagtgcaccctcgtccagcagcgctgcggctgctagctgcattcctagctagccggcgagccgagcgtgagctaatgcattggatgccaaagatagttcttgctgaaagtataagcatgtatatagagatttaatttatgtcatcaataaatcttggcgttaaacaaagacaaactgattaaaaaaatgtggaacttaatataataaatgcgtactggtggttctgttctggatg

SEQ ID NO: 10757 - DNA, 1650 bp, Oryza sativa
  ref <308>: DATABASE ACCESSION NUMBER: AK108105
  ref <309>: DATABASE ENTRY DATE: 2002-08-28
cttctcgtacttgtacgatttccgaccatcaccatgaagtgtgtcgtattctgcctcgccgtcgttctgggtgcggcttcggccgtccccaagtgggctgactacccatgccccggcgcctgcccgcaggtctacaagcccgtctgcggaagcgatggcgttgaaacgaagactttcagcaacgaatgcgtcatgcgggcacatggatgcctcgagtcccaacgattcgaagtgaagagctccgatgtctgccctgaggagcatgtgcccgaggttaaggctgagaggcccacccgcctctgcggcgcttgccttatggtctgggagcccgtgtgcgccagcaacggccagatcacgaagaccttcagcaacaagtgcgctctccgagttcacaactgcaaacaccctgaggaagcccagttcgttatgagccgctccggcgagtgtgacggacaagcagttgcccagcccttggccgcggttgaagttgagaggcccgctcgcctctgcggcgcttgcctcatggtctgggagcccgtgtgcgccagcaacggccagaccacgaagaccttcagcaacaagtgcgctctccgagttcacaactgcaaacaccctgaggaagcccagttcgttatgagccgctccggcgagtgtgacggacaagcagttgccaagcccttggccgcggttgaagttgagaggcccgctcgcctttgcggcgcttgcctcatgatctgggagcctgtgtgcgccagcaacggccagaccacgaagaccttcagcaacaagtgcgctctccgagttcacaactgccaacaccccgaggaagcccagttcgttatgagccgctccggcgagtgtgacgaagcacaagcagttgcccagcccttggccgcggttgaagttgagaggcctgctcgcctttgcggcgcttgcctcatggtctgggagcccgtgtgcgccagcaacggccagaccacgaagaccctccacaacaaatgcgctctccgagttcacaactgccaacaccccgaggaagcccagttcgtcatgacccggtccggcgagtgtgacgcacaggcagttgccaagcccatgtccttcaacgtgaacctggagaagcccgttcgcgactgcggcgtgtgccccctcctgtacgcccccgtgtgcgccagcaacggccagaagatgatgaccttcagcaacgactgctccctcagagtttacaactgcgaacaccccttggctgccaaattcgtcatgacccgttccggagattgcgaaaccgatgaggttgtcgagcccatcgtggccgagcccgttgccgagcgcaagcccgactgcggtatctgcaccttcatctacctccccgtgtgcgccagcgacggcaagacgacccgcaccttcggaaacaagtgcaccctcgactcttacaactgcgagaaccccaacagtgccaagttcgtcatgacccgcgctggagagtgctaaacatttgtagcagggcttgtattttttttacatgaagggtacttcctgtgactcgatcaacagagctacaagaatactattttgtttatatcgctaagtcttcatattttttcaccttacttcggtatcatatgatatgaaataaaatgaccaacatgt

SEQ ID NO: 10758 - DNA, 1252 bp, Oryza sativa
  ref <308>: DATABASE ACCESSION NUMBER: AK108106
  ref <309>: DATABASE ENTRY DATE: 2002-08-28
aatcacctacaccatcttcacgtgcacaacatgtcattcgccactccagccgtgcgctggcaagatacggtggcgtcgcatctcccgcagccactcaaggattcaggagtgccgccgcagtactttgtgcttgtgcccgccacgctgctggcggtgctgctcacgtacacgctcacacgatcctcgtccaagtcggcagcacacctggtcagcgctggcggctctacggacgacgagtatacgacaaagcggtcgcacaaccgcgcgtcgaccgtggtgctggtggggctgagcgagacgggcaagacgtcgctcttctcgtcgctagtataccagaccacgcccgcgacgcttccatcacaaaagctctcgcagggcatcgttgcgccatcttcgctcgacggaggactgaagccggtgacgcttgtggatgtgcccgggcacgcgcgtctgcggccgttggtggacgagcatctgtcgcaggcggacggactggtgatctgtgtggatgcagtcatggcgtcaaagaccagcctctcgtcgcgcccgggcgacgccgagtcgatcacagacgtcgcggacctgatccacgccacactcaccgcgctcgccaagcagcgcgcgcggtcgtcgtcgcgcacagccccaccgtcggtgctggtgctcttcacacgcgccgatctatcgcccctcctcggcggcgccggcgcaggcacggacgcggccaaagacgacaagcgccgtgcacagctgctcgcacgctgccgcaccgcgctcgagtcggaactcggccagcgccgcgccaacatggggctcggcacccgccgtgcgggcaacgtaaaaatcgccgggctcggcaaggtggctgaagccgacgacgtggtcgccagcggcggcgtattcggctggatcaggagcaagctcggtctcggtgcctcgggcagtaacgtttcggcagatgcgcaggaggaggacgacgagcacgacgacgaggtggtcgactacatcgactgggccgcggcgcagcgcgcgcaggcctcggacggagccggcatcggcgcggccggattcagcctcgataggctcgacgagcaggtcgtgtttggcggcaaactcgatgtggcgctcgcgagtgtcggcaaggtgcgatcgtgggcccaagatgccacgcccgacactgaccccctcgccgatttcaagacatggatcgccgacctgcaaagctagcaccgcaatcaatctctcatccagc

SEQ ID NO: 10759 - DNA, 1131 bp, Oryza sativa
  ref <308>: DATABASE ACCESSION NUMBER: AK108107
  ref <309>: DATABASE ENTRY DATE: 2002-08-28
aggctccatctcagtagctgacgtcaccaccccagcgtccacacgcgcaccgcatggcttctaccgacgccgacgccgacgcggtcgccgtggagctcctcccgttcatccgcgtctacgtgagcggccgcgtggagcgcctgctcggcaccgacacggtcgcggcgtccctcgacgagcccacgggcgtggcttccaaggacgtcaccgttgacccggcgaccaacctctccgtgcgcctctacctcccgccggcggtcgccgccggcgagaggctgccgatcctcgtgtacttccacggcggcggcttcatggtcgagtcggccacgtccccgacgtaccaccgctacctcaacgcgctcgcctcccgcgcccgcgtcgtcgcggtgtccgtcgagtaccgcctcgcgcccgagcacccgctccccgccgcgtacgacgactcgtgggcggcgctcgcgtgggcggtcgccaccgccgccgcccccggcgccgtcgatccggagccgtggctcgccgcgcacggggacgcgtcgcgggtgttcatcgccggggacagcgccggcgcgaacatcgcgcacaacgtcgccatgcgggccgccgccgccccgctcccgggcggcgcggggatcaccggcgtgctcctgatgcacccctacttctgggacgcgtcgaacaccatgggcccggcgctcgaggaccggatccgccgcgagtggcggttcatgtgcgggagccccgacgtccgcgtcgacgacccgcggctgagcccgacggtgcagcagggcgcgccgtcgctggcggcgctgccgtgcaggagggtgatggtggccgtggccggggacgacttcctggcggggaaagggagggcgtaccacgcggcgctcgtggcgagccggtggcacggggaggccgagctggtggacacgccgggggaagaccacttgttccacctcacgcgtcccggcacggcggcggcggcgaagatgatggacctcgtcgtggatttcgtcactcgttgattgatgacttggtgctgcgaccttcgcgtcgatcgggtactcgtgtcactgttgcgtgaaattgatgaaataaacaagcaaataaaatgatggcgccattgccattgcc

SEQ ID NO: 10760 - DNA, 1344 bp, Oryza sativa
  ref <308>: DATABASE ACCESSION NUMBER: AK108108
  ref <309>: DATABASE ENTRY DATE: 2002-08-28
actactcgagccactggcactagtggactagtagagcgtgcatcttgatcacagtaaggacaggtagagagtcagcagtgcttctcacgtccgcgagcgagaatggtcgctgctctcgtcgttcctctcctcgtcggcctattggctgtggctgctgcaccggcgccggcgtccgcggagcgggccttcttcgtgttcggcgactccctcgtcgacaacggcaacaacaactacctgatcaccacggcgcgcgccgacgcgccgccgtacggcatcgactacccgacgcaccaggccacgggccggttctccaacgggctcaacatccccgacattatcagcgagcatcttggggccgagcctgcattgccgtacctgagccctgagctccgaggggacaagctgctcgtcggcgcgaacttcgcgtcggccggcgtcgggatcctgaatgacaccggggtgcaattcgtgaacataatcaggatcggcgatcagctgcagtacttccgggagtaccagcgcaagctaatggctctggtcggcgaggagcaggcgaagcggatcgtgaatggtgctctggtgctcatcacgctgggaggcaacgacttcgtgaacaactactacctcgtgcccatgtccgtgcggtcgcgccagtacgccatccaggactacgtcccgttcatcatctccgagtacaggaaaatcctctcgaggctgtacgagctgggggcgcggcgcgtgatcgtgacggggacggggccgctggggtgcgtgccggcggagctggcgctgcacagccgccgcggcgagtgcgcggcggagctgacgcgcgccgtggacctgtacaacccgcagctggtgaacatggtgcgcggcctcaaccgcgccatcggcgccgaagtcttcgtcaccgccaacaccaaccgcatgaacttcgactacatctccaacccccagaactacggttttacgaacgtgcaggtggcgtgctgcgggcaggggccgtacaacgggatcggactgtgcacggcggcgtcgaacgtgtgcgacgacagggaggcgttcgcgttctgggacgcgttccacccaacggagaaggccaaccgcatcgtcgtcggccagttcatgcacggctccaccgaatacatgcaccccatgaacctcagcaccatcctcgccgtcgacgacgaggaacggcgcctctagataaatagatagatatgtacaccgatcatcgatcgatcgtcaggactatactagttaccatcaatggcacggagtataatacactctccacgtgtaacaatttcagttgtttctagtgtatctgttggctgatttcag

SEQ ID NO: 10761 - DNA, 785 bp, Oryza sativa
  ref <308>: DATABASE ACCESSION NUMBER: AK108109
  ref <309>: DATABASE ENTRY DATE: 2002-08-28
gagttagcccggccggctcctcgtctcccttcccgtgtcgcctcgccgcgcgccgccgcccgtgtgtacgtacgttacgttacttcctcgtgccgtgcgttgctgaatactagtatgacggttcgctcggagacgggcggcgcggccaccaccaccaccgtcgtcgtcgccgccgccgtcgacgcgccgcccccgtggcggctgcggaggcagcgctccgtcccggccgccgtcgtcgccaccttcgccccctgcgtcggcatcggcggtcaccacgcgccaagaagagtccttcgcttgggagggaataaggcggcggcggcggcggcggtgcaccaccgccgcggcgaggcggaggaggagggggagtacttcgattccggcggcggcgtgggtgtcctgcgtgcgctgtggaggaggatcgtgagggggaggaggtggaaggtgatgagccggagcgggtcgtcgacggcgaggaggagggagcagtacgcgcaggacgagtacgagcagaacttcgacgagggcgccgccgcggccggcggggagcccgagccggagtacctctcgcgctccttctccgcccgctacgccgccgccggcggcggccggcgatccgccgggctagcgcgctttggcgtttcgcgcgctaattaattattaatcgatgtcgatggtttaaaactgtcgatggcgggtaattcgaacctcgttttgctttgctctcgatatgtaaattaaatttgtggaatgaattatgctgtcctaatccatcgatcgaaatg

SEQ ID NO: 10762 - DNA, 1272 bp, Oryza sativa
  ref <308>: DATABASE ACCESSION NUMBER: AK108110
  ref <309>: DATABASE ENTRY DATE: 2002-08-28
acacttctttcacatcccaagcagttcacaatgagagctctggtggtcgcagttttggccttggcggtagccgttgcagctaccaccagtgacgaccagaggaagaaacgaggtatctatggggagggcctcgctctgggagctactggatatgcctcgggatatgccttgggaggtgcagctcttggactcggccacggtctggctctaggtggtcacggtctggctctaggtggccacggtctggctctaggtgcccccgccctcggagccgcacccctggctctcggagccgctcccctggctctcggagccccagccatcgctgcaggacctgcccttgctcttggagccgcccctgccttcgctgcggcgccagccattgctgcggcccccgcacctttggccttggctgctgcacccgcccccgtcgccgtggctgcacccgcccctgtcgctctggctgcagctcccgcccctgtcgccattgctgcaccagctccagcggtttccgtcgccccagccccctctgtgtcctatggaacccccaccaccaccgtccgcgacggaggaccaactgtccgcgaaggcgaacagatcggccagccctacttgatcagcattcacagggacaccatccgccgttacggcatccccgtcgccaagccctaccccgtccccgtccaccgcaacgtcgaagtgcgcatcgagaagcaggtcccctacaacgtcgacaggccctacaatgtccaagttaacgtacctaccccggtcgccgtagacaggccctaccctgtgcccgtcgacaggccttactccgtccaggttccccagcctgtcccagtgcctgttccccagcctgtggctgtccccgttgcccagcctgttcccgtcccagtgcctcagcgcgtcgttcacgttgctccccctcaggtcatccgcaccgccatcgctgctccggctattgccgcggcacccgcttacgcccctgccatcgccgccgctcccgccatcgccgctccagcgtttgccgccccggccttcggtgctgccattgcacacgctcccattggtctccacgcggctggcatcgcccacgctcccctcggcctgggtctcggacttcacgcaccccttggtttgggctatgccgctcacgcccatgccattcacttgaaataagtcatttctcatcgacactcctagatcactgtaaatatgtccaccgcaatcaaatgcacatatttttaataaaccaactagatcaattcc

SEQ ID NO: 10763 - DNA, 761 bp, Oryza sativa
  ref <308>: DATABASE ACCESSION NUMBER: AK108111
  ref <309>: DATABASE ENTRY DATE: 2002-08-28
gagctagtcaaacccgtccacccgccgcccgccgcacgccggcgaaaaccagtcgcgcgcccgcatgggcggcagcgctgcggcggcgccgccggccccggcgtggatggccgccggtgcccggaggtggctggaggaagccggcgtcgccttcgacggctccgaccgccgcgccttcaacgcgctgcccctcgccggcgcgcgcgtctccctcgccgaggccggccgcgccgtctgctcgctccgcgtgaccgccgagctcacggacgcggaggggaactggcacccgggggcgatcgcggcggcggcggacgacgtgtgcgcagcggcgatcatgtcggtggagggcatcatcaaggtctccgtccactacgacatctcctacttctcgccggccaagctccatgaggaagttgagctggacggcagggtggtggagcagaaagggaagatgacggcggtgacggtggagatccggaagaaggattccggcgagctggtggcgatcggccggcagtggatgtcgaccaccaggccaaagaaggatcaagctagcagcaagctgtgactctgaaccaggtatgcctacctagctcccaatggagttcttcagctcatctattgctcaccttagcaaccatcgaggtgattgtaacttttgtgtgttgcaagaaaaatctctctcattttttgtatcctgaaacatactgaattttaacttaattgaaagggtatagagaactagagagatccatgttgcc

SEQ ID NO: 10764 - DNA, 841 bp, Oryza sativa
  ref <308>: DATABASE ACCESSION NUMBER: AK108112
  ref <309>: DATABASE ENTRY DATE: 2002-08-28
agttgatgcaacgcgaatcctagccagaacgagaggtgcacgacaacgctgacctgcatcgcgcgcacgtcctccccctcggcacccaccctcagcgtcctcctcccgccgccgtcgccgccgccgctcttcgccttggccgccttctgctcgaccaccaccacctccttcctcacctcgacctcctcctccaccaccagcggtggcctgggcgccgccgccggcggaggcggcggcggcggcaccgccgcaacagcgggcgagggtgctggtgacgccactgcggcgtcgacggacgggagggggagcgggcccgcctcgaccgtgccgaggcggaggcggagcgcggcaatctcggcgaggagggactcgcgctcggcgcgccaccgcgactcctcccggagccaccgctgctcctcccgcagccagcgctgctcctcgcgcagccaccgcgcctcctcgcgctcctcccacgacgacgccgagcaccggaggaccacaacccggcgcgggaggccgccgggcctgaaccgcgggcggtggaacgaggggaagaacgggatggtggcggtggcaacgatcatggcggaggaggagacggcggcgctgagctgccgcttgcgaggagtgaggaagtggcgcgcggcgagcagaggagattagccgcggatatttctcgctgtcccgcggttgatttttcttccccgcggagcgtttagcctgcgagaggcgagagcaacgtgcgtgcggcctacaggtaaattttcttttgggctgtcggtttggcccaacaaaagctttcaagcctacctcggccttgatgggctctcgtcttctcttc

SEQ ID NO: 10765 - DNA, 1138 bp, Oryza sativa
  ref <308>: DATABASE ACCESSION NUMBER: AK108113
  ref <309>: DATABASE ENTRY DATE: 2002-08-28
aggagcgggagcagcgttggatggcgggagcggccgccgcggcgctcgcggcggaggacggcggagagcggcccattcgagcacgaagatggcggcgccgaggccgccgacgagcttgaggatgacctcgccgtcctcctcccggacgtaggaccgcagctcggcgaggaagtcgccggcctgcgtgaaggcgagcagcgcggtggcgccctggaagatggcggtgactacggcgggagcgggagcagcggagtatactcacccaacaccaggttcaagtcgctcacttccacctcctgaagcagaggcagctgttgaagcaacaacgggagcagcagctcgccgcggcaacagcggcgacgtggggcacgcaccgcgccggcgtcggcccgccgcttggtctgaactcgtccggctggccgccgctgcagaagtcccaccagcaggcgtcgtccgcggtcggcatgcgcgccgtgttcctcagccctccaggaggcaaaccggaacgcacgggcaacggcatgcccgccgtcctcctcccggatgtaggactgcagctcggcgaggaagtcgccggtccgcgtgaaggcgagcagcgcggcggcgccctggaagatggcgatgaggacggcgggagcgggagcagcggaggacgacgaggacggaggtagcggccgccgcggcgcttgcggtggaggacggcgaggacatagaagccggaaccctcgtgcggacggcggcggtgaggtcggtcccctcctagagggggacgtggcgcgcacggcatgggcgcgcgagcgaggccaagatctgctgccgcacgaggcccacccggtcggcgacgacgacccgcagcttgcggacgccgaggaagggctgtacggtgacggtgccgaggtcgacggtttggtcgccgtcgacgaagacgacgggcagcacggccttgggcggcggcggccgcgtgctggtggttgagcggcgcggcgcgcccgcggagtcagaagacgcaacgaggaagaagagggagaaagggaatgatatgtggggcccacgtgggcccaccatatttattttttgtcgctgacatgtaggtccatgtgggccccctattttaaaattattcttttgtgtgctgctg

SEQ ID NO: 10766 - DNA, 1039 bp, Oryza sativa
  ref <308>: DATABASE ACCESSION NUMBER: AK108114
  ref <309>: DATABASE ENTRY DATE: 2002-08-28
gaagaggctctcgaggttccgccgcgacgacccgccgggcgccaccgccgccgccgccttcctcctcatcgccgccgccttctcccctccccccatcacctccctcaccgcggcctccacctcgcgccgcccggcgtcccgcgccatctccaccccgaccccccactcctcgcacgcgtaccggcagttggtcacctgctccgagaagaacggccagcacagcatcggcacgccggcggcgaggctctccaccgtcgagttccacccgcagtggctcaggaacgcccccgtcgcgcggtggcccagcaccgcctcctggtcacaccaccccaccatcagcccccgcccgctcccgctcgccaccacctcctcctcgaacccctccggcaacagcggctcgccgtcgccgtcgccggcgtcgcgcaccatgtccggccggatcacccacaggaacggggcgccggcggcggcgagcccgcgcgcgaactccccgacctgcgccctccccatcaccgtgatgctcccgaagttggcgtacaccacggcggcgtcggcgtgggcgtccagccacgccgcgcaccggccgtcctccctctacaggctggaggcgagggaagggaggtacgacggcggcgagacctccgggccgatgggcccacggcgatggtgttggggaggcgggcgcggatggcgtcgagcgcggcgcgctccaggccgtcgaaggtgttgagcaggatgccgtcggcggcgggcgcgtcgagctcgcactgcttcatggtgatgttgagcatcacgtcgtcggggtcggtggtgcggatgaacgtcggcaggtcgcggaggcggacgccggcgatcattccggcgacccagtccaggcgggtgtccaggtacccgttggtcaaacaactctcatctgtatagcacagtacacaattaaaggtggttcatatttcggtgtgtaacttaacctgataattacagtgcttttctgtatgatcatgtgtataaagttcatttattttgtagtgtgttacctgat

SEQ ID NO: 10767 - DNA, 1123 bp, Oryza sativa
  ref <308>: DATABASE ACCESSION NUMBER: AK108115
  ref <309>: DATABASE ENTRY DATE: 2002-08-28
atcacaccacagaaaccgtttcagtttcttcctatacatcaaaatggctgagcagctcgtcctccgcggcacccttgagggccactccggctgggtcacttccctcgctacctccctcgagaaccccaacatgctcctttccggttcccgtgacaagaccctcatcatctggaaccttacccgtgatgagacctcttacggttaccccaagcgttccctccacggccactctcacatcgtctccgactgtgtgatctcctccgacggtgcctacgctctgtcctcttcctgggacaagaccctccgcctctgggagctctccaccggccagaccacccgcggtttcgtcggccacaacaacgacgtcctttccgtcagcttctccgccgacaaccgtcagatcgtctccggttcccgtgaccgcaccatcaagctgtggaacaccctcggtgactgcaagtacaccatcaccgacaagggccacaccgagtgggtctcctgtgtccgcttctctcccaacccccagaaccccgtcatcgtctccgctggctgggacaagttcgtcaaggtctgggagctcgccacctgccgtatccagactgaccacatcggtcacaccggttacatcaacaccgtcaccatctcccccgatggctctctctgcgcctccggtggcaaggacggtaccaccatgctctgggacctgaacgagtccaagcacctctactctctcactgccggtgatgagatccacgccctcgtattctcccccaaccgctactggctctgcgccgccacctcctcttccatcatcgtcttcgaccttgagaagaagagcaaggttgacgagctcaagcccgagtacgtcgaggtcggcaagaaggcccgcgagcccgagtgtatctccctcgcctggtccgccgatggccagaccctgttcgccggttacaccgacaacaagatccgtgcctggggtgtcatgtcccgcgcttaaatgcgtgcatgattaaaagtcttaggaagagacgaggtgatgatacggcacgatgatgcgcaatacgaggggactgggtttgcgagcagtaggctgaacgtagatttccgatgaaaggttgtagcggtg

SEQ ID NO: 10768 - DNA, 912 bp, Oryza sativa
  ref <308>: DATABASE ACCESSION NUMBER: AK108116
  ref <309>: DATABASE ENTRY DATE: 2002-08-28
accaggtgcagacgaacggaaaaagaaaggcgaaatccttcctagctagcttggtcgttgtcaaccatgctgccaggtcgccacactccccgccgtgctgacgccgccgccgctgccgccgccatggagcccctggtgccgggcgccacccgcgcggcgctgtcggagttcgtagccaccgccgtgttcgtcttcgccgccgaaggctccgtctacggcctctggaagatgtacagggacacggggacgctgggcggcctgctggtggtggcggtggcgcacgcgctggcgctggcggccgcggtggcggtgtcgcgcaacgcgtcgggcgggcacgtcaacccggccgtcacgttcggcgtgctcgtcggccgccgcatctccttcgcccgcgccgcgctctactgggccgcccagctgctcggcgccgtgctcgccgtgcttctcctcaggctggcctccggaggcatgcgccccatgggcttcacgctcggccaccgcatccacgagcggcacgccctgctgctcgaggtcgtcatgacgttcgggctcgtgtacaccgtgtacgccaccgccgtcgaccggagaagcggcggcggcgacactgcgcccctcgccatcggcttggtcgcgggcgcgaacatcctcgccgggggcccgttcgacggcgcggccatgaacccggcgcgcgcgttcggcccggcgctcgtcggctggaactggcgccaccactgggtttactggctcgggccgctcatcggcgccgggatggccggcgcgctgtacgagtttgtcatggcggagcagcctgagccgccggcagctgcagatactcggcttcccgtggccgccgaggattactgatgtatcgagctgaatcatagcacctgcatatttgctctagtgtaccat

SEQ ID NO: 10769 - DNA, 949 bp, Oryza sativa
  ref <308>: DATABASE ACCESSION NUMBER: AK108117
  ref <309>: DATABASE ENTRY DATE: 2002-08-28
tctgcaacgtgaaggcgccgtcggtgactgtcatgcggtcgcacctcgccgggaggaagcacaagtccatggccgcggcgacggcgaaggcgaagggtgccgaagctgccgcctccaccaccatggccgctgctggcaaagttggcgggaaccttgaggcgggagccatggcagtagcagaaggtgtcgccaccaacaacgtcgccgacaacacttgtccggagaagggaaccgtcgacatcgtcgtcggcggcgagcaccacgccgtcaagcagatcggcgagttcctcgggtgcgcgtcctgcaacgtgatggcgacgtcggagagcggcatgaggctacacctagccggaaagaagcacaggaacaaatcgatggctgaaaaggcggccatggacgacatggagattgtgaaggccaggtcgaaggaaacggcggccgccgccgccgcctcctcgccatcgtctgcgccgcgagctgtcgtcgctgcacaaacgggcgatggctctgtggcgcccatggaagtcgaccaaactgcagaggccagagatggcggcgcgccggtggccgccgacgccgcggcggcggcggctgccaccggcgggcagcagcaggtgaaggtccaggtggaggggaggatgttggcggtgctgcgtgaggcgaacggcgcgctgctgtgcgagccctgcggcgtgcgctgctccggcaagaccgacatggtgctgcacctctacaccaaggagcactcggacaagtgcggcgcgcatccaccggcttgagtcacttcacgcgaacgtggagtggatttttaaacttttggacgtcctcacattatttacatattatctaaatgaatttcttttaaaaaatttcctcttatagataggacgaacaaagaacaaagttttttgatcacttacttcgctcgccctttttgatcggggaagat

SEQ ID NO: 10770 - DNA, 863 bp, Oryza sativa
  ref <308>: DATABASE ACCESSION NUMBER: AK108118
  ref <309>: DATABASE ENTRY DATE: 2002-08-28
gctcccacttcctcccgttctggctcgccactcctcccaaagtccattcaactcacccacgtaggaaggtggaagcggtttcttggggtttggatatgctaaagcggtcgcatggagggttccggctggggcggaagctgctcagtgcctggcgatgggcgctctgctgccggcgccggcgccggcggggctacctgcgcctgcagacgacgtcgggtgggtgcggcggcgcttgcaaggaggggagcgaagaagccaagaggctggccccggtgctgcggtgggggcggtcgctggtgcggcggctgagcctcgggcggaaggacggcgggcggcggcggattctggacgagcccgtgtcgacgcccaaggggcaggtggcggtgtacgtcggcggcggcaaccccggcgagtcgctgaggtacgtggtgccggtggtgtacttcaaccaccccatgttcggggagcttctgagggaggccgaggaggagttcggcttccagcaccccggcggcatcaccatcccctgcgccgcgtcgcggttcgagcgcgccgccgccgtggcggccgccgggaagaaggcgttcggcaggtggtagcatcaggcggcggatggggatggtgtaaatatgcgttccatcagaatgggctgattttgttctcttgttcggttctctgtttctccatggatttagctagtcatttagaggctaatttttttctcgacatgtgcgtgccgggatcatcttggaatcattaacggagtaacagttgtctttttttagctttttagttccgatgttgtttacaaatccaacttggacggatcgatcatggtgttgatgaatttcccattttctccc

SEQ ID NO: 10771 - DNA, 807 bp, Oryza sativa
  ref <308>: DATABASE ACCESSION NUMBER: AK108119
  ref <309>: DATABASE ENTRY DATE: 2002-08-28
atccgtcaagcctttcaacgctacatcccaaccttcccacctcaactcaaccaaccctcttacttcgtcaacatgccccccaagcccgccgagaagaagccctcctccaccgccggcaaggcccccgcctcgtccgctggcaaggccccctccgaggccgccaagaagacctccaaggctcccgccaagtctggcgagaagaagaaggccaccaaggtccgcaaggagacctactcgacctacatctaccgtgtccttaagcaggtccaccccgacaccggtatctcgaacaaggccatggccattctcaactcgttcgtccaggacatcttcgagcgcatcgccaccgaggcctccaagctcgcttcgtacaacaagaagtcgaccatctcgtcgcgagagatccagaccgctgttcgcctcatccttcccggtgagctgtccaagcacgccatctccgaaggcaccaagtcggtcaccaagttctcgtcctccaagtaagcgctagctactcgacgatcctcttgttacgacctccttctcgccatgtagtacccttcttcggcccgacgcgttcggtgcgacgcgtcgtggagtcctccccttgcaactggtctcgcgccttttgcaccgcccaacctccgcgacgggtggatgcgagcgtgtctcggcgtccgcgcgtcgtcgaccggctttcttcttttcttggtcgcctttgtatctcttctgtacttttaccgccagcgctagcatctcctccccctcagatatatccagcagcaatctgagcatatcggtctcaaaact

SEQ ID NO: 10772 - DNA, 954 bp, Oryza sativa
  ref <308>: DATABASE ACCESSION NUMBER: AK108120
  ref <309>: DATABASE ENTRY DATE: 2002-08-28
cacgacaacggaacacgcctcgagttcctgcacaagactcgcttcgaggagcctattcacgctatcctgcccttcaagggacgtctggctgtgggtatcggcgccgagctcttcatctacgacatcggcaccaaagccatgatgcgcaagtctcgtggcggccgtgtgcccaacaagatcgtcagcatcaacgctgctggcgaccgccttgtttgcggcgatgttgcagagtctgtcacatacatcgtcttcaagcccaaggcaaaccgcatgattcccttcgctgatgacacaatccagcgctggacaaccgcatcagccatggtcgattacgagaccactgttggcggcgacaagtttggcaacctgtgggtgctccgctgcccacctcaagcctcagaagaagccgacgaagaaggcatgaacggcttcatcgtcaacgagcgcccatacctcggcggcgcaccctaccgactcgattgccgcgcccacttcttcgtcaacgacgtccctacctccatcaagcgcacgcccctcgtcgccggtggcgcagacgtcgtcttctggtccggcatcagcggcaccctcggcatcctcgtgcccttcgtctcgcgcgaagacgtcgtcttctttcagagcttggagcaggcgctgcgcaccgaagagccgccgctcactggtcgcgaccacctcatgtaccgcggctactaccagccagtcaagggcgtcatcgacggcgacttgtgcgagcgcttcatggcgcttagctacgacggcaaggcgcgcattgcggccgagctggagcgtgagccgaaggaggtcgagaagaaggttgtggagatgaggactagggttgcgttctaagctagagcaaatagcgattttcgtgcccttgacgataccccattacgagcgagcaagagtgtaacgcagaagaaaccaaaattcaattgc

SEQ ID NO: 10773 - DNA, 1069 bp, Oryza sativa
  ref <308>: DATABASE ACCESSION NUMBER: AK108121
  ref <309>: DATABASE ENTRY DATE: 2002-08-28
acactcgcacaccgcaccagcgatgtcggcggcggcgaaggcgaaggcgagcggcggcgggaggcggggaggagccaaggacccaaccgacgcgctccgctccgacaagaagcgccgcgacatggacgactccgacgacgccgagctcgacagtgacatgaaggagatcgtgttgctgctgcgccagatcaaggacaaggctcacaaggatggccagaagaagaccgagcaaaccctctccagtgttgctacagaaattcagactatcgtacaggatgccaagggcaagtttgagaaggaaaggcaaaattatctgaaagttctatcaaagacttcaaaagagtgtgaaggtttactgaagaacgagtacaccaagtttcaagcaacacatgataaattctgcaaagaaaaagctgcacacatgcaaactctcaaagaccttttctcaaagttcgaagatgcaaaggagaaattacttatccagtatgaactgcaaaggaagaaggagaaggctactctgtctgaactcgagaaaacattttcagagaagataactaatgcagaagaatctctgaagaagatgaagcaggatgacaaatccattgtcaaccttcgcaagtccattggctcattcctggacccggatgatgagtttggagcagacgatgactgaaactgctgttgccaaaatggtccttttagaacgccgtggatagtatttgagaatatcgatagtatatatatgaacagaagttacaaagttctgtagagatttggtagcatcatacagttaggtaccacatcatccgttattttgttttaagttcattgggttaggcggttccatcatctgttttaaatgcatcttggtcgattcaacagcaagaggctcaagattgtttaacctctttggcctgattttccttcttatataggagtaagtcataaccagtagctcgctaaacttacttgtcaatatatttgtatatttgcaacaaattattcatatacagtatcagatttgtatatcaacagcatagaattgcaatgaatcttccttctaatttac

SEQ ID NO: 10774 - DNA, 694 bp, Oryza sativa
  ref <308>: DATABASE ACCESSION NUMBER: AK108122
  ref <309>: DATABASE ENTRY DATE: 2002-08-28
aatggctatggttatgctgcccgcggcctcggccgccgccgctgcctccgttttggcgctcctcgtgctcacctcgctgcagccgcgcgcggcgcgggcgcaggtagcgtcctcgccgtgggcggcgccggcgccctggcccggcgagctcgactgcacgggcgcgctgctgaacctctcctcgtgcctcacctacgtggagtaccggagcacgctgacccggccggacaagggctgctgcggcgcgctcgcgggcgtcgtcgacggcgaggccgcctgcctgtgcggactcgtcggcgggtacggcgcgtacggggtccgcgtcgacgccgtccgcgccctcgcgctgcccaccatctgccgcgtcgacgcgcccccgcccaggctctgcgccgcgctcggtgtgcccgtcgccgagccgccgggcggcgccgtgccggaggagtcagggttgtccggcggcatgccggccaacgcaccgtcaacggcggccaccggcagcagcggcggcggcggtccggcgacgcaccgacccacaagacgccacctgattcttcttctgctgctcctggtgttccccgcttcgctgctgctcctgtaaaactaccccgtcacaccggcaagcagcacacatctgacctgtacatgcatgtacaccgttcgtcgattcaattcctctcagaattcttccgtg

SEQ ID NO: 10775 - DNA, 682 bp, Oryza sativa
  ref <308>: DATABASE ACCESSION NUMBER: AK108123
  ref <309>: DATABASE ENTRY DATE: 2002-08-28
ggatcgagtgcacgcgtgaacgccatcgtctcgatgggagcaggtcgtggcagcaatggcgccgtgctcggcatcggcgtggccgtggtgaccgcgctcctggcgtggcggtgcgcggcggcggcggcgcaggcgccgcctgttgcttcgacggacggcggcgggtcggggtgtatgccggagctcgtcagcctgtcgccctgcatggggtacatgtcggggaacgcgacggcgccggcggcggcgtgctgctcggcgctgtccggcgtgctgaggtcgagcccgcggtgcctctgcatggtgctcggcggcacggcggcgtcgctcggcgtcgccgtggacaccgcacgcgcggtgctgctccccggcgcctgcagcgtccaggccccacctgccagccagtgcaacgcagcgggagttccggtgtcatctccggcgaacccgacgacatccggcggtactccggcgacgccagcagggactcctggatcgaagaccactccagcatccactactcaatactctgacggaagcgttaacagatctcgggtgatattggtcatcctcgtcgcagcgattgttgtgtttcttgatcacttttgagttcttcagtacaataagtcatattgttcgttttacctttttcaaacgatgagcagcatatgtgcggaaaattgtgatc

SEQ ID NO: 10776 - DNA, 1012 bp, Oryza sativa
  ref <308>: DATABASE ACCESSION NUMBER: AK108124
  ref <309>: DATABASE ENTRY DATE: 2002-08-28
atagtgggtctcttttccatatcccaatctctctctcccctattacttttttcaccagggaatccaaggcagctcacgggtcacggcggcggtgaggtcgagcggtcgagaggccgggcggcctgagtggtgacggcgccgggcggccgggcggcccgagtggcgacgacgctgggctgtggggcgatcaagcggcgactgctccggcgaagcggcccgagcggtcgagcggtgtggcccaagcggcaccggcggcgagcagcgagcggcaactctcccgccccctcctctcctcgtcggcgccggaaggcgcaggcgcatccttccccctacccccctcggcaacgttggacgctcggcggcgacgaacttggcccctctcttcttcgcggaggtcgccgcgcgacttcgtcttcctcgaggacgacgagcggcggcgcggtcatcctcgagctcaagcagcgtcggccaggcagccaaattcggctgaagcagcgtcagccgcgcggccatgaatagtcggcggtgacgggctcgacgctcgacggcggcggcggacttggccacgtctcctctcacgtgttcccgccgcctcgtccgcgtggcgacggctcgtcggggcgtggcgcgaggatggccgtggccgtggcttcgtcgccgccactgtggtcgtcgccgcgctgccctcctcgcctgcgccggcgagcctctctcccttctctctctgtcctgctttcgtcttgggtatggatgcgcatctttgatttctctgtggaaagctgttttccactgacgaggtactcggagtcgctcgagtcaaacaaggtcacacgaacctggttgagacatgggccccaccccttttcccctccacgtatgcaaactgtctagcaggagagttgaggccaaatgcaatatggatgcattgtgaatgtcctaagagaataccgtgtttctccatgtgacgtgcacaaccgcgtgatgacccaaaggagtgacatggttctctatt

SEQ ID NO: 10777 - DNA, 900 bp, Oryza sativa
  ref <308>: DATABASE ACCESSION NUMBER: AK108125
  ref <309>: DATABASE ENTRY DATE: 2002-08-28
gcgaccaatctccgccgccgttgagctcgagctctagtactagaccacgaccacctctgctcccatggccagctccgtcggcgacagcaccgctgcagctaacggcggcggcggcgcagcagcatcagcggcgccaccggaggctgcggggaaggggagcgccaccatatccgtcaccgtcgtcctcctcgtgctgctggtggcctccgtcgcggcgttcctgatgtcgccgcagccgggcggcggcaagccaccggtggagggagtaagcggcggcggcgacagcgacggcacccgcggcggcggcggcggcttagagggtgtcaagggcgccgagccggtcgagcaggcggtgggccccggcgccgccgccatccccggattcaacagccggctcgacgcgttccgcgcgtgggccaagctcacctggatgaagctccggcggccacactccggcgagccccggaggtatgatgacgacgcggggagctccggctcggcggcggacgcggccaagaggagcctggagatgaccaaagagacggtggagcaggcggcggcgtccgcggcgagagcggcggggaacgccgtggggaaggccagcgacaaggtgaagggagctgcctcgccggcgaaacgggcaccctccgacgcggagctctgagcacacaggaggacacgttgcgcaaaacaccctcatcggctcagccttcttcgcccactgttttttttcctcgaagaaattctgccagtgttaattaactagcctctgttctatgatgtatggattgaactgaatatttgtatcctgtgaatctgatgtacatatttccactgtactatatacagtagtgtgatccgtcctgttagaatcgacggaaataaaaaatgttcaggcag

SEQ ID NO: 10778 - DNA, 627 bp, Oryza sativa
  ref <308>: DATABASE ACCESSION NUMBER: AK108126
  ref <309>: DATABASE ENTRY DATE: 2002-08-28
gcaggcagagcagcagagtaagagttcatggctcgcaagatgatcatggtgctcctcgtcgaggacgaggagatcaatagggtcgtggcgagagcggcgctgaaggcggcaggcggcggcgacgtcgtggacgaggcggagaacggggaggtggcggtgcagcgggtgcgggacgcggcggcgccgtacgacctcgtgctcatggacaagcagatgccggtcatggacggccacgaggcgacgaggcggatccggggcatgggggtgaccacgccgatcgtcgccgtgtcgagcgacggcctccccgccgacgtcgacgcgttcatcaccgccggcgccgacgacttcacgtccaagcctctgtccaaggagaagctgggagtcatccttgccaaatttagacttgcttaacgacgtatatatatgtgtactgcttaattagtatatatgccttgctagatcaagatctccaataaacgggatttatggagtatatatgatgctgcgtttaggaacaaaattttaggcgtgtaatctccgaaaaaaaaaaggtgtgtaatgtgtatatatgtctgaactaccttacaaagtactatgatcatgatgagtttctcagctcttaattgt

SEQ ID NO: 10779 - DNA, 954 bp, Oryza sativa
  ref <308>: DATABASE ACCESSION NUMBER: AK108127
  ref <309>: DATABASE ENTRY DATE: 2002-08-28
acaaccagcagcgcagttacacccaaaccagcagcatcgacgattcgccgagctaggggcagaggcagaagtgcagaacgtacacgcgtggtgagcagaggagcaatggcgactcggcttctgctgctgctgctgctcttgctcggcatgtcgctgaaaggatcagagggggcgtggtgcgtgtgcaggccggacgtggcggaggcggcgctgcagaaggcgctggactacgcgtgcgggcacggcgcggactgcgccccggtgacgccgagcgggtcgtgctacagcccaaacaacgtggcggcgcactgctcctacgccgccaacagctacttccagcggaattcccaggccaagggcgccacctgcgacttcggcggcgccgccaccctctcctccaccgaccccagctcaggaacctgcaaataccctgcaaccgcaagtgctgcagggacaagcaccggaaccggcacggcgggtgcaggcacaggcaccggtacaagcacgagcacgagcacgagcacttcttccccgggctcttcaactgcagccacgggtacgccgatcatgggagggaccttcgctacgccgatcggcggcggcgcgtctgggccgacgactagcgccttgaatcctgacagcagcgaagcaccgtccccgtcccttggacgtcatcttctcctcacgtgcattgcctccatgctgctctctaattttcttttggcgtagtaatttggccggaaagtaacgtgaactgaagcagcatactgtgggagaatggagatttggctttccttttctgctttggagcttgtcgcggcctgttctttttctttaccagaactgcaggtcctgggtgtttacacctgttgtaccagtgcccagtgaactggccgtttgcatcatggcatgtttagtatgttatcgtgctagtgtcagcacattctcactgat

SEQ ID NO: 10780 - DNA, 895 bp, Oryza sativa
  ref <308>: DATABASE ACCESSION NUMBER: AK108128
  ref <309>: DATABASE ENTRY DATE: 2002-08-28
atcattgcgacgtactaatttaatataagtatagagcttcatcatttgacaaacaacaatggctaggttcgcgggatcccttcagctgtactgcctctccgtcctgctcgtgatcctcacccagcttggaggaggctctgccatggggctcccccggccgccacccaacgtgaacttcaccatcggcgtcgagggcgctgtctggtgcaagacctgccgctacgccggctacgtcaagtccaaggacgcctcgcccctcccaaatgcggcggcgctgctgcggtgcaggtgggggaagtgggcgctgtcggtgtggggcgcgacggacgcgcgcggctacttcctgatccagacggggacgcaggtggcggcgttcacgagcaaggactgcagggtgtacgtgccgcggtcgccgtcgcgtgcggcgtgcggcgtggcgctccagcctgggcggaagacgggttcgccgctcaagttccgcaggttcgtggcgctccccgacgggctgcaagggcgctactccgccggcaacttcgtcttcggcccgcgagaccccaagaaatgctgactttctgattagcggtaacgtgtttgggactttggggctgggggtggtgtggctgtgcacttcgaattctacaacttggtcacagtttgtgtgtggcgtgtgcccggtggatcgacgtggacgtgcatttccgcatccagcaaataatgatgataaaaaagtgttggacgtagccccagacctagtgtgttgtgtttagttcctttcaaactttcaaaaatttcatcgtatcaaatgtttcaatatatgcagggaacattaaatgtgtacgaaaataaccaatgtggttcttaaaaagaaataagggaaacgatcaattgaaagggc

SEQ ID NO: 10781 - DNA, 808 bp, Oryza sativa
  ref <308>: DATABASE ACCESSION NUMBER: AK108129
  ref <309>: DATABASE ENTRY DATE: 2002-08-28
atcgcataaagaggttaacctccgccgcccgcctcacccggcacgccgccgcgccgcccgcctcacccgcgccatacctccaccgctcccctcaccagccacgccaccgcgccgcccgcttcacccgctgcccgccgtgccatacctgcgcgaccgcccgcctcacccggcaagacgccacgccgcccgcctcaccctgggccttccccgcgccgtacctctgccgcccgcccccctcccgccctccctgcgccgtatgtccgccgccggcctcgccagccacgtcactgtgccgcccgtctcacctgctgcagtaccctcccccctctccctcgcgtcgcccgcctcccttcgccgcactcccctctctcctctccctcgcatcgcctgcctcccctcaccgctgccttaggatcttctccgcaccgccaccgttcagtcgtcgtcgccgtgtctccttcgtcgcgcacagccgtcatggtctcaggtcgcttgcaccttctcccatgctgactaacggcgtcaccgccgccgccgccatcatcaccagcaccgacctctcctctcagatagccaaaaacatcatgttgagctttgagtggtctctccgagaaatggagcctgaagaagcagtagacaattgatgtcgttgcaatttcatgcgcaatctccaaatgagaggtacactgtacaagtcttgaaaaaagttgtgtaactgatctgaattgaaatgtaaaaacaaaaattaaccagttaagttttgagtggtctctccatgcctcttgtcacagggtttatggggatgttt

SEQ ID NO: 10782 - DNA, 1726 bp, Oryza sativa
  ref <308>: DATABASE ACCESSION NUMBER: AK108130
  ref <309>: DATABASE ENTRY DATE: 2002-08-28
acaccccaatgcgctctcacatggagtcgtcgtcgtctccccaaacacgacgacctcgaaccgcctccgtccccgcctcgccaacccgtccccttcccctgtagccaccgcgaccaccaccaccaccacgccgcggcatccacaacgccaccagagtacagagacgttccacccaccccgggccaccgaacccaacccccccagctcgctcgatcgatcgctagctccgacgacaggtttgagcgcgatgaggcatcccggcgcgggcggcgggagcggggacgccgggttcgtccgggcggaccagatcgacctcaagagcctcgacgagcagctggagcgccacctcggccgccccgcggagcgggccgcgtcgcagcacgggggcagcgggagccgccgcggcgagtccgccaggctcgggctcggggaggagccgccgcaggcgccgcaccatcagcggcgccgggaggactgggagatcgaccccgccaagctcgtcatcagaggcgtcatcgcccgcggcacgttcggcaccgtccaccgcggcgtctacggcggccaggacgtcgctgtcaaaatgcttgactggggggaggatggccatagatcagaacgagaaatttcttcactaagagcagcatttgcacaagaggtcgctgtctggcataagcttgatcatccaaatgttaccaagtttattggggctataatgggtgcaagagatttaaatatacagacagaacatggacattttggcatgccaagtaatatttgctgcgttgttgtcgagtaccttgccggaggtgcactgaaaaattttctgataaagaacaggagaaggaagctagcctataaagttgtggtccaattggctcttgaccttgctaggggattaagctatcttcactcaaagaagatagttcatcgtgatgtgaagactgaaaatatgctccttgacaaatcaagaacagtgaaaatcgctgattttggtgttgcacgaattgaggcttcaaatcctagtgatatgacgggtgaaacaggcacacttggttacatggcacccgaggttctcaacggccatccttacaacaggaagtgtgatgtatatcgctttggaatctgcctatgggagatatactgctgcgatatgccgtatcctgatctgagtttctcagaggtcacttcagctgttgttcgtcagaacttgaggcctgagataccgcgctgctgccctagctccttggccaacgtgatgaagcgctgctgggacgcgaacccggacaagcggccggcgatggcggaggtggtgtccatgctggaggcgatcgacacgtccaagggcggtggcatgatcccgaccgaccagccacagggatgcttctcgtgcttcggtcggcaccgaggcccctgacgaacttgatctgatggcgtcactgataatttgttatcgctatatctcagtgtaatctaatcgcattcgctatggctaatttgaggagctgtgtgattgatgtaaatgccttaacggtccagcacctcagcttcatcgtcgtatgatcgctgcgaatcctaatgcttggcctatgataagatcgagcttagaagagattattgtgacagagctgccgacgaagtttacaatctcatcatatatggtcatgaagtagacccactgtactattgcagtgtaatcgacatctttgcagaatgttaataaaagaac

SEQ ID NO: 10783 - DNA, 675 bp, Oryza sativa
  ref <308>: DATABASE ACCESSION NUMBER: AK108131
  ref <309>: DATABASE ENTRY DATE: 2002-08-28
aactcttcccctttctcccccaaatcggcggcgacctctctccgatctccaccaccaccaccaccacgcgggcgcgcgcaccaaccgggggggcttcgatgcgggcgatctcgtcggcagcgggggggatgctgcgggcgcggctgcgcggcggggcgcgcgtccgcggcggcggcgggcacggggaggggggcgggcggtggacgaccccggggcacgaggagcagcccaagggctacctattcaaccggccgccgccgccggcgggggagtcgcggaagtgggaggactgggagttgccctgctacgtcacctcgttcctcaccgtcgtcatcctcggcgtcgggctcaacgccaagcccgacctcaccctcgagacctgggcgcaccagaaggcgctcgagcgcctccagcagcaggagctggcctccggggaggcccaggccgagtgatctgcgcgcctcaggtcacctcgaaccctagaatactgcatctgttttactcccaataagatgtttgagatgtgcgggatgaacactgtgctcttgtttctgtttttgttctgtttcctcgtggaatttgtccaatgatggcgaatgccctgaacattttgaaatgctttgtaattctattattttctcttcctttagttgtgctgctctgagagttttcgtg

SEQ ID NO: 10784 - DNA, 962 bp, Oryza sativa
  ref <308>: DATABASE ACCESSION NUMBER: AK108132
  ref <309>: DATABASE ENTRY DATE: 2002-08-28
ctctttctctccccttcttccccaagaagctaaagcggcagcgccggggacctgcagcatccctcggctcgtgctcccgcggtacgacgccgcgttggccgcgcccaccggcaacgtctggttgtagcagtcgccgccgccagatgaatccatcgatccagacaaatcacacacaaacaatctcacaaacgaatccatcaatcgttcacgccatgtatgactatgtgtttgctagctagcagcttataggatctggatcttgtcgtcggtcatccactagcggtgggagttgaagacgaggacgtcggcgcccttccagaaggtggagtgcttgttcatgggggcactgcggatgaggcggtcgtcgaggacagcggcaccgtcagagttggactcggcgagcatgggcgcccagtataactcgatggtggcgtcgtagtccttggccctgaagatgttgagcgagtccaccgtctcgaaggatctggacccgccggcgccgggagcgccgcggtggaggaggcagagcagcgaggcatacagcccacagagcagcgagtcccgaacttccaatcttgccgccgccgcgtcagcttccaccgccgccgccgccgccgccgctcgccgccgctccagcccgtgctccccgcggccggccgaaggggagagaagagaaagggaaagaaagagagaagggaggaagagcggaggaagaagaagagagaggatggcatgtgggccccacatggcagtgggtcccacactatataatttttgaatgacaaatgggccccacacttttttttttatttctagtgccacttaagcgccacatcaacgccacatggaaagaagaccgagtcaatgctgctacgtaggcgccacgttagcaaaaccgccgagggagtcaaattgctccggttttaagagttttggggtcgaaatatccggttttgtggttt

SEQ ID NO: 10785 - DNA, 1171 bp, Oryza sativa
  ref <308>: DATABASE ACCESSION NUMBER: AK108133
  ref <309>: DATABASE ENTRY DATE: 2002-08-28
cgacgacggtggccgcaagcagccggctgatgtcgcggcgggcggtcgcctgtgctggctacgcggggatggatgatggtggtggcggcgaggggatgatgatcatggcgcgacgacgccgcctggttgtgccggggatcatcgctacggccggcggcggcgtgaggcttcgaccggctaccaagggtgcgtatacatgcgcacgtgcacagcgtgcaagaggaccatcacttgccactgatcagtcattagatattgaaagggctaatgtccatgtggcgtatcagggctcacctggtacggccattgaggagatggtgtttaaggccttcccagactgtatagccgttccctgcaaaaagtttgtggctgcatttgaggcggttgactcttcacttgctgacatagttgttcttcctattgaaaattcatccactggaagctttcaccagaactatgacttacttcttcgacataagttgcatattgtgcaagaagttcaagtggagatagagctgtgtctctgggctcttccaggagtgcagaagaatgatttgagaacgattttcagccatccagaggaatttgctcagtgcgagcattcactctctagtcttagggttataaagaaaaatgtcgaccactgtgctgctggtgccgagattatatccatgcaaaatttaggagatgctggagttataggcaatgctcaagcggcggaattgtatgggcttaacatagtagaatgcaactttcaggatgcttcacccaatctcacaagatacttggtattggccaaaactgctgacatccccaaggaatatggccaatataagggaagaagggagtatgatttattacattttccaatcaaatgcccggtgctacaagttagttgccctgatttatcagacaagcatcgttttcggtcttgaagaagggcctggcatacttttcaaggccttgagtgcattttggatgagggatataaatttgtcaaagattgagagcagaccaaataagcgcgaaccaatgaggactcaaggaaatgaaaagtacgctacactgttattacactttcaacacagttctctttatgtaaaaaatgcttatgtgtatcaaattatggagcaaaaagggaaaaagtggatgtgctaccagcatttttttt

SEQ ID NO: 10786 - DNA, 1481 bp, Oryza sativa
  ref <308>: DATABASE ACCESSION NUMBER: AK108134
  ref <309>: DATABASE ENTRY DATE: 2002-08-28
acagaaaagactacacaacaccatcaacaatgtctctacaaacccctagaataggccgcctgctctcgcgacaagccctccacgcgcccattcgcagacgcgctttccaccgttcctctcgcctcgacgtagtgaaaccattcctcctcgctgacattggcgagggtatcactgaatgtcagctcatccaatggttcgtgcaacctggcgcacgcgtcgaacacttcgacaaactgtgcgaggtgcagtctgacaaggcgagcgtggagatcacaagcccattcgatggcgtgataaagaagctgtactacgagccggacgacatggccgtcaccggcaggccgttggtcgatatcgatatggatggagacgaggcggaggctgaggcggagaagctgggggaggcggagactagcgcggacaagggcgagaataccaaagtgaacactgcatcgcacgagaccgagtcaagaccaacagagcgacgtaggaatggcaacggaaaggatgatttcagctcgctggctactcctgctgtgcgccacttgatgaaggagttgaatgtcaacatcacggacgtcgaaggcaccggacgagatggcagagtcacaaaggaggacgtacatcgcttcgtctcacagaagacacagcagcaaatggaagtcgaatcgccgtcgacatcacctgcaagcacatccgcaagcacatcgaccctgagcacagcaacccaagaccaaaagctgcctctgactccagtgcaaacgcagatgttcaaggtcatgaccaagtctttgagcatcccacatttcctctacagctgtagcgccgacatgacctcagtcacggctacacgcaagaagctcaacgccatgaaaacaagcgagaagctcacccacctgcccttcatcatcaaagccaccagtctggcacttcagcagcatccactcctgaactctgctctcgacacttctgatcccaagaagccctcactcacataccgcagctcgcacaacttcggcgtggcagtcgacacaccatccggtttgctcgtgcctgtcattcgcgacgtgcaaaacctcagcatcgcacagatcgcgcagcaattaaaagctctctcggaaaaggcacgcaacggcaagctcgcaccgggagacttcagcggcgcgagcttcacaatctcaaatatcgggtctgtcggcggcggcgtggtggcacctatcatcagcgaaccgcaagttgcgatcttgggtgttggacgtagcaaagtcgtgccggctttcgatgagaacgatcaactcgtcagaagggaagagcttgtgttgagctggagtgcggatcaccgtgttgttgatggagcagagtgtgcgaggtgcgcggagaaggtcaaggggctgctagaggagcctactgccatgttgcttgagatgcggtagggtgttggcgtctgcagtatagtgtctgcaataaaataaattgatgac

SEQ ID NO: 10787 - DNA, 1327 bp, Oryza sativa
  ref <308>: DATABASE ACCESSION NUMBER: AK108135
  ref <309>: DATABASE ENTRY DATE: 2002-08-28
aatgtctgccgcccagcaacgccacggaaagaagaacatcctcgccgagcacgacgacgatgtcgtcattgtctcggccctgcgtaccgccatcaccaaggccaagaagggcggtcttgcgcagtgcgctcccgaggagatgctcggctggaccctcaagggtgtcattgccgagtccaagatcgaccccaagctgattgaggacgttgccgtcggcaccgtgctcgctcccggtggtggctccacccaggcgcgcatgggctcgctctgggctggcatccccaacactgccggctgcaacagcttgaaccgacagtgctcgttcggtctggctgccgtcaaccagattgccaaccagatcgcgcttggccagatcgacatcggcattggctctggtgttgagtcgatgacgctcaactacggtgccggtgtgatgcccgccaaaatgtcggacgccgtcatggagaacgaggaggcagccgactgcatgatgcccatgggtatcacctcggagaacgtggccaagaagtacaacatcaaccgccagaagcaggacacctttgccgccgagtcgttctctcgcgccgccgccgcacagaaggcgggcaagttcaagagcgagatcgtcaccgtcaagtacaccgacgacgatggcaacgagcgcaccgtcgatgctgacgacggcatccgcgagggcgtcactgtcgagtcgctcggcaagctcaagcccgcctttgccaaggacggattcacgcacgccggtaacgcctcgcaggtcagcgacggtgccgcctcggtcctgctcgctcgccgcagcgccgccaagaagcatggcctgcccatcatcggcaagtttgtcacgtgtgccgtggttggtgtgccccccaacatcatgggcgtcggccccgcctacgccatcccgcgtctgttcgagctcaccggcctcaccaaggacgacattgacattttcgagatcaacgaggccttcgcctcgcaggctctcttctcggtcgagcacctcggcatcgacaagaagaaggtcaacccggtcggtggtgccattgccatgggccaccctctcggtgccaccggtgcccgtcagatcgccaccggtcttgccgaggccaagcgccagggcggcaagaagctcatcgtcacctcgatgtgcgtcggcacgggcatgggttgtgcctcgctcattgtctcggcctgatcgagcaatggacggcctcggaaatatcaaactgcccccctctctctccccacctgtaatctagatcgttgtccgattcggctctgcaaaggtggaaagacccttttgcatcgt

SEQ ID NO: 10788 - DNA, 1274 bp, Oryza sativa
  ref <308>: DATABASE ACCESSION NUMBER: AK108136
  ref <309>: DATABASE ENTRY DATE: 2002-08-28
attcctttcccatcctttagattcacccctcctctcccacaagttccctctcccatccccgctttcctcggaacaaccattatttcctacacaatggctcagcagaacggtactcccagcaatgacttcactgtcaaggctggccttgcgcagatgctgaagggtggcgtgatcatggacgtcgtcaacgcagagcaggctcgcattgctgaggaggccggcgctgccgccgtcatggctcttgaacgcgtgcccgctgatattcgtgttgagggtggcgttgcccgtatgtctgaccctgccatgatcaaggagatcatggaggctgttaccattcccgtcatggccaaggctcgcattggtcactttgttgaatgtcagattctcgaggcgatcggtgtcgactacattgatgagtccgaggttctcacccctgccgacgatgtttaccacgttaccaagtccacattcaaggtccccttcgtttgcggttgccgcaacctcggtgaggccctgcgccgtatctccgagggcgctgccatgattcgcaccaagggcgaggccggtactggcgatgtcgtcgaggctgtgaagcacatgcgcactgtcaactctcagattgcccgtgctcgtgccattctccagagtgctgccgatcccgagccggagctgcgtacctacgcccgcgagctcgaggctccctacgagttgcttcgtcaggcggcggaattgggccgtctgcccgttgtcaacttcgccgctggcggtgttgccactcctgccgatgcggcgctgatgatgcagctgggctgcgacggtgtctttgtcggttccggaatcttcaagtccggtgatgccaagaagcgcgcgaaggctatcgttcaggccgtcactcaccacaaggatgccaaggttctcgccgaggtcagcgagggtctcggtgaagccatggttggtatcaacgtgcaaaggatgcccgaaggagacaagatggccggccgtggctggtaaacttgttgattgattcctttctcctcgtgcctttgaagcttcttatttctcctttctcgcctttgacctgccccatccatttttcttttttggcgatctctatttccctttcccctctcctccccccgaccagatattgcggggcacgactccaaaaatctcccctagggtacgaagcgatgaattcttcccctttgcatgatagtctaccaaaaaaaatagaaggcgtcttggaattgatcttgcattcgcatgggaagatg

SEQ ID NO: 10789 - DNA, 1136 bp, Oryza sativa
  ref <308>: DATABASE ACCESSION NUMBER: AK108137
  ref <309>: DATABASE ENTRY DATE: 2002-08-28
aattctctctttctctctcaattagtctacgacatttcgttctgtcctcgatcgaattaggaggttcgttgaagaagagaggagagagatcgaggtaggatatttgatatttctttcagatcagtaggtggcttgtcgcttgagcttgacaatggacgtggccggcggcggcgaggaagtcgaggaggtggaggcggttgacggcggcgagcagcagccgccgatggagatcggttggcccaccgacgtccgccacgtcgcccacgtcaccttcgaccggttccatggcttccagggcctccccgtcgagctccagcccgaggtcgccggcaacgcccccagcgcaagcaagacggtgttcggcgtgtcgacggagtcgatgcagtgctcgtacgacgcgcgggggaacagcgtcccgagcatcctcctcctgatgcagcggcggctctacgagcagggcgggctgaaggcggagggcatcttccgcatcgccgccgacgacgcccaggagcaggcggtccgggagcagctcaactccggcgtgctcccggagggcggcgtggacgtgcactgcctggcggggctcatcaaggcctggttccgcgagctccccggcgggatgctggactcgctgccggcggcggaggtgacgcggtgccagtccgccgacgactgcgcgaggctgtgcgcgcggctgccggcggcgaaggcggcgctgctggactgggcggtgcagctgatggcggacgtggcgagggaggagcggagcaacaagatgggcagccgcaacgtcgccatggtcttcgcccccaacatgacgcacgccatggatccattcaccgcgctcaagcacgccgtccacgtcatgaacttcctcaccatgctcatcgaccgagctctcaacgacgtccaaacctgcaacaactgatccatcaatataattaagcccaccatgcatttcgattatatatgatcactttaattatagcacgtaattacattgtcattcattcgtagcagggttaattaattaagcttaatcaaaattgtttgttttagtttcattttactttcgtccattactcagtttaattactactacatgtgtcgagagctgacttcttgggtctgactgt

SEQ ID NO: 10790 - DNA, 935 bp, Oryza sativa
  ref <308>: DATABASE ACCESSION NUMBER: AK108138
  ref <309>: DATABASE ENTRY DATE: 2002-08-28
atggctatttagatttaatcacacatcagtctgccattgttactactagttatagtggtaacaatggacatgatatctggcatgttacggccggcgttcgaccggatcacgccgtccatcgcttccgccgccgtgttcagcttcagccgcgtcgtcagcttcaccggctccttcaacagccggaccggacttctgaccgccgccgacggcgaggaggagactccgttgtcgccgcaggcgatcgagacgacggcgtcgacaggtggtgttggagcgttcgacatcgaggcgcctgcagcgatgacgacgacaccagatcaagctgtactccgcgatgatgtccgcggcgacgacgagctgatcaggcgcctgtccaagagcgtccagcccgtgtgcctcttctgcgcggcggcgtcgctcaccatgtccgtcaacctgccggcgagcggcggggccggcggcgcgctctacggcgcgacgctggcgttcgtctgcctgggcctgttcgccagcctcggcctgtccatgtacaccatcgtgtccaggcccggcgacgccgcggtggcgagggtgcagaagtgggcgatggtgctcgccctggcgttcgtgctcgtctccttcacgctccgcatgtggccggtgctcgtctcttcttcctcctcgccggcgccgccgccgcgctctacctgacgccggcgtgaaagctggtcggcggtggatgagcccagcaactgatcgtacaatcgtaatcgatcgaggccgccggcgaccatgtctagctagcaacagtgccaagaacgagataccggcaggaaatggaagtgccaaaaattaaagtattatttgtaatcagcctaataacacactcatacactagttaattgtagatatataatgcaacattaatacttaatccactcatctctcatatggtt

SEQ ID NO: 10791 - DNA, 574 bp, Oryza sativa
  ref <308>: DATABASE ACCESSION NUMBER: AK108139
  ref <309>: DATABASE ENTRY DATE: 2002-08-28
gacctaggtttttcaccttcttcttcccctctcatccccttcgcgtcgcgtcctgtcctcccaaccccttcttccctccgccgctgccatcgccgccttcccccctccgaatcgatcgccggccggccgcccgcccgccaccgatcctcctccggtgtcccgtgccccggccagatccgcgggattcggggggtgtagcggtagccttcctcccgggtcggatgccgcgcgacctgtcgcggtcgccgccgccgcgccggcggcggcggcgctcgccgtcaccgccgcggtaccaccggggagtacgcagggcgtgcagggaccgcagccccagccgcggcagcaggtccccgtatcgctcctcctatagaaggaagagcccttcaccttccccaagacggcgcattagtcgttctccatctcccaggcgacataaaagtcggtctccatcgcaaagacactacagaagaaagagaagtcggagtgtcactagctctccgattaccaaatctcaaagtcctcctgttgcgcgtgggccagcagagaataagaatattgttgataagcaaaggct

SEQ ID NO: 10792 - DNA, 1526 bp, Oryza sativa
  ref <308>: DATABASE ACCESSION NUMBER: AK108140
  ref <309>: DATABASE ENTRY DATE: 2002-08-28
gtcagtgcccagcgtgcgccatgcgtgcgacgacgggcgcgcggcatcttcaccccccatggaggcgcgggctgaggcaccaccgacagtcgacgatgccgccgcgcgccagcagggggaggctcgccgacgcggccctcttcaccgccggcgccgtgctggggtccgtgctgctgctgacgctcgcctcgcccttctcctcctcgtcgtctccgtcgtccggcgtggggagcggtgaggtcgaccggctcggcggcgggcgaacgttctacgacgacccgggggtggcgtacaccatcgaccggcccatcgtcgggtgggacgagaagcgcgccgagtggctccgcgcgcacccggagctggctggaggcggcggcgagcgcgtgctgatggtgtccgggtcgcagccggagccgtgcgggtcgcctgcgggggacagcttgctgacacggctgctgaagaacaagctggattactgccggctcaacggcgtgcagctgctgtacaacacggcgctcctccggccgtcgatggacaggtactgggcgaagatcccggtggtgcgggccgccatggtcgcccacccggaggcggagtgggtgtggtgggtggactccgacgcggtgctcaccgacatggacttccgcctcccgctgagccggtaccgcgaccacaacttcgtcgcccatggctggccgcacctcgtgtacgagtccaggtcgtggaccagcctcaacgccggcgtgttcctcatccgcaactgccagtggtcgctcgacttcatggacgcgtgggccgccatggggccggactcgccggagtaccagcactggggcgccgtgctcacctccaccttcaaggacaaggtgttcaacgagtccgacgaccagtcggcgctcgtgtacatgctgctgcagagcggcagcccgtggcgggacaaggtgtacctagagagcgactactacttcgaggggtactggctggagatcgcggggaggctcggcaacatcacggagcggtacgaggcgatggagcgcggggcggcgccgctgcggaggcggcacgcggaggcggagcacgcgtcgtacgcggcggcgagggacgccgcgctggcgggcgccgggctggcggagagcggggtgagcgggtggcggcgcccgttcgtgacgcacttcaccggatgccagccgtgcagcggccaccggaacgagcactacacggggaagagctgcgacgagggcatccgccgcgcgctcagcttcgccgacgaccaggtgctcagggcgtacgggttccggcacgccggcccgctcagcgacgccgtgagcccgctgccgttcgaccaccccacgcaaacggcgtgagagtgacgtggctcatcagccaatgaaaccgtcaaagctgttactgttaaaccgtgcatacagcagacagcttttgctggtgtgtgcgaggtgagttttcgaggttgattgcttgctagtacagcggtgcagtaaaatttgttttgttcttcgtgttgatac

SEQ ID NO: 10793 - DNA, 1548 bp, Oryza sativa
  ref <308>: DATABASE ACCESSION NUMBER: AK108141
  ref <309>: DATABASE ENTRY DATE: 2002-08-28
ataacaaccactctcacacacatccgcttgccgcttcaaatacctttgatcgcagccgctccatcacatcgatccatccacacatccatccattcgcttcaccttcgcttaagcatcctcgcactgcagcaagcaagcacaccactgtcgctacccgagttcatcgtacatattcgatcgctcagtactacctaatcaacaaccatcacatatcaaccaacaaccgccaatatgcgttacgccgtcgcttcctctatcgccttcgcggccgctgttgtcgccactcccgtcgcccagggtgtcactgagcagatcaagcccgacacttctgctccctccggctgctctcccagctacgacggcgacttcgagatccaggtcgtcaacgtcactcagtccgcttccaagcgctccctgaacaagaggcagcaggccgacgccgagaagcttgagatcgccctcaaggatggtgttctcaccgactccaaggaccgcactggttacatcgccgccaaccaccagttccaattcgacggccctgcccagactggcgccatctacactgctggctggtctgcttgcagcaacggctccctcgccctcggcgacaccactgtcttcttccagtgcttgagcggcgacttctacaacctttacgacgagtccactggcgagcagtgcaacgaggttcacatcaacattgtcaagggtggtgcttccggtgcctctcaggctcccgacggacagccccaggagacccccgctgtcagcgctcctgtctcccagattggcgatggacaggttcaggctagcacatccggtgctcccgtttcccagatctccgacggacaggttcaggccagcaccgccgctgccactggcgctcccgtctcccagatttccgacggtcagatccaggccagcacttccggcgctgctgtctctcagatccccgacggccaggtccaggctgcacccactgtcagccctgtcgcccagatccccgacggtcagatccaggctccctacagcaacggcaccaccaccaagcccgccactccgtctggcactggtgttggtgagcagcccgctccctttgagggtgccgccaccaaggcctacaccgctggcgctgccgccgtcgtcgccctcttcggcctcgtcgttgccctttaagcgcatcgcccgccaatttcaacatgagtctctactcatcaccggcggctcaacactccttaacgacatatcaatggcgacgaacggaggttgggcaggcggcgttctttttctcactttcacacttttcttttagcagctttgctgtacatgatttctttacttcttggacagcccaagaaataatgtctctatccctgcgcgatggtggattcgcgcagcagaacacggtaatggcagggcgggatgaattgcaaaaatcattgggattggttgtatcccaagcactttccttttggcatagcctggtgggagtgcagcattccagaagggtaattaggatagctctttgcaaaacaaaaatcattcctg

SEQ ID NO: 10794 - DNA, 1082 bp, Oryza sativa
  ref <308>: DATABASE ACCESSION NUMBER: AK108142
  ref <309>: DATABASE ENTRY DATE: 2002-08-28
aaccgccgtctcctcctccccccactctcgccttcccccctctctctcctctcctctccgcgactccctccacccccgcgcgcgcgcgttttttttttttcgtaagggtttttggagggcggcgcggggatggcggacgcggggcacgacgagagcgggagcccgccgaggagcggcggggtgagggagcaggacaggttcctgcccatcgccaacatcagccgcatcatgaagaaggccgtcccggcgaccggcaagatcgccaaggacgccaaggagaccctgcaggagtgcgtctcggagttcatctccttcgtcaccagcgaggcgagcgacaaatgtcagaaggagaagcgcaagaccatcaacggggaagatctcctctttgcgatgggtacgcttggctttgaggagtacgttgatccgttgaagatctatttacacaagtacagagagatggagggtgatagtaagctgtcctcaaaggctggtgatggttcagtaaagaaggatacaattggtccgcacagtggcgctagtagctcaagtgcgcaagggatggttggggcttacacccaagggatgggttatatgcaacctcagtatcataatggggacacctaaagatgaggacagtgaaaattttcagtaactggtgtcctctgtgagttattatccatctgttaaggaagaacccacattagggccatatttattagtagaagactaaagcacttgaagggtgttggtttagaaagggtgttaacagttggctgtggcgattgcttcacagatgtaaattgcttcataagtggtttaatgcttgtttttgcctgtatattcagagcaattttcacatattggtagttctgcaatcttttgcattcccatacatgtatcaggtggcacaaatctattgcaagtaccctagcattgaataatgctggttaacatataattctgtaacgtccgtattgtttcgactgtgatgcttgccgtatgggcaatggcatgtgttctagagggggcattcaatatttaggtatctcaagaatgtaccaaatactcccttcgttcaattc

SEQ ID NO: 10795 - DNA, 1151 bp, Oryza sativa
  ref <308>: DATABASE ACCESSION NUMBER: AK108143
  ref <309>: DATABASE ENTRY DATE: 2002-08-28
gattctgatacatcgatacaatcaagctagcatggagatggacatcggcgagggcgagagctgctgcggcaggcgaaagcagcagcagcagcagaatattagcagcagcaagtcacgcaagtgctgcccgctgcggcggtcgcggaaggggtgcatgaaggggaagggcgggccggagaaccagcgttgccccttccgcggcgtccggcagcgcacctggggcaagtgggtggccgagatccgcgagcccaaccgcggcgcccgcctctggctcggcaccttcaacaccgccctcgacgccgcccgcgcctacgactccgccgccagggccctctacggcgactgcgcccgcctcaacctactcctcgccgccgccaccgccggtgctcctcctgctgctgctaccccttccgtggccacgccctgcagcaccaacgacgactccaacaactcgtcttccacgacgcatcagcagcagctgacgacgatgctgcagctggacgacgacaactacacgctgcagccgtcgtcgtcagatcaagaggacttcgagacgtacgtcacgcggctacccaaggcggaggactttgggctggagggcttccaggaggttccactcgacgtcctcgacgaagccggcggtggcatcagcatctgggacctctccatctgccccgccgatttcatggccaccgccgccaccaccaccgccaaatcatcttaattatatattcataataataataataataataataataataataattaacgacgacgacgacctacctacatcatatatctatctatctagcgcccgcgcgcggctgcctatatagatatatgatgatcagctccatctctctctaaagtctaaacatgcatgcttgtcgtcgtcgtcgtcgtcatcatcgtcgttacttgtatatatactccactacttagtactaactactataattagctctagcgtactgctacttttatacggcatgcaagcggccgacatcctgatcgatcaactgtgagcatgctgtatgcatcgatcgatcttaattagttaggcgagctgtgcttgcttatcgatcttaattatatcatccgatcccatattatataagtaatactaattaatactatatatattatgt

SEQ ID NO: 10796 - DNA, 1223 bp, Oryza sativa
  ref <308>: DATABASE ACCESSION NUMBER: AK108144
  ref <309>: DATABASE ENTRY DATE: 2002-08-28
ctctctctctctctctctctctctaaagattccatctttgatttcgtttctctctctagaaggaaggaaggaggtcgccggcggcgatggggttcccgtcggtgtgctactgcgtgatactgccgcagccgctggtgctggtgctgcagctgctcgacctgctgcgccacgccttcctgctctgcctctccgcgctcggcctcgccgcgccgccgctcccggacgaacaccccgcctacgcgccgcccccgccgccgccggcgtcgatggcggccctccccgccgacctcgtctgggcgttccagcccgcgccggagccggccgccatcaaggcgcgcctccccgccgtccgctacgccgacttcgtcaggtgccgccgcgccgccgcggcggccgcggcgtcgtgcgtcgtgtgcctcggcgcgctcgaggcgcgtcaccgggtgcgcgagctcggcaactgcgcgcacgcgttccacaaggcgtgcatcgacaagtgggtcgacaagggccaggccacctgcccgctctgccgcgccgccctcctcccctccgccgacgacgccgacgccgccgccatcgccgccaccaccaggcaccacctcccctccttctgatccatgtcgccaagaacccatcttgcttagcacccaacacccccttccaccccaagagcaacaagggttccctcctcctttctccaccaatggatcaaatccaatcaaaatggaagaacacacaacacaagagaagagagatagagagagaaatcaatggaggaagaagatgagaggagagagagggggtgtgtgtggtggaggagtattattggtaggtgaggcactaattatgaggaggacaaggatggctacctgcactgcattggatctggtgaatttcagccctagctagctatagatccaacatctcctctcttcccttctcttctcttctcttcacttcacttcacatcaactttttctttgcttttcttttttctactttactttcttcttttgttgccttcacctcctttttgaaattttgctttctttctctttaatttttctccctctttttccttcttttttttgagggtttcctctccccttgtcattaacttaatttgtaaggggggattaagagagagagatgtgtacatacctgcctccactttgacaaatatcggaataataatttataatgatgatgatgatgatgat

SEQ ID NO: 10797 - DNA, 1051 bp, Oryza sativa
  ref <308>: DATABASE ACCESSION NUMBER: AK108145
  ref <309>: DATABASE ENTRY DATE: 2002-08-28
attcccactcgcaacccacgctgccccactctcgccaaccccctccacgtccacgatctgcccgctttgcagtgcccgggcgccatggacgccgcctcctgcgtgggcgtggccccggccgcgctgctgtccaggtccttctccgacgccgccgccatcgcccgcgcgctccacttctccctctgcgactcctcgccgctccccgagccgacgacgcatcagtacgttgctgccaccgacgtcgaccttggcgcgtgcggcgttgccgtggccgcgcccacgcctgcagtgtcgagcgagaacgccgtggtgctgaaaacccgggcgtcgttgtcgccgtcggctcggtgccggcttgggccggcgggtggcgggcgcgcggggaagcggcggccgaggccgtcgaagcgggcgcccaccacgtacatcagcaccgacgcggccacgttccgcatcatggtgcagcaggtgaccggcgcgcaggtcgagccgcaggacgacgcctgcctcggcctcctcatgccaccaccgcccttcgacgtcgtcgaccccgccgccttgctaccggcagacaccgcggcgtgcgcgggcgcggcccacgtcgccacttgcgtcccccaccctctccacgctgccgctgctgcggcggcagcggtggctgccccggagcagccgtgcttcccgacgctggactcgtggaacgtcatgtacggcaaggacgaggttgtttgaattaccaaggtaggagtactacgtacttgtaactaatgaatgatgcatgccatcgtgtgccctgcccatcgatcgcttgctcccatcgtctgttcgacgtagaattgtagagagaagctgtacattactgcacgcagtgagccgtgtgtccgtggtggcagagcgcgtcggagtgtgctagcttagctagtgtagcaaattagcaaccaggttcccggctctcctacctttcttgtgatggattcctatagttgcacttgcagatgcgtctcaatgtcccattgatccattttgcccttcaatctctgcttttccggcc

SEQ ID NO: 10798 - DNA, 801 bp, Oryza sativa
  ref <308>: DATABASE ACCESSION NUMBER: AK108146
  ref <309>: DATABASE ENTRY DATE: 2002-08-28
aaagctgctacaccgctacctagctaatctagctgtctcgccgtcctgatccatcctcgattcattggcgttggcgtttgctcgaactcgagcacgagcgagctagctgctaatggggatctgtatgtcatccgtggccgtgtggaaggagaaggtcgtctacgcggggcggcggcgcggcgaggttgccggcgcggaggacgtgggaggcgttggcgctggcggcgggtgtggtggcccgtacgggctactgggagtcgacgctgacgccgacgtgctggagatcgaggaggaagcggcggagaaggtggtgaagtgcggggcggaggcggaggcggctttgacggtggcggcgggtggcacgccggcacggccgatatggcagaggaaggtgctgatgggcgtcaagtgccagctgccgcggttcagcgggatgatactgtacgacgagcgtggccgaccggtgtgcagcggcgtccgggacagggcgcgcgacaaggaaaagcacgcggcggcgatcatggtgctgagggacatgctctagcctcttggcccctagctcgccggccggccggccggccactcgccgtccccggtggcgatagatcttcttcatccctctgctttcctgtttcagttaaccggtcgatatgtgtgtacatctttttgtttcatgggttgtccatttggccgactacgtcgtctgtctcagtagtgatcagtagctactagccaggagcccaggagtatgtatcggggaggtagtgaggcaccgagaggcaataaaagggttgtctatgc

SEQ ID NO: 10799 - DNA, 1241 bp, Oryza sativa
  ref <308>: DATABASE ACCESSION NUMBER: AK108147
  ref <309>: DATABASE ENTRY DATE: 2002-08-28
atatcgtctggatccccgttgcgcccatccaccacatacacatctacagccatggccgcagtctacaagtcgctcaacaagggcgccggcaaccccgccgcccgcgatgccgacgccgagaagcccaggaacaggcagagactgctcatgctcagctccagaggtgttaccatgagacaccgccacctcctcaacgacttgcactccctcctcccgcactcgcgcaaagacgccaaactcgacacaaagacccaactctcccagctcaacgaactcgccgacctctacaactgcaacaatgtcatgttcttcgaagcccgtaaaggcaaggatctctacgtctggctgtccaagcctccgaacggccccaccgtcaagatgcactgtcagaacgtccacaccaccgaggagctcaacttcaccggcaaccgtctcaagggctcccgtcccatcctcagcttcgacgccagcttcgacaagcaagcccacacccgcgtgatcaaggagctcctcacgcagtccttcggcgtccctcccggaagccgcaaagtcaagcccttcaccgaccacgtcatgagcttcaccctcgccggcaacggcaaagtctggatccgctgctaccaaatctccgagcaagaagccgcgaagcacgtcaagcccactggcgacgacacacccgcagaccccaaggctctccccacagtcgccggactcaagggcgagaccaacatctcactcgtcgaaatcggaccccgtctcgtcttgacacccatcgtcatccaggagggttcattcggcggccccatcatctacgagaacaaggagttcgtcagccccaaccagatccgttccgacctgcgcagagcaaaggccggccgctacaacgagcgcacagagagccagatcgagcgcaaggccagacatcgcgactgggcctcaggacaggcgaaggagccaagagagtcgatcctctcgacaacagggtcgttttcgcttagaggagaggaggaagtgggaagggaaaggcggaatttcagggctgccatttttggaacagtggcaaaaaagcatcatagcggcggcgtttgggcgtcaagaatcgacaagaagattagatctgacgatggggactttttctcgtattcacttggtgtggcggaacgggcatgtgctggacgggcatgcacttcctggccacccaaaaagtatgtacaacacatgtattgtggactatttatgct

SEQ ID NO: 10800 - DNA, 921 bp, Oryza sativa
  ref <308>: DATABASE ACCESSION NUMBER: AK108148
  ref <309>: DATABASE ENTRY DATE: 2002-08-28
atcctcctccgaaaacgcctcgcactcgggccgcttaggatagccgccatcggaggtgaggggggtccggccaggccatatcgcggcgctggtcgttataggcatcgataatgcctgtaggggagggtggccggcccttcccctgtcgcgcgtaggtcaggaaggccacgcattgtaatcggcgcgtccatcgtggggcgcgctgcgaatccggcgagggaatcgtgctccccgcctcgaactcatactggccgctagttgccaggcgaactccgggagcagtctgtcgaagactgcctcgaccgaatcggcgtcgatccaagtatcgatgcaaaaatctgagggagcagtcttgtataagacccccctgtcaagtcggtgtcgttgaaatgacgatgcatgaatacgacggcgcggtgtcgaccgcgtcgtagagatatcaccgtccaatctggacggcggtttacaacggggcgcctagcgtgggcgtcacgggggccaggggtcctcgtttccgtttcgaacggtcttgtggcgaccgttgaaagtcactactcagtctctgcacgcctagcgagcagggattaggcgacgttttctccagcgcaagtctcggttcgttcagcaagatttccttcgcgatctctctttggtggatcaaggcagtcggtcggttttgatgcgcggcaacagcgcttccttccgtctgcgaatctggttcggtacgaagggtgaatgcccctatgcgaggatcccttctttggtggacgtcttcaagatttgcagcaggtacctcccgcgtggcagggacgaatcctgtgatggtgaggggccaagcttccgcgcgcgtctgctcgcgacagacgtgtgtggcgagtcttgtctcctcgacgttgtcgaaatgccatgaaagtcaaaacc

SEQ ID NO: 10801 - DNA, 534 bp, Oryza sativa
  ref <308>: DATABASE ACCESSION NUMBER: AK108149
  ref <309>: DATABASE ENTRY DATE: 2002-08-28
agcaccctcgcgaccaccaacaccacccaaacccttctcaccacccccccaaaaaccgtcaaaatggagaacgaccgcggcgagcttgtcgacctgtacgtcccccgcaagtgcagcgcgaccaaccgcatcatcaaggccaaggaccacggctccgtccagatcagcatcgccaaggtcgacgagaacggccgctacaccggcgagaaccaggtctacgcgctctgcggcttcgtgcgcgcgatgggcgagagcgacgactgcatgaaccgcctcacccagagggacggctacctcaagggtgtctggaacgcgagcggaaactagatttgcgattgtgttgagcaacttttttctgagggaatgcgggaatgattgggatgagaggagtttttagagacgactgcacgctgatgcctttgatggtacgggacataacaaaacaatgggctgtgtgctcagcgcagccgggctcaacttcgattccgactttctcgtagctctgcaattcaaacctaccgagtccgattcacg

SEQ ID NO: 10802 - DNA, 810 bp, Oryza sativa
  ref <308>: DATABASE ACCESSION NUMBER: AK108150
  ref <309>: DATABASE ENTRY DATE: 2002-08-28
aggactcatcccacatcaagatttgactctgccaaaatgatcatcagcaaggagaaccgcaagaccatctacgcctctctcttcaaggagggcgtcatggttgcccccaagaacttcaccgttcagcaccccgagctcgagatccctaacctcgaggtggtcaaggcgctgcagtcgctcacttcgcgcggctacgtgcacacgcagttctcgtggcagtggtacttctacaccctcaccgacgagggtgttgagtacctgcgcgagttcctccacctccccgccgagattgtgcccgccacgcacaagcgccccgcccgccctgcgcgtgcccccgtcggtggccgtgacggtgcctaccgcgccccccgcggcgaccgtgacggtggcgaccgcgagtaccgccgccgcgacggcgctgctgctggcgacaagaaggacggcgccccctcgggcgagtaccgcccccgcttcgccggtgtcggccgtggcgccccccgccagtaatctcgtcgccaaccatctagcctcaagccttccaagttgtctcccacgtcatcaggaaggatcttgactcgatcagcgacttccccacaaaaaaggagactcttcatctccacccttttcaatccctctacggatgcggcagggcacgtttggataggctttcgttgcgcgaagccgggcacaacttcaaggctttacacacctgttctttcttctttcgactgtttcttaaacacgtgcatagccgcttgaagcctcttgttccaaatccaacgtcgggctggcgcccttagtccgccatgc

SEQ ID NO: 10803 - DNA, 837 bp, Oryza sativa
  ref <308>: DATABASE ACCESSION NUMBER: AK108151
  ref <309>: DATABASE ENTRY DATE: 2002-08-28
acacgaaatgtcggcctcgctgaagtgaacccgaacggctgtacgccctgtaccccaatccaaaccattctgctgttctcttcccgtcgccatggccatctccgccgccgcggcagcggcagcggcgctctcgttccccagagcgctcccctctcactccaacctcgccgccaccgccaccgccggcgcagcgcggagccacccgcctgcgcgcactccgagcgcggggtcaccttcgacccgggctccgcattctaccgcagcgacagcgccgcgggccgcgacctcgccgtcctcgcggccaccctccaccgccgcgccgccggcccctccgccccgttcctctgcctcgacgccatgtgcggctgcggcgtccgcgcgctccgctacctggcgcaggtcggcgccgacttcgtctgggccaacgacgcctccgaggcgctccgccccgtcatcgtcggcaacctctcccgcttcgagcgggcgccggacaggaggtgggcggtgtcgcacctcgacgccacccggctgctctcggagcgctacctccgccgcgagtacttcgacgtcatcgacgtggactcgttcggcggcgacgccgcgtacatcagggcggcgttgctggcgctcagaattgggggcctactgtatctgacatctacggattggcggtccgcgagagggtatggctcaagaaggtgagtccgtggtccatttcggcatgacacatctcgggtagtatcatccaatttgtaatgccttcgccttagcttcttaaagcttgtgctaattcatcaagcatttctatcttttgtcaattattagaattgttctgtt

SEQ ID NO: 10804 - DNA, 1574 bp, Oryza sativa
  ref <308>: DATABASE ACCESSION NUMBER: AK108152
  ref <309>: DATABASE ENTRY DATE: 2002-08-28
accatcctcgcagtcgtcgctcatctccatacctggtccgacactgcacatcttcaccctgttctcgcccagcacgtcgtagggattctcgcagagatcagcacgaacgaccacttcgtccagtccgacctggagcactgtccatcgtcgattcaccgcacccaacccaacaaccaccaacatgtcggctgaccttgtcaccgttctcgccgaaggcacgttcgaggagcagatcgtcgaggtctcggcgttcctctcgcgctcgcaggccgaggcttcgcgcaacgactttatccagcgcttccagcagctcgcgctcgaggctgagccggctgcacccgccgccgccgacgccgccgaggatgcggccgtgtcgtcgtccgacgcgggcaagaagaagcagaccgtccagcagctggtttcggaagtcaggtcgcttggcgagggcaccgaccgcgagctggagggtgtgtacaacctgctcgcctcgctcatcacctcgacgttcggcgacgatgcggcgcagtccgcacagctgctcagcacgctcgtcggcgccgtcggcaaggagggcgcggcggacaagaacaacgtgaggtatcgcatcctgtccaacctgttcaacagcctgcctgcgacgtcggcgcagcgtctgggcatcttcaacgcgctgctggcgctcgcggctgccaacgacgatctggactacctcacctcgtcgctcaccgcgctgccgcagtggctgtcgcagtgggaggtgtccgaggccgacaaggcggcgtgcctcgagtcggtggccaaggcgctcgagggcgccgagaaggagcacggccagaccaacaaggcgtatcagttcctgctgctccacctgcgcttcatcagcaacagcgccggcggtgccgacaccaagcaggctgccgagcgcaccgtggctgcggcgctgcgtctgcccaagctgtacgagttcgaggagctcatgcagatcaaggcggtgctggccctcaacggcacgcccgtattcgagctgctcaagatctttgtcggcggcaatgccaaggactttgcggcgtggaacaaggccaacggcgccgagctggcacgactgggactcgaccacgaccagctggtgcacaagatgcgtctgctcgacttggcggatctgtgtgcgctgtcggtgtcgtcggatgtggcgtacgccgacattgccaagacgctcgaggtgggtgcggacgaggtggaggtgtgggtcatcgatgtcatccgcgccggtctggtgtccggcaagctgagccaggtcaacgaggcgttccgcgtgtacaagagcacgcaccgccagtttggaaagccgcagtggcagcagctcgaggcgcgtctggtgcagtggcacacgagcatcgccaacatcatcgacaccatcgccgccacccgcggcggcaagctccccgacgccatcgccgacactgccgtccaggcataagcagcatcctccttcccgaaaaacagtcgtccacgtccaggtcaggatgacctcacttgtgtcgatctcaagaatacagtgtagtcttttttgtctc

SEQ ID NO: 10805 - DNA, 914 bp, Oryza sativa
  ref <308>: DATABASE ACCESSION NUMBER: AK108153
  ref <309>: DATABASE ENTRY DATE: 2002-08-28
ctcgatctcgatctctcgctcgcttgtggtctcacactactactagctgtggcagtggcgccaatggaggaattagcaccggagctgatcggcccgaggatctccttctctcacgacggcgtcgtggcgaccgccggagcggcgacaccggcggcgcggtcggacacgtcgctcgtcgtcgtcatgtcgtcgtggcggcggctccccgagccggagttcgacttcgccaatgcggccgccgccgacgtcgcgccggccgatcgactcttcgccggcgggaagctgctgcccgtgccgccgttgccgccggttcatcccaagccaagcccgtgcaagcagcagcaggcaacaagcggcggcggcgtgaagccgacgagttaccagaggcggccgggttcttggacgtcgccgttcacgcgcagctgcagcgtgaattccgccacgacggcggcgccgcggtcggggtcggggagcttcagctgcccgtcgttcccgctcatgcggagccgatcggctggctcggcggccgcggcgcagggcggcggcctcggcggcgtcgtctcgggcggcggtcaccaccggccgccgcagcacaagaaagccggtgctacagcagcagcttactactatgggggcagcagaaatggcagctccggccatggcgttagggttagcccggtgatcaacgtgccatccattggcaccagcatggtgaacatgctgagctacttgctctgcgactgtggcaacaagaccaccaagaacaggggtttcggacttaattgctagcttaggtggtagtagcttagatagaagtaattaaacgattaagcaaatgtactcatcatgcttgctaaggttctaaattcactactactagtcaattgggctatgaattgtgataaattttcgct

SEQ ID NO: 10806 - DNA, 1485 bp, Oryza sativa
  ref <308>: DATABASE ACCESSION NUMBER: AK108154
  ref <309>: DATABASE ENTRY DATE: 2002-08-28
cgcgaagatggcgccgccgccgccgccgccgtgctccgtgcgcgccgcgggctccaatccaattggctgcctcgaggtagcagagccgtggagcggcgccgcgccgcccccgctgccgccgctgccgggccatctgcatgtcgcggcgccggcggcggaggacgacgacgacgcgctcgccgccgccgccgccgccgtgccgtccgagcagagggtgcacgacgtcgttctgaagcaagcggcgctcgccgcggcagcgcccgagatgcggaggccggcgcagttggccgagagggagcgcgtcgccggcggcctgaacgccgccttcgatcgctgcggcgaggtctgcaaggagtacgccaagacattctacctcgcgacgcagctgatgacgccggagaggaggagggcaatctgggcgatatacgtgtggtgcaggcgaacggacgagctggtggatgggcccaacgcgtcgcacatgtcggcgctggctctcgaccggtgggagtcgcggctggacgacatcttcgccggccgcccctacgacatgctcgacgccgccctctcccacaccgtcgccaccttccccgtcgacatccagccgttcagggacatgatcgaggggatgcgattggacctaacgaagtcgaggtacaggagcttcgacgagctctacctctactgctactacgtcgccggaacggtcgggctcatgacggtgccggtcatgggcatctcgccggactcgagggccaacaccgagaccgtctacaagggggcactggctctcggcctcgccaaccagctcaccaacattctcagggacgtcggcgaggatgcaagaagaggcaggatctatctcccaatggacgagctcgagatggccggactctctgaagatgacatcttcgacggccgcgtcacggacagatggagatgttttatgagggatcagatcacgagagcgagggcgtttttcagacaggccgaagaaggcgccagcgagctcaatcaggagagccgatggccggtttgggcttctctacttctgtaccgacaaatccttgacgagatcgaggccaacgattacaacaacttcaccaagagggcctacgtcccaaaggcaaagaagattgtggctctgcctaaagcttactacagatcactcatgctcccctcttcagtgaggcactgctctagcctaacatcatcatgatcagcttgtggtattgttgttacaatttatcttgtattcaagtcttgcaatgtacaaagtattgcagtatctgcaaatatatgtacactttaacattgtgtatatatagggaagtttctatgaaacagagtagtgtatatatgaccatatttcataggtcatactactcttgcataatgctgtcagcttatcactcattgcttcagtcaatcagctaggttgtgaaagtacctaactatctatatgaaatattagtcttatcagcatgg

SEQ ID NO: 10807 - DNA, 924 bp, Oryza sativa
  ref <308>: DATABASE ACCESSION NUMBER: AK108155
  ref <309>: DATABASE ENTRY DATE: 2002-08-28
ttgagccgagcagaggcgcgatggtggccggcccgagccaggacggctcggccacagaggggcggcggcggcggcgcatcaccagggttcgccgccgacggcgacgacgcacggcggcatcccggcacacggcttcctctctctctctcctcttttcttttccctctctctctctcgacgcacgccgacgtgctgcactgcccgtcgccggagctcatgaggctcctcctctgccacttcgaccgcctcggcgtcgtcctcgccgccgcggagttcgtcttcaccgagccctactcaaagcgcctcatgctccgcctccgcctccgcggcgaggtcctccatggcagcagcggtgtcacgctggagcagggccatgccgtggagttcgccgtccacgaccgcctctacaatgcgtgcgctcaccggtgaaggagggattggtgatgacggcttcagatcgacaccggggaagaggaagccgatctccatgcctcttgcgtctccggttgggattcttggggggtcttggaggggagatcaaggcggtgctgatggcgcggtggctcgtcctaatttggtccacggcggctagaacaccgaggtcgacatggcggtgaccctgggagcacgctcctgggcatccatgtgcacagaggcgttcctgtcgactcactgcatggaaagggatgagattagagggaatgaaaccagtgtcttgaggaggtaatgaaacgtggatgagattgggacgacgacggctcggcggcgattggcgccatccttcttggtagcccgcgatgagatgaacagagaaagagacgaagaagaacagagaaagagagattgacaactgggcccatgggcaaacttgtctttaaccaaaatttctctctgtttcgatcgaaaataattaaataatgggag

SEQ ID NO: 10808 - DNA, 998 bp, Oryza sativa
  ref <308>: DATABASE ACCESSION NUMBER: AK108156
  ref <309>: DATABASE ENTRY DATE: 2002-08-28
ctcttcctcctttccacctctctttccctctcgttcgccgccggaagctagcgccgcctcgacttctccggcggctgaagtcagtggccgaaggagcggcggggtgttttcccgcctcgaaagctcaccgccggcagatcaggcgggagagaaggcaaccgccgtcgcctcgggagctccgcgagacgatctccgatgtccgtgccctccgtcagtctcctctttccctcgtcgctcccgtccacgcgagcggcgccgcctgtatcctgctgcttcctcgctgccgcatcctcgcccgtgaccacccttctgcatcggtgaatgtctgggatggcggatgggtcatttcttgatcggatggtgtctcaacttcggtcagcatgcaggtactacactggatatcccaaggatctcgggccatcaagaattataccattcacgtcagagcgtcaattcgtgcagctgttgcatgaaggccgtccagtagttgttgcctttaccattaagtgcacttatactcatcaccttgacaaggtactggaggaggctgctgctacatttcatccacacgtaaagtttgttcgagttgaatgcccaaagtatcccggattttgcctcacgaggcaaaagaatgagtatccgtttattgaagtattttacaacccagaacaggctgctagcccaggaaaggcggtggaccctaatgtcacaaagtactcagtgaaagttctccctttcaactatgaccagagcgtgtatggattccgggaatactttaagaagcacggattcaagtattttgaaacaaattagatcaactattgaaaatcgttgtgatgaaacatgatactagttaacaaaccatctttaggacgttcgttccgcctatactagaacgctcctgttaaaagcttgtctgtatgtgcctatgtggcattaccgtaaaatgcttgctaatcggttctcaatgaaagatggccaggcaactatcgatctcc

SEQ ID NO: 10809 - DNA, 1223 bp, Oryza sativa
  ref <308>: DATABASE ACCESSION NUMBER: AK108157
  ref <309>: DATABASE ENTRY DATE: 2002-08-28
acctctctctctccccgacctctctcttcaccagagcggcggcggcggcggtcgggagcggcggcagtggtgatggggaggttgggttcttgattggtgtcggattcttggttggttgatggggtttgtgaggtgtggcgctgagttggaaagatccgacatatactccggcgcggacgggtcgggtctcgccggcgccgccgcgaggggggagatggatcgggacgacgagtggctgcgccgcgcgctggcggaatttggaggaggaggcggcggcgtgtgggagctcgtggatgccgcgctggcctgtgccgcgcacgaccgccccgacgagctgcgcgcgcggcgcgacggtatcgtggagcggctctacgcccggcggcggctacaacaactgagccggaggacgagctgctgagcttgctgcagagcctggcagacatggacatcccgtacaaggcgctccaggagacggacatcggacggcatgtgaacggtctgcgcaaacatccctccggtgaagtccggctactcgccatctcatcctcgtcttcctcatcggcctcgccatggaccggctcctcggcggccgcgacggcggcatcgtggctcgagtccggatctggctccgcgacgggaagcaccacggtagtcgccgttgccggctcgacgggcatctcggccaccagctgcttctcgttgccatggaatccctccccacggtggtagaagccgccgtacctatacgcatcccgccggtggaggccgccgctcctccggtgaagagaaaagccggggggagagagagaggtaaaggagagagagggggaggaagaagggaaggagagggaggatgatacgtgggtcctacaatatatatattttttgtatgacatatgggtcccacatattttttaatttttgtttttattctaatgccacgtaagtgctacgtaggaaaagactcggtcaaaaccgtcacgtaggcgccatatcagccaaaaccagggatattgtttacaccggttttgatagttggaggagtcgatatacccggttttgtggttggaggatatgaatactcggacgatagttgagggagtcaaattatactttttccaaaagttaatgtacgtccgtttgctttttttggcccagatgatacttgtgttgggccgtcatttttcttttcgttttatgggctaaacgcatggatttttttt

SEQ ID NO: 10810 - DNA, 1117 bp, Oryza sativa
  ref <308>: DATABASE ACCESSION NUMBER: AK108158
  ref <309>: DATABASE ENTRY DATE: 2002-08-28
gaggcagtcgccgacgagagcgagagagcgtgtcacggcggcggcgcacgcgtatgagtatgaggcggttgggcagcggcaatgccggcggcggcgcggcagtggccggagagtgggatggtggtggcattgcggggaggatgaggggggtgaacgcggggatcatggacgagaaggtgctggagctggtgttccgggcgctgaactgggacccgagggagctgtgcgtggtggcgagggtgagccggcggctgcgggcggtggcggagcgggtgctgtggcgggagctctgcgtgtcgagggcgccgcggatggtgtcggcgctgtcgggcccgaccgcggcggtggcggcggcggcggggcgcatcgggggaggctggccggcgatggcgaagctgctcttcttctgctgcggcgcggcgggcgccgccgtgccgggccacttcgcgcccgtgtcgcggttctccaagacgtcgggccggagcttcctgtcgcggcggtgcgcgggggacctgctgttcgtgtcggacccgtgcgagcacgccgccggcgccgcgtccgacgacgacgtcgtgggcgcgtaccgcggcgtgtaccgcgggttcatgcggtcgcggacgcgcgccttcctcgtcggccaccgcgccccgctggagccgcgcgtccgctgcccctactgcggcgcccgcgtgtggagcatgaccgccgcggggctcgcgccgcgcagcgcgtgccgctggctcggcgccaacgagggccgtctcgagtacttcgtctgcgtcagcggccacctccacggcagctgctggctcgcccgcctctcctcctcctcctcctccagcgacggcgagcgcagcgccgactccgactccaaccacagcgacgacgagacattcgccgccgccgacgtgagcctcccacttcctccagccggccgcgtgccagcccggcgcctccgaggcaggcccgccatgtgaagcaataccggtagtttttttttttacctccattttttcactgtttacgcagctcaggtcagctgtttttaccggatcagaagcagatcaggaggattgcactgtgctttgcgccttttgtgaattgtgcctttcacttc

SEQ ID NO: 10811 - DNA, 799 bp, Oryza sativa
  ref <308>: DATABASE ACCESSION NUMBER: AK108159
  ref <309>: DATABASE ENTRY DATE: 2002-08-28
acaaagccacacccacacgtgccgcatagaccatcgcggaccaaaggaaactgagaggtcgtcgtcgtcgtttgctccgggatcgagatgacggaggcgggcggcgagcgcaggatcggcgtggccatggacttctcgccgagcagcaagaaggcgctgcagtgggcggccgacaacctcctccgcaagggcgacaccctcgtcctcctccacatccggcaccacggccgcgacgaggccaagaacgtcctctggtctcacaccggatcaccgctgatcccgctcgaggagctcatggagacggcggtgaggcagcgctatgatataccttcggacgaagaggtgttcgacatgctcaacgccgtgtcccgggagaaggagctgtccgtggtgctgaagatgtactggggcgagccgagggagaaggtgtgcgaggctgtgggggagctcaatctcgaatcgctcgtcatgggcagccgtggcctcggccagatccagaggattctgctgggaagtgtgactaactacgtgctgtcgaatgcgtcttgccctgtgaccgtcgtcaaggcaaagtagtcgctactcttacagcaatgcaaacctgcatcctggacagaaacaatccaatgtatattgcgtgttgtaccctaacttgtcacctaatagtactgcagtgctgtttcatttgcagctgtattggagtatgtccgtatagttgaataatcctggatgtctttgtttgctgttgtacctggaagctggaagcctggaatcgtaatacatgttgttagttctgaac

SEQ ID NO: 10812 - DNA, 744 bp, Oryza sativa
  ref <308>: DATABASE ACCESSION NUMBER: AK108160
  ref <309>: DATABASE ENTRY DATE: 2002-08-28
tgcagaatcccgtgaaccatcgagtctttgaacgcaagttgcgcccgaggccatccggccgagggcacgcctgcctgggcgtcacgcacggtaggatatgcaccgagatcaatttgaccaccacctattcttaacaaatcaccgtatgaactggaggagaaaggaggtcaggacgctgtcggggcgacaaacatcgacggcgatggtgcttatcgcccacgcccatacctcgtgccacagggcattggccggcacggcggggcaacggggaggaggagaagaggctgttgtcggcggctcgacgcagggaccatcagtggcgcgtcggcgcgggtgcgacgtcgacgtgaggctattggcgcagcggagacatgctgcgaggaggtggctttgtcttcgcactgcacaccatcgctgcccgccggagacgtgcgcggcattagccggagacgggtgccttgtcaccctcgctccgcaggaatcgccgccgccatcgtcgcttttcgtgtgagacaggaaggggattgggggaaatggctctagggttagggattacggcagtttttttgtccatgtctcgagcgatgctggccgatcgatagcatttgacggctctcaattcatggacgccaactcgggccagaacctggcacatgggccttcaggcaattaatcaggccacggcttgtgagtcaaaagaaactgaaatatgcatgtgggccttcgcgctcatgtttgttggct

SEQ ID NO: 10813 - DNA, 1164 bp, Oryza sativa
  ref <308>: DATABASE ACCESSION NUMBER: AK108161
  ref <309>: DATABASE ENTRY DATE: 2002-08-28
atccacccgaccacacgccgacgccgacgccgacgaccatggccgccgccacctccaccgccgcctactggctcgccgagcacccggcaatcgtgtccttcaggtggagccccacggggctgtggttctccacctgggccttcctcctcggcttcctcgcctcctacgtcgcgctctgcctcgccctcgacgccatcctcgccgcccttttgcgccgccggaggccgctcccgctggggcccttgcccgcggcccacgcgctcctgatggccgccgtctccgccgccatcttcgccggcacgctgctctccgcgctcgccgagatacgcgacacgcggtggtcgtggcgcggacggagccgcaccaccccgttccgctggctcctctgcttcccgccggggacgcgctcctccggccgcgtcttcttctggtcctacgcatactacctctcccgctacctccacgccgcgcgggggctcttcgccgtgctgcaacgccgtcgcggcgccgcggcgagggtgttcgcgcacgcggcatccgtcgccatggccttcctctggctcgagttctcgcagtcgttccaggtgctcgccatcctcgcctccacgctcgcccacgccgtcgccttcgggttccgcttctgggtcggcgccggcctccccgccgcccgtggcgcccccgtcgcgctcgcctgccagtgcgcgctcctcgggtgcaacctcctctgccacgtcggcgtcgtgtggatgcacttcggcggcgtcgccggcggcgggtgcagcggcatcggcgcctgggtcttcaacaccctcctcaacgccgcgctcctctgggtcttcttgcattgctacggcaagcgcggcgtctgcgacgacgacggcggcgccaccgccgccagcgcgcgccacgacaaggacctatgaggtgaaccaccacccaccatgcatccttgtaacatgttcctcactactctactacttagattgtaaataggtgtggcgtccaaacggggatcgaagagattaacatgacacaaaaaaaaaatcaacaaacaaagatgggattggtgtaggagcaattcgatgatccaatccctgcttacttctacttcttagtgctatgttgttattgtgttgttcatgtcagtaaaagaagaaattttgc

SEQ ID NO: 10814 - DNA, 921 bp, Oryza sativa
  ref <308>: DATABASE ACCESSION NUMBER: AK108162
  ref <309>: DATABASE ENTRY DATE: 2002-08-28
acctttcccctttcccggtgcttctctctcccattttccccttttactggtgttgagccgaagcggagaggaggcggcgtcgtcaggctcgtccttgcttcaagcggtggtgacgacggcgccacggatctggagcggcggcggcggcggcggcggcggcgcggatctggagtggagcggcgtgggaggacgacgccaccgccgctcgagatccgcaaccggggcgatggccggcggtgttgtcgacgggttgacgatggcgtcgtcacgggctgacgggagggaggcgcggtcgtcagcggcggcggtgacgtggtcgtggcgtgccccggtggcgactccaccagctgcacgagctcccccggtcggtgcccctcctctccattcatggcggcacccgattactctcccctcaaccctcagtggcaccggcgccaacaccgtctcgcgcgcggagaagcctagaaggccggcggtcgaggagctcccccggcgacgcggcgatgagcatcgagcggagcagcgggcgggccttctcgacacggagcagcgacagcgtcctctggcatcttcagcaagcgccgagcggagcagcaaggggccatctcgacgcagagcggtggcggtccggaactccttcgttccgagcggtgacggtgacggccgcatcagcgccgccggattttctcaggtgggggacttggatgaggcttcaccagcttgggagaacaacggcggccacactagtcggcgctacaacatctcccaactcttctcctcaccgagtcctcaccaagtgggtcctgtgccagagttttttgcgcgaggtgttcgttcctttggctgtgtttagattcaaagtttgtatctaaactttaaacttcagtcctttttcatcatattaacttgtcatatacccat

SEQ ID NO: 10815 - DNA, 1986 bp, Oryza sativa
  ref <308>: DATABASE ACCESSION NUMBER: AK108163
  ref <309>: DATABASE ENTRY DATE: 2002-08-28
ctgtccccttactccggccgattcacatggcgcccaccgccgcggttgccgggggtggcgtggaggcggaggcgctgctggggctgctgcagcgggtgcagtcggaggcgctgcgggcgttcgggccgaacgacttcgaccccaagctctacgtcgacctgccgctcgccgccgacgccagcgcggcggccgcgctggcgtcgctgccgcgggcggcgccgtcgaggggcgagatggaggcctacatctcgaggtacttcgcgctggccgggtccgacctcgtcgccgccgccgacccgccggacttcgagcgcgacccccccgggttcctgcccagggtggagcgcgccgaggcgcgggcctgggcgctggaggtgcacgcgctgtggaaggacctgacgcggcgggtggcgccggccgtcgcggcgcgccccgaccggcacacgctgctgccgctccccggcagggtggtcgtgccgggctccaggttccgggaggtctactactgggactcctactgggtcgtcagaggtttactggtgagcaaaatgtatgagacggcaaaggatatcgtgcttaatcttgtgtatcttgttgagaaatatggttttgttctgaacggggcaagatcgtactacactaaccgaagccagccaccacttttaagctccatggttttagacatatacatggcaactggtgatatggcttttgtgaggagggtatttccctcactgctgaaagagcatagtttctggatgtcagaggttcacaatgtggcagtaatggacaatcatggacgggtacataatttgagtcgctaccaggctatgtggaacaaacctaggccagaaagtgcaacaattgatgaggaatttgcttcaaaactttctacggctgctaaagaaaaattctaccaccaagttgcttctacagctgaaacaggatgggattttagctctcgatggatgagggattctactgacatgacaactctgacaacatcttgcataatacctgtggacttgaacacattcatattgaagatggaacaggacatagctttctttgctaaactcattggagagagcacaacatcagaaatattttcagaggcttcaaaagcacgccataatgcaattgattctgttctgtggaacgctgacatggagcaatggcttgactactggcttcctactgatggaaactgccagggagtctaccaatggaaatctatctcacagaaccgcgccatctttgcttctaattttgtacctttgtggttaaatgctcaacattcaggcttggagcaatttgtcgatgaggcaaaatcagtgagagtcatgagaagcctccagaaatcaggattactgcaacctgcaggaatcgcaacttccttatcaaacacagggcaacaatgggattttccaaacggatgggccccgttgcagcatctgatagtcgagggattgttgaggtctggttcaggagaggcaagggaacttgctgaggacattgccacgaggtgggtgagaacaaactatgatgcctataaggctaccggcgcgatgcatgagaagtacgatgtggtgacctgtggaaaatctggaggtgggggtgaatacaaaccccagactggttttggttggtccaacggtgtgatattatcattcttggatgaatttggatggcctcaggacaagaagatagactgctagtcatcatgatgaatgttaaaccccatcttcgcagatgcagaatgtggctaggctaggcaggtgtttttgtgtgcaactgtatatacacggctgtgcattacacgcaaagttgaagaggcattctgcaattctgctgtagtttttatctgacaaacatttgcattcagatttcagagcatcacccgcaactgtgtttttttttctttttttgtaacttgccctttgctgtaactcgtatcaaagctcaaagcaagaagaatcttcatgt

SEQ ID NO: 10816 - DNA, 1082 bp, Oryza sativa
  ref <308>: DATABASE ACCESSION NUMBER: AK108164
  ref <309>: DATABASE ENTRY DATE: 2002-08-28
ggtcaggcgggactacccgctgagtttaagcatataaataagcggaggagaagaaacttacgaggattcccctagtaacggcgagcgaaccgggagatgcccagcttgagaatcgggcggccgcgccgtccgaattgtagtctggagaggcgtcaaaaaaatctttttcgcacaccgcctttgccttcaccgccgcctcgcctcgcctccctcgcacgcgccgccgccgcccgccggcggcgggaacgacctcctccgctctcctcgttcccgaacccccccagccgtctcagtctctccgatccgagagggactaggagggaggagcgagatgaggcttctacgggtggccacgtgcaacctgaaccagtgggcgatggacttcgacaccaacctccgcaacgtcaaggagtccatcgcccgcgccaaggccgccggcgccgccgtccgcgtcggccccgagctcgagctcaccggctacggctgcgaggaccacttcctcgagcaggacaccgccgcccacgcatgggagtgcttgaaggacattttgtctggcggctatacggatggcatcttgtgcagcataggaatgccggttattttcaagagtgtacggtacaactgccaggtgttctgcttaaacagcaagatagtcatgattaggccaaagatatctcttgcaaatgatggaaactatcgggaatttcgatggttttctgcttggacattcaaagatgcacttgttgactttcaactccctcttgatatctcggaggttacgtcccaggatactgtgccttttggttatggttttattcaatttcttgatgtatcattggcttctgaaacctgtgaagagctcttcactgcaaatgcccctcgcattgacctagcgttgaatggtgttgaggtttttgtgaatgcaagtggaagccatcatcagttaaggaagctcagtcttaggattgatttgatgagaaatgcaacccttgcatgtggtggtgtttacatgtatgctaatcaacagggttgtgatggtggacgcctttattatggtatatcaaaatgccatttttttgtgc

SEQ ID NO: 10817 - DNA, 953 bp, Oryza sativa
  ref <308>: DATABASE ACCESSION NUMBER: AK108165
  ref <309>: DATABASE ENTRY DATE: 2002-08-28
tccaagaagcagagagcgaagcaagctcgaatcgatttccaacccagaggatttgattagctttgacgcagaccaagatcatctgatcaatggcgtccatgcagaagagccgcgaggagcgcgcggaggcggcggcgcacagggcggccgacgagctccacgccgccaggcgggacgagcctggcggcggcggaggcggcatgctgggcaccgtgcaggagagcgcgcggtccctcctcggcgccgtccgcgacaagatccccgggcccggcagcggcggcgctggcgcaggcgcagccgccggggaggggaaggccgccgaggcgaagggcttcgcggcggacaaggcggagggcgcgcggcgcgcgctcgcgggatccgcggcggcgaggaagggcgagacggacgagtccgcgtggcagcacggggaggacgtgcggcggcgcgccgcggagaaggccgaggaggcgcggcggcggagcgagcctcagccgtcgtcggaggagaaggggaggtcggcgacggagaacatctacgggtcggcggcgagcgcggcggaggcgttcaggcagaagatgacgatgccggaggacgtggtggagcagaagcgcgccgaggctgccgccggcgggaacaagggaacagccgccgcgacggcgacggcgacgaacaccggcggggaggcggcggcggaggaggtgatgatgcgggtgaaggcggcggaccagatgacggggcaggcgttcaacgacgtgggcaagatgggggaggagggcaccggcatggcggccggagatggtgggcgccgccgctgagatcgccggagccgaccgcgcggcgccacgccacggtgtttttgctcgtcgcgttttgtactaatctcagtataatctgtaatgtaaatatgtaatgcggcagttaaaagtaataaaatatcccctaatcacttgtcc

SEQ ID NO: 10818 - DNA, 1238 bp, Oryza sativa
  ref <308>: DATABASE ACCESSION NUMBER: AK108166
  ref <309>: DATABASE ENTRY DATE: 2002-08-28
ctaccagagcgaaactgcaaggcggcaatggaggccggagatggaagaggaggaggagcggaggaggaggaggaggagcaggtgatgagcgaggtgcacctgggatgcccgccccgcttctccgggctctacgtctcccgcttcagcttctcctcccgcccgctagggccatctgcgggcagcgacggcggagaatgtagcggtgtgcgcgagcaggtcgcggcgtcgagcagttcttgtggttcgcctgacgctgttaccgtggatgaggacggggatctcgttcttgacaggagaagaaggaacagaggcaggagtgatcatgtgctcactgttcagcatggtatcacctcctctcttaggagcgttggtctccaggtttggaaggcggcattgctattaactgattttgtattgcataagagctttacatcgtctgagtttaatggtgttactgccatagagatcggtgctgggacaggtttggtagggttggcactagctcgagttgctaagaaaatcttcattacagataggggctctgatatcctcgataactgcttggctaatgtccaacttaactcaagcatgctaaagtttgatgaagctaaagcctgtgtgcgggaactggattggaaaatgtcatggcctccacctgtgtttaaatgtgattcatctgatccaagttcaaaatacttatggtatacaagtgaaatcgaggcggctgagaaagctacaacactatttgctgcggatgttatttacagtgacgatctgactgatctgtttttcagcatagcaaagaaactgatgtctcatggtgctgagaaggtattgtacttgaccctggagaagagatataacttcagtatggacgaactagatgttgtagccaatggttacaagcacttccgaagtttcttcacggttcaggatgaaagcggagctctggatgataactcatgtagaccagattttgttggagagcagatggaccttgcagaggttcctcagtacatcagagaatatgacaggggcaaagatttggagatgtggaagataatgtacaacccaaatccagaatagcaatgtcttttacagaaattacccgctttttaatgtaccactacaatgcatttttgcatgtttgtataactgtgggtgtgtttagttctttgggtgtaaagtttttgaagtatacggatatacatttgaagtattaaacgtagactaataac

SEQ ID NO: 10819 - DNA, 964 bp, Oryza sativa
  ref <308>: DATABASE ACCESSION NUMBER: AK108167
  ref <309>: DATABASE ENTRY DATE: 2002-08-28
tagggccggcgtgcaatacatacgtggtagtagtagtaacaatgggcagcgagctgccggccgcggcgccgccgcagccgaagcgatccaccgcggcggcggcggtcgcgcgcagacggatagggcgcgagctgtggcagttctggctcgatccgccgccgtactgccggcccgggccatcccccgtgaaggaccacttccactgggaggtggtcatcgatggccccgccgccaccccctacgccggcggcgtgttccccgtcgacgtctggttcccctacgattaccccttccgtccccccaagctcttcttcaagaccaaggtgtaccatccgaacattgacgggaaggggaggatggcgctggacatcttccaggacaactggtcaccggccttgacgatcaacaaactcctcttgtgcttcgtctccgtcctcttcgaccccctgctcgaccgcccgaccaaccgctgcatcgccaagcagtacaagcacgagtacgaggcgtacgaggagaaggccagggcttggacgcagaagcactcctcgacgccgatcgtctcgcactacccaccgtacgctgtcatcggcagcacgccgccggctgttccttacttcccagcgactgcagccaggagaaaggctgctgcatcttcagcttcaggttcagtaagcagcagccgcattccgttgcttatgaaggatgagagtatctggagaaggacaatgaagttttttcagggttagtcttcttaattatcgtctacgtactgcacagacactgaaaacagataagggaaattagagttctttcttcctcacagatgaaatatgttatatctagaattttattttactgtattgtgaattgttgagaggtatgcatacttgtatcaaatcttcaggttatgatctgtcaccacacggtaatgacatggagctgctgactatgaggagtgataaac

SEQ ID NO: 10820 - DNA, 878 bp, Oryza sativa
  ref <308>: DATABASE ACCESSION NUMBER: AK108168
  ref <309>: DATABASE ENTRY DATE: 2002-08-28
ctcagcccttacaaccagcactggcctcttgtgtctaacgtttccaacaacggttacgctggcttgaacatcattcctcgctggcccactacgatctactggaactgcgatcttcccgcttgcaccctcaaggagtggcaggacaccgcttccggtaagggagacttccaggaccttcttaccttcgagcgcaactccgcctcccgctacctccttggtcttcgccacgatggctacatgttccaccaggccaacctgcgccaaaccgacgtggacactatcaccgtcggctcccagaccggcaagctctccctcatccaggcatggaccgagaccgtcatgcaggagatgactcgcctgaccaactggcccctcgtgtcccagaagcacgacgacctcgctcaggtcttcatcgaccgcatggctcgtgacaactgcaaccccaagctttcttacacctactctaccgacggcaagaccatcaccgccgtcactgtcaccaccaccggcaacaggtgcggcacctccatccccgtcacattccctggcaacgcccctaccgtttctggctccgccaggaccgacaaggtcggctccgagcccgtcatcatgtgggccaccctttccggctctgccgtcaagttcaccctgcctactccggtcaaggtgtaaaaaaagttccttttgtgtgtggtctgctacttagaagttgccgatagttttgtttcttttggggataattttgggtggctgagaaaatcatactagcattctttttctttctttggagtggttggctgggagctgcatacgtgcgcgtgagtgccacggaaagggagaaactgtactactcaaatgtcagctttgcatatcggctg

SEQ ID NO: 10821 - DNA, 1017 bp, Oryza sativa
  ref <308>: DATABASE ACCESSION NUMBER: AK108169
  ref <309>: DATABASE ENTRY DATE: 2002-08-28
acctcacaacaacgtcgccatgggtcgtgtcattcgcaaccagagaaagggtcgcggctcgatcttcacggccaacacccgcctgaacaaggcccctgcccagttccgcacctacgacttctcggagcgtaatggctacattcggggtgtcgtaaaggagattgttcacgactccggtcgtggcgctcctctcgccagggtcaccttccgcaacccctacaagttcaagcacaacaccgagaccttcatcgccaacgagggcatgtacactggccagttcatctacgccggaaagaacgctgctctcaccatcggcaacgtcttgcccctcgcctccgtccctgagggtaccgtcctcaccaacgtcgaggacaagtccggtgaccgtggtgcgctcggccgtacctctggtaactacgttaccgtcatcggccacaaccccgacgagggcaagacccgtgtcaagctcccatccggtgccaagaaggtccttcccagctcatgccgtggtatggttggtatcgtcgctggaggtggccgcacagacaagcctctcatgaaggcgtcgcgcgccaagcacaagttcgctgccaagcgcaacagctggcccaggactcgtggtgttgccatgaaccccgtcgaccatccccacggtggtggtaaccaccagcatatcggtaaagcctcgaccatctcgcgatacgccgtccagggtcaaaaggccggtctcattgccgcgaggaggacaggtctgctccgtggtacccagaagaccaaggactaaagtggtgcatgatacggtggcgtcaaaatgggtcaatgacaacgatgcaaacggttattctctccatactacctactctctgtgcgggtggccgggcgttataacaacacttctcggcaggctgtgctttacatggcttgcgtgcatgataggttcttagggaatgtgattccgaaaaatgcatctgggctgtacttttggcaatgtgaaatgataccattacgaaccgccgc

SEQ ID NO: 10822 - DNA, 894 bp, Oryza sativa
  ref <308>: DATABASE ACCESSION NUMBER: AK108170
  ref <309>: DATABASE ENTRY DATE: 2002-08-28
gacaactcactgccccccgtcttctttcttcattcctcttcccaccaagaaccccaaaccttacctccattgagttcgaaaccgaggagcgaggagctacaagccgagttgtcagaatggatgaggagaaggaagccgactcgccgcagccaccgtccaagctgcctcgcctctccggcgctgacccgaatgccggagtggtgaccatggcagcacccccgccgccggtgggtcttgggctggggcttggactcggcggcgacagccgcggcgagcgtgacgtggaagcgtcggcggcggcggcgcacaaggcgacggcgctgacgttcatgcagcagcaggagctggagcaccaggtgctcatctaccgctacttcgccgcgggcgcgcccgtgccggtgcacctcgtgctccccatctggaagagcgtcgcgtcctcctccttcggcccgcaccgcttcccttccctggcagtgatggggttggggaacctgtgcttcgactaccggagcagcatggagccggacccagggcggtgcaggcgcacggacggcaagaagtggcggtgctcgcgcgacgtggtgccggggcacaagtactgcgagcggcacgtccaccgcggacgcggccgttcaagaaagcctgtggaagcctccgcggccgccaccccggcgaacaacggcggcggcggtggcatcgtcttctcccccaccagcgtcctcctcgcccacggcaccgcgcgcgccacctgaccagtgaccagaccggcgcctgtttgtttgtttgtctcggcgcatgggaaaacccaaatccgcagggattatgtcatgtcctgtaactctttttttcctcgcaacttttgaagccaaaacaattctcaccgtgttcgatggc

SEQ ID NO: 10823 - DNA, 901 bp, Oryza sativa
  ref <308>: DATABASE ACCESSION NUMBER: AK108171
  ref <309>: DATABASE ENTRY DATE: 2002-08-28
aactgtttgtcatggacccgccgccggtgccaagcccattccgccgccgccgcctcggcgacgccggcgatgagccatcgccggtgtccatcctccccgacgacgtactggccgagatcctccacatcctcccgcctgacccctcctccctcccctgcctctccctggtctgcaagcgctggcgccgcctcgtctccgacccggccttccaccgccgcttccactcccacgcccgccgccgccgagctcccctcctcggcttcttccacaactccttcaacgtcccctgcttcgtccccaccgggcgagcccccgaccgcgtccccgccgaggccttctccctccgccgccaccccggccgctggctcttcctcggctgccgcggcgggcgcgcgctcctcgcctcgccgttctcggtgtgccgcctcctcatggtctgggacccactctccggcgagccttgctccgcggcgccgccttgctctgcgacgctggcgagtgccaccgccccaccccattccgcgtggtcttcgccttcatcgaccagcgccgccgcccctgcgcctgcgtctactcctcgctttccggcgaatggggcgaggtggtctgtgggaggacggtgatcccccacgatttggatttgggattagggcttagacatcttgatgaatccatctcgggggaaaagatttctgccattgacatgaagcctcctgttcttgttgggaatgttctctactggctgctcgtggagaactgcatccttgagttcaacatggatgccaagagcttggctgtgaatgtggtttctggcccagatcttatgtattttccggctccgaattggagtctgcagattatgctggctgagggtggtagcaagcttggcttcggcgcagtg

SEQ ID NO: 10824 - DNA, 1668 bp, Oryza sativa
  ref <308>: DATABASE ACCESSION NUMBER: AK108172
  ref <309>: DATABASE ENTRY DATE: 2002-08-28
ggcttcagttcagattgtactagcaaatctcccccaagtggggaaaaaaaaatttgggacaagaaagcgagaggagaggagagcaaccatggtgtcacaggtcgcgtcgccgcggcctcgtcgcgtccgccgcgccggcggagggggcagcgactgggcgtcgctcccggcggatctcatgtcctccgtgctcaggcgcctcgccggtgaccgcgagcgcgcccggttcggcgccgtgtgcaaggggtggggggccgccgccgccaggctgccgtcgcggccatggctcgtcgggtcccgcgccgacgactggaccggcctgagcggcgccaccatgtcgtcgttctggctctccctcgggcagcgcggcctcgtgccgttcgccgtcgacgtgcccgccggatctgagtacctgtcctcctcccgtggctacctcgcgctctccaaccccacgggtaaccctagggtgatcaccctcttcaaccccgtcaccggccgccggatcccgctgccgccgatcgggttcttcaagaagtggcacgacgtggccaccattgtgctgtcggctgacccggacacggcggaggcgtggtccgcggtggccgtcggcttcccggcgaactgcctcgcgtactacagctccgccaccaacgactggaagcccatcaggttcaactactcctccggctacgccggcgtcgagcacttcagggggcggttctacgtggcattcaagtcggagatcagcgtgctcgaggttgacgtcgccacccccgccgccattaagatcgagatagcccacgacgacgacgacgaagacgcggacgtcttcgacatcgacctcaacctcgaccacgagacctcgaacagcgacgacgacgacgacgacgacgacgactgcgccgacaccctcgccgggttgggcgacgaggattacccgctcaagtgcctcgtcgagacccacctggtggactgcggcggcgagctgctggtcgtgtcgatgcacgacgaggtggcgtacaagaagccgagcccggaatccgccgtcggccgcaagccccgcagccacgacgacgagcggtgggtggacgtgcacagggtggagtggctggagagcggcgcggcgcggctggtgcgcatggaggacctcggcggctacgccctgttcgtggggcggaaccacgccttctcgctctcgccggaggagttcccagcgtgccagcccaactgcatctacagcgtcgagcagcagggccaccccgacgggctcgtcagggtggtgaacttcaacgacgacacgaccgagtgggcttgccccgacgaggacatcttccccgacgacgacatgcgaggctcgccgacggcaggctgggctcgccgtggctgggtcttccccaaatactcctaaggtcggtaagctcaatctggatgccattatgatccaagaggatgctttgcttaattagttgcttcatggctccagtataccataccaaaatcgttccgaacttttgagtttaactacattgcaaacattgcattgtaatttaagttgccaaacatcgatctgtggctgggtttagttcgatcgcaagcattgtgtatgtggccaaacatttggctgggtttaatttagtttcaactttcaagtactgtgaatgagtcgcc

SEQ ID NO: 10825 - DNA, 1364 bp, Oryza sativa
  ref <308>: DATABASE ACCESSION NUMBER: AK108173
  ref <309>: DATABASE ENTRY DATE: 2002-08-28
atcattctcattcagttcaccttcgtcagcgacattcactcgtttccaactttcgttcatccattcacttcttcgttgatcgaagaattccattctatcaagtctctttcaacaccatccaaccaaaaacaacgccccctctcttcaagatgaagactgctgcttccatcctggcgctggccgtcgccgttcgtgcccactacaccttcgacaagcttcaagtcaacggcgagaccgtcggccaatcctggcagtacatccgcgagcacactcgcggctacatgcccaccaagggccagcagatcctcgagaacgacttccgttgccagcccggcggagacagcggtgccaacactgatgtctacaccgtcggcactggcgacaaggtcatgttcctcggcgcctttggcatgacctccatcgagcaccctggccccgcccaggtctacatgtccgcctcctccgacgtcaaagccgacgacggctccggcgactggttcaaggtccgcgacgccctcttctgctccagccctgagaacgacggcgccctgaagaacgcctggtgcacttggggccagcccggcatcgagttcactgtccccgacactatccccgacggcgagtaccttgtccgcgtcgagcacatccccctgcacggcgcccagggcacgtccaccggcgcggagtactactactcctgcgcgcagctgaaggtcgagggctccaccgtcgacgccatgcccgcgttcgacaccatcaagatccccggcggcgtgcagcccgacgacgaggccgtcaagttcaacatctggactcaggtcaaggagtacccctacaccgtcggcccggagcttgtccccggcggcactacctggggctccgccgatggttccagcaaggaggttgtcgtcaagggcggttctgctcctgctgctgcttccggctcttcctcttcctccgctggctcctcttcctcttcttccgccgagaacaccaccaccatcgcccagccgaccaactccgagaacaccctcaccgtcgagccggtcgattctagcgccaaccagggcggcgccgctggttcgggcaaggactgcgacgtgcagtacgtcgagcgcagcgttcgccgctctttcagcgcctagatcgattctccctcgcacgaacaagccattagcctggactgctggaagaagaagaagaagaagaagagaccatgacgcgaagtggtgttgggagagagttgtttccgagaagggcatttgacgtatctaccttacccttcgagtgtactttaccatacgtatagcttcgcacacgcatttcgcgcacgcaaaagaaagaaatcgaacgattctatcatc

SEQ ID NO: 10826 - DNA, 775 bp, Oryza sativa
  ref <308>: DATABASE ACCESSION NUMBER: AK108174
  ref <309>: DATABASE ENTRY DATE: 2002-08-28
gaaaatagaaatccgcgccgctccacctttctcactctctccctccgtgccgtcctccacctctgttcctccctccctccacgctgctccggcactctctccatctgcgccgccgtttgcctctcctccctctccgagccgcgccgcgcacaccaccgtcgcgtactgccacgacccttcctctccctctccttcagttctcggtgagtcggcgatggtgatggcgacgggaggtgggcggcagcggatctgacggcggggtcacagggttgcgtggatccagcggccccaggccccacgatggcgacgtggtcacgggtgggagactgggagagcttcagcgcggggcatagggcgtggatcgacgacagcgtgcccctccctcctggatctggtgtcggcgggtctgggcggtggatccgatggggccttcagcaacaaagcaacggggtcgcaggccaccgctagaagatctccggaggtcattgggtccggccgtgggagcgccgtggtgactctgccctcactcccctcctctcagatccggcgacgacgacccagccttcccctgccctccctctctcagatctgatgccgacgaaactgcatttccgttccctctcggcgacgagttgttgctcatgttgttgttcatcatgctatattgtgacatgttgttcttggattgtgacattgtatttgtcctcatgttgttcttggatttgtattgtgacaagttgttcaataacgacagattggaacacattaggattgt

SEQ ID NO: 10827 - DNA, 1264 bp, Oryza sativa
  ref <308>: DATABASE ACCESSION NUMBER: AK108175
  ref <309>: DATABASE ENTRY DATE: 2002-08-28
gtgcaaacacacgctgatcgatcacctcgccggtgaggagaggagagaagaaagcgaaggagctagagagcatggagggcgcggcggcggcggcggcggtcattaggcaccggacggtggaggcgaacggcatctcgatccacgtcgcggaggccggcggcgagggcggcgatggcgcggcggtgctgttcctgcacggattcccggagctctggtactcgtggcggcaccagatggagcacctcgccggccggggattccgctgcctcgcccccgacctccgcgggtacggcgacaccgacgcgccgcccgagatcgagtcctactccgccttccacgtcgtcggcgacctcgtcgcgctcctcgacgccctcggcctcgccaaggtgttcgtggtggggcacgactggggcgcgataatcgcgtggtacatgtgcctgttccggccggatcgcgtgacggcgctcgtcaacaccagcgtcgccttcatgcgccacgtcttcatccgctccggcgccgacgccatcaagaccaccgatcacttccacaaggcctacggccccacctactacatctgccgcttccaggagcctggcgttgcggaggaggagttcgcgccggcgcacgcgaggcacatcataaggcggacactgtgcaaccgcttcaccgtccacaaggccggcaagccggagagcgaggagtcgccgccgccgccgccgctgccgctgccggcctggctaacggaggaggacatcgactacttcgccgccgcgttcgagaggacgggcttcaccggcggcatcaactactaccgcaacatggacaggaactgggagatggcggcgccatgggcggacgccaaggtgcaggtgccgaccaagttcatcgtcggggacggcgacctgacgtaccactacgccggcatccaggactacctgcacaagggcgggctcaaggccgaggtgccgctgctcgaggacgtcgtcgtcatccccggcgccggccacttcatccagcaggagagggctgaggaggtcagcgaccttatctacaacttcatcaccaagttcataccccaacccaactgaagcgctcaactcaactcaactgtcagatgcaattcatcgccgtaaaaaaaaaacaaaaaaaaaaactcttcaaacaagcgtgtgtgccaatcagtgtcaacgtatatgtgaccaaatgttgttgtaatttggaccgtattcctatgaaatttcaatgtttgggaagaaaatttcat

SEQ ID NO: 10828 - DNA, 1000 bp, Oryza sativa
  ref <308>: DATABASE ACCESSION NUMBER: AK108176
  ref <309>: DATABASE ENTRY DATE: 2002-08-28
tcaactctaccggcgccgaggaggacgaaggtgtggcgacgacgcagcacgaatttgcgtacgaggcgtcgctgcgcgagctcgccagggtccgaccgtacgccagcgtcgctgtccgaaagatggccgcggcgcccagcgtcaagtcggcactcagctggacgtggctgcgtgacagccgcgacagtgtggtgttgccatcacgtggtagtaggatgcgtacgctgctcgagtacgccggcctcggtggcgatgccaaacacgtcaaggcggaattcgaagcgtcgaccggtcgacatttctctccccttgcatggctcttcccgtcaatggcgtcgtcggcagaggtgccaacatcgctcatggggtcagcggcagtgggcaaggaggagggagaggtagtaggcgaggtggcacaggggctgcattcgatctttacgacactcacgctgcgcacgggtgtggtgcacgccctcggcagctcggcatcacatctatcggatcgattccagctcggaggtcctacatcggtgcgcatgttccgacactcgttgctggggcccaagaatggtcaggactcgctgggaggcgatgcgtcctggtcgctcgggctgtcgatgttctcgcccatccccaacaagccgcactggccactcatgctgcatgcgttcgccaatgcgggccagcttgcacagctgcccaccgacgcagtgtcgagcagggtgggagcgtggaaagagcttgcacagccctcgacggcggccggtgtcgggctcgtgtatactcagggccagctaagggtcgaactcaatgccggcgtcccgctcacagcgcgcaggggagacggcatggcaaagggtctccagctcggtatcgggatcgactttctttgatcgtcttgacccgactcgctttgtcttaatacacggtggccattggcatgccacccacgtgcaattccagctgttcaggcaatgcgaaaaaaaaaaaaaaaaaaaag

SEQ ID NO: 10829 - DNA, 693 bp, Oryza sativa
  ref <308>: DATABASE ACCESSION NUMBER: AK108177
  ref <309>: DATABASE ENTRY DATE: 2002-08-28
gtacgccacaagcaagcgcacgcatctcatctcatcacatctcatcgttgggcgcatatggcgaattgtgtgtgtgtggtgggggagaggatgggagaaaaacctgagggagcttgacggtggtggaggcggcgacgatggcgtagccgagcagcttggaggcgagcgggagcaggcagtccttctccgggatcttggcgtccgcgagcgccgcgaggacgcacccgaagttgatccccaggatctccagctccatcgtccccgccgctgccaccatggcacacgcgtctcgccggcggcgaactagctagctccggccccgccccgattccctcgacgtcgccgcggcggagggaggagatggcgtgtggtgtggtggggagatgcgtccgtgacgtcagctgcctgtggctgggaggaggaggaaggaaagcccagatgcgtgacgtgttgggccgaacccaccaacgcgcggttgcgtgggcctcgtgttgtcatgtaggctttgggctgtgtggcctttgggcctctttgggcacaagagagggattagggaaagggagagtaagtttaaaccgagaaattgcgtgaggaacataaatttggaaagatgttttttttttcttttttgggtgtggaatggagaacgttgcgccatgtttttgaactcaaagtttgttccgatttgtgttc

SEQ ID NO: 10830 - DNA, 968 bp, Oryza sativa
  ref <308>: DATABASE ACCESSION NUMBER: AK108178
  ref <309>: DATABASE ENTRY DATE: 2002-08-28
gctagcgagtgacgagatcacagggcatgatgagtcctggcgtttcggccaagaagcgccacgccggcgcggggttcacgctcggctgcggctgcaaggacgcgaagagcgtgtccgtctcggcatcggcggcggggacgccgtcgacaacggcgacgcggcgcaggagcgccgggacgaacccgtcggggtcgacgacgacggacactcttaccatgacgtccgcgtcgtcgtccttcctctgggagcactccgtggtggagttcgaccacgacggcggcggcggctgcgggccggagagcttctccggccttctgcgcgagctcagcgagctggagcagagcgtcgcgtcgtggggccggaagagccaccaccagcaccacgacaagaaacactcgccggcgccgtcgtcgccgctgccgccacaggaggacaggaaggagaagaacggcggcaacggcgatgccacggacaaaccaggagactgccgcgacggcggcggcggcggcgacggcgtcggtgtggctctcgacggcagcgtggcggtggtgaagcagtccgacgacccgctgggcgacttccggcagtcgatgctgcagatgatcgtggagaacgggatcgtcgccggcgaggacctccgcgagatgctccgccgcttcctcaccctcaacgcgccgcaccaccacgacgtcatcctccgcgccttcgccgagatctgggacggcgtgttcgcggctactgcctccctcgtccaccaccaccacccgcccccctcctcacgccgcgagccggtggctccggcggcaaggccgcccgcgccgaggacgcctccgcgccaccgccacccttcaccacgggcatggcgcgtgtaatcgtaacgcgtacgtgcaacgctcgcacgcgcgctgtgtaatcacccgcgatgtgggttactccggggcaatacacaagtactgctactcgatatc

SEQ ID NO: 10831 - DNA, 1100 bp, Oryza sativa
  ref <308>: DATABASE ACCESSION NUMBER: AK108179
  ref <309>: DATABASE ENTRY DATE: 2002-08-28
acctacctaccacctctctttcgtagtacagtcaaaatgggtaccgtcgctgaccccgccaagaccaagaagaccatgagtggcttcgccaccgacttcctcatgggtggtgtttccgccgccgtctccaagacggctgctgcccccattgagcgaatcaagctcctcatccagaaccaggacgagatgatcaagcagggccgtcttgccgccccctacaagggcattggcgactgcttcgtccgcacctaccagcaggagggcatggtttcgctctggcgtggtaacaccgctaacgtcatccgttacttccccacccaggcgctcaacttcgccttcaaggacttcttcaagtcgctcttcgccgtccccaagaccgctccctactggaagtcgctcacggccaaccttgcctccggtggtgccgccggtgcctcgtcgctcctcttcgtctactcgctcgactacgcccgtacccgtcttgccaacgacgccaagtcggctgccaagggcggaggagaccgccagttcaacggcctcgtcgacgtctaccgcaagaccattgcctcggacggtgtcgccggtctctaccgtggcttcgtcccctcggtcgtcggtatcgtcgtctaccgcggtctctacttcggcatgtacgactcgctcaagcccgtcctgctcaccggcaacctctcgaacaacttcctcgcctcgttcctcctcggctggggtgttaccaccggtgctggtcttgcttcctaccctctcgacaccatccgtcgtcgcatgatgatgacctcgggtggcaaggttcactacaagaacatgttcgatgccggtcgctccatcgtcgccgccgagggtgtctcgtcgctcttcaagggtgccggtgccaacattctccgtggtatcgccggtgccggtgtgctctccggttacgacaagctccaggaggtcatgttcggcaaggtctacaagggcggctccggttaaacggtcccctgcgtactcttcgctcctcctccccctcccttctgtgcagtcggcccggcccattccccgatgccggtcttcatggaatgaaaactcagcttctagatctg

SEQ ID NO: 10832 - DNA, 933 bp, Oryza sativa
  ref <308>: DATABASE ACCESSION NUMBER: AK108180
  ref <309>: DATABASE ENTRY DATE: 2002-08-28
aatctgctctgctctgacacaaaccaattcgatcaattctgctctctcttcagatcgaacgctagcttgctcgatctgttgcaaaattgtacggcgccatgaggacggagatgcttatcaggatgcaggcgagctcggagaagaatgggaacgccaaggccatgaaggtggcggcggcgatggacggcgtcgagtccgtgacgctggccggggaaggtcggaacctgctgcgggtggtcggctccggcgtcgactccaaccacctcaccagccgcctccgccggaaggtcggccacgccgacatcgtcgagctccgcaccctgcacgacacctacccacgtggcgccgccgccggcagctacgccgccacctcaacgagcggccgcctcggcagcagcaacggcggttactactactcctcccagctctccgccgggcgcggcggcgcctacagctccggcggccaccagctgtacggcggcggctacgactcgccgtactaccaccaggcgccgcagcatccgtacgacggcggctactacccgtcgccgtacggcgccgccgcggtgcagcacgagtactacacgacgagcagcaacgacgatcccaacggctgctccatcatgtagcaacgactatagtttaagcttagctattgtgtatagctgtttctatttttttttttctatgatttcttcttctcatttcatttcggtgaggtttgagcagtgtttactactactatttgctggtgaggctgctaaataactggggaaatttgtgcttcagttgttttgtttgttcatctctgcatgtaaacagatttgtgtgaagccgtgatcggtcgagatagaggggctatggtttttgtcagccccttcgatcgttccatttgattgtaattaattgttaatttgcagctgtgttgttttc

SEQ ID NO: 10833 - DNA, 1297 bp, Oryza sativa
  ref <308>: DATABASE ACCESSION NUMBER: AK108181
  ref <309>: DATABASE ENTRY DATE: 2002-08-28
agctctcctctcctcacactcagcttcactctcttccaaaacccacactaacccaagtctccaagaaggcaagagtcgccgtcgccgtcgccgccggccacgccgtgtgctagctagctagagctgtgcacgatacagtgtgctgcgaccatggcggccgccggagcagcgttgcggctgcgcctcctctaccggatgctgcgggtgggcgagctcctcgcgctcgtggtgttcttgtcgtggtcttcttcccgcgtgccggccgccgccgccgccgtggtgcggctcgccgggtcgctcctgctcaacgcccggttcgtgttcgtcctcggcaacgccatcgtgctcctgctcctcgcgctctccaggcacgacctctccatctcttccaaccacggcaccaccaccaccgccgccgccgccgccgtctccagcgacagcgctggcgccgggtccacgccagcgtcgacgacagcgccacccgccgccagcttccctctgttcatcgtcccgcagccatcaccgccgccgcctcacgccaccgaggccccggtggtggcagcgcctccggcgcccgtggtcccctgcgccccgtcggtggcgccggcagcgccggcggcggcggcggcgttcgaggacaagcaggcggtgcgcgtcaacaaggcacgcgcgccgaggcggagcaggtcggagaagatgggctcgcgcggcgcgttccggcgggcggtgtcgccggagctgcggcggtcggagtcggacaacgggcgcaggcggcggtcgtcggtgacggcgcgcgacgcggaggtgtgctggggcgcggacgacgcggaggagttccggcggacggtggaggcgttcatcgccaagcaaacgaggttccaccgcgaggagtcgatgaccatgaccatgtccatcgtcgccggcgtcggccacggcgaggtggcgccggccatcgccggagcactcgcagtcgtggaataagttggcctcacatgtcagtggagaaaagaaaaaaaatccctgtgaaaaagtacataaaatggagaattgaagctctccttggctacatcttgtgtgcacgttttgccttgccttgttcttgttcctggcctccctactctttttttttcgtttgcacgatcatcgaggttttacagccgttggatggtggatccgacggtggtaacagcgttggatgaaaatctgagggggtactttcgggagagaggggctaaactctcccaaacaccccctgaagctgttggttgcgagatggttctactatttcagaattctg

SEQ ID NO: 10834 - DNA, 1284 bp, Oryza sativa
  ref <308>: DATABASE ACCESSION NUMBER: AK108182
  ref <309>: DATABASE ENTRY DATE: 2002-08-28
accgacggagatggcctgacgccaccgacgcctcccctcccactccgctcaccaccggcggcagcgccgcctctcccatccctggtggcgtcgcctttcctctctctctctctctctctctctgcgcagatcgggccgcctctctcctccccgacgaactcctaggcgtgctctgcaccatcgccggccgggccttctccagcgtgcaccagtcgtagtacgggaagtggcgcgacgtcgggacggcgatgcggggcggcggtgcggcggcgccgccggggaggtagcacggcagcagcgacgacatggagttggcgcaccactcctcgccgccgctcgcgcacccggcgtcgagcagcggggagctcgcccgccgcgacgacgacgaccgcgacttgggcctcccgatgtccacctccacgatcttggggctccggtagtacccgtacgacgacgactcgatgctcgtcgacagccgccggctgtacgccgctacgccgtgcttgctcctcgtatcgtcggtggcacacctctcctgctgcatccatcgccaacacacaacgtcaagatcgaacagaactagtacggcgaatatatacatggtgatgtcgtcggcgagatttcgccagcggcgtaccagcgagcggcgaggccagaagggagcgtggtggatgtgcgggaggttggcagcggcaccggcaccggtgcagtgggcgcgcacggtggcctgcgcgcggatgagcgcctgcatgctctgcagcatggcggcggcctgccggcggacgaggaagccacgcaccagcgcctgcagcttcaccagcgccttgagcgctcgcagcaccttcttcgcctgcacaaacacatggcatgattactccattgaagcagagctaggacacgagcacccattgcttaccaggaagcctctgaatgctgtctggattctgatagcggcgctgatgcgcagagggagggagggggcagcaggcagtgggagtgacggcggcgcacggagggggcagcgacgacgcacagagggagtgacgacagtggcgtgcaggagctgtagcacccactaatccaatctcatcgtccacgtggcacgcctgtgccacgtaggtcagaccacggttaaactagattttagaccgggatgatacaataaagcaagtttagggatctcgatatgcgttttgcaagttcgtgggtctaagtgaaacctcatgacaagtttaaggaccgctattgtattttactcaaaatgaaatgtgttctcttcgtttc

SEQ ID NO: 10835 - DNA, 792 bp, Oryza sativa
  ref <308>: DATABASE ACCESSION NUMBER: AK108183
  ref <309>: DATABASE ENTRY DATE: 2002-08-28
aaaagaggaaaaacagtgatggaggcaagggttgccggagtgcccgaagacgaggaatccggcctcctcccccgcccgtccgccgccggccgccgcccatccgtcgccgccgcgcgccgcgcgcctccgcctccagtctgggccaccgtggacgggcccctggggctgccgctggaggaggcggagggccacgctcgccgcttcttcctctgggggttcgcctgcctccccttcctctgggccatcaactgctgctacttctggcccgtcctccgctcgccggcgaccttcccctcttccgccgccttctcccgaatccgcccctatgttgtccggtcagcaattggctttaccattttctcggtggttctactcacctgggccacaacatttataattggtggcgagcgattatttgggccagggtggaacgatctagtgatgtacaacgttgcagacaagcttggtatcagtgggttcatgggatagcttccattttatgcctcgttttgagcagtcttcatctgaccatttgtctcagttcctgtactctgtaagacgatgtttccatctggtaaaggtagtagcaggtttcacccacattgatagacttcctggttcttgatacaatttgatgtagtgtaatgtcagccatcagttcatcactaatggttagactgaagatcgctgtgacttgagtttgtagagaaaacagattgttcctaagtgcatatgtttgtcacaagattatatgtctatctaacctgaaacctgtgctagctttgagataac

SEQ ID NO: 10836 - DNA, 1113 bp, Oryza sativa
  ref <308>: DATABASE ACCESSION NUMBER: AK108184
  ref <309>: DATABASE ENTRY DATE: 2002-08-28
gaagccattcacggcgtggcagcgacgctaggcaaaccaagtagctacgtgccgcggtgctgggtgccagcgagggctcatgttcggcacttcggcaccgtgcgcctcgccgacgcgcgtgtcgtcctcctgtctaggccggtctacgatgggatcgacagcgaccagatctaagctgcgtcggataccagcgatgggaacgacaatgacgacgaccagatcgacccgagctccttccgccttgctctctcaccgacgaggtcaccgccgcttgtctccacctccttcgcattgtccctgcccaagtcggtgactttgattgcgccgcgtgcctcgccttcctcctgtccaggcgggccagcaacgggatcaacggtgaccagatctgagccgtgctggatgccttcgacggcgaccagatcgatccgagctccttccaccacactctctcgccgatgaggccaccgccatcttgtctccacctcctccgcgtcgtccccgcccaagtcggtgactctgaccgcgccgcgcgccttgccgtcctcctatctaggaaggccagcgacgggatcgacaacgaccaggtaatgagctgcactggatgccagcgacagcgaccagatcgacccaagctccttccgcctcgctctctaactgacgaggtcaccgccacatgtcttgacctcctccttcatgccgtccctgcccaagtcaacaactttgacccctcattggcgtggctgatgacgcccagtgctgctgcttcgagacgcattggcgtcagcggtgcggcggctgtgggagaacgaggttgagctcgacgccacccgttgccgcgcggccgagctggaggagcggctccattagtggctaggccgtggtcggagggttagtggccatggcgaccaccttggccttcgccgtgccgggcaaagaaagcagagtgagaggatacgggagaaagaaggaagaagacaaaaaaaaaagggatggatggagaacgtgacggcagtggtatggttctaattttgtaaaattccagtagcacagctacgtatagacaaattgtagtgatatttttctgaatagataaatttgcaatggcatggatcc

SEQ ID NO: 10837 - DNA, 1136 bp, Oryza sativa
  ref <308>: DATABASE ACCESSION NUMBER: AK108185
  ref <309>: DATABASE ENTRY DATE: 2002-08-28
gcagccggggccatcggccaagaggcaggtccccgaacctggcgagaagctgatacgcgagctcaactcgcagcggcagaaggtgcgccgactcatggagagctcgctctggagtgtcgccgcgcacaaggtatccaagctcatggccaagtcggtgctcgccgtgctcgcgcgcatctcaataacattcggtgcgtacgtgccgggcttgccgcttttgacagtaggtcgcgcgtgggcgctccgccgcacgtctggccccttacagcaggcggcgtcaccggccgcggcgatccggcactcggctcccatctttcggcagaaagacaccgccttttcagcgtcggagtccatcaagcccccggcgagcacggttggcggctcggggatggagctgcgatacgcgaacatgatcgtgtgcgccgagatgctgctcaggcaactttggccaacgatccacagcaacgaggtggatgccgggatggatctctcgaagagagacgagctgtacaagatgctgcctgtgaccatccgcacggccgtgaaggcgaagctgagagagagctggagagggcagccagtggacgaggctgcggcggcggcgtcgatggacgcggtggacaggatgctgcggtggttggggcctatggcgcacgacacggtgcggtggcacgacgagcatagcatggagcgggcgcagcggttcagcatgcggccgcgcgtgctgatggtgcagacgctgcacttcgccgaccggcacaaggcagagaatgtcatcgtcgaggtgctcatcgggctcagctgcgtttgctggtacgacgatgagcgacgccgtccggccgattgggacgacgacgactagactgttgggtctggcgctctactgcccggtatattggcatggtatataagcataaagcatttgtatccaccattatggatacaccgcaggacaattttttttgttatgatttgaagagtgacactgtgtgctagctagctaaaagttcttgcatcccagcgagaaaaaacaatatgataccactgtaaatacgtggtaatgtacatatgtttattcaagggtaggacatgtctattgaaaatcatgtaagtatgaatttgtgaccattggattc

SEQ ID NO: 10838 - DNA, 801 bp, Oryza sativa
  ref <308>: DATABASE ACCESSION NUMBER: AK108186
  ref <309>: DATABASE ENTRY DATE: 2002-08-28
acagatgcgagtgagatcacaccctcaacctacactagccatggccgcagcaaacaagattcccctgctgctcgccgccgctgccgccctctcgctcgccgcgagcgccgtggcggcggcgcccggcccgcgccgccggccggtgcgcatgcggctgtacatgcacgacgtgatcgacgggccggggcagacggcgatccgcctcatctggggcgcggggccgccccacgcgtccatgccggggcgggcgttcggcgacacggtggccgtggacgacctcgtcacggagggcccgagcatcgcctccgccgccgtcggccgcgcgcagggcacgtacatgctcagctcccagcgcgaggcggtgctggtggttgccatcaccgtggcgctcacctcggccgggggcccctacaacgggagcaacctcgtcatcgccgggcgcgacagggtgcgcgacgagacgagggagctcgcggtggtcggcggcaccggcgcgctccggggcgccgccgggtacgtgctgtggaggacggccaaggtgtggtcggagatccacatggcgctggagctcgacgtgcacgcgtccgtgccggcgacggcagacgacgacgcggtagccaccgagtaagagagattattgtactcctacgtggatcgtttgattccgccatggatatctatccggccgggagctcccgtgcactgcagctagattatactcgtatttatttgttgtgcttttaactttttgtttccttacaagaaataaaaagaggctatgatcctctgatcattactatt

SEQ ID NO: 10839 - DNA, 1614 bp, Oryza sativa
  ref <308>: DATABASE ACCESSION NUMBER: AK108187
  ref <309>: DATABASE ENTRY DATE: 2002-08-28
actttgcttccgcatcctcaccatcgtcatatctgctccgcgacacctctcgctgctcggcccgcatccttccttctacgtgcgacgttcccgccggcatctgcagcactgcttctttccacgtcgcgacacctacagccgacacgcacaccggtggtctggatccgacgccttctacctcgccagcttcgatactgcggctgctggacagactgcgcttcacccctttgcggcacagccttcctctttgaatcgatctgctgttggtgcacgacatcaaccttgtggtcacgaagacagacaatcctcgacagccgatcccggaatagagaggcttcgactcgtaaggccacgcgttcttttggtgtcgcaacgactcagcacccgctgaaagttcaacagctcagcatgtctggcggacgcagctgcgcacgtgtctacccaggcgtcaacgaaaagtttggccgcccgtggtgggactacgacaacctggcggtgcagtggggcacgcaggacaactacgagatccttcgcaaggtgggtcgcggcaaatactcggaagtctttgaaggcgtcaacatcgcctcagcatcgggcgtgcccgaaaagtgcatcatcaaggtgctgaagccggtcaagaagaagaagatcaagcgtgagatcaagatcctgcaaaacctcgccggcggccccaacgtggttggtcttctggatgtggtgcgcgatccgcagagcaagacgccgtcgatcatcaccgagtacatcaacaacacggacttcaagatcctgtaccccaagttctccgacttcgacgttaggttctacatctttgagctgctcaaggcgctcgacttttgccactcgcggggcatcatgcaccgcgacgtgaagccgcacaacgtgatgatcgaccacgagaagcgcaagcttcgcctcatcgactggggtctcgccgaattctaccacccgtacaccgagtacaacgtgcgcgtggccagtcgatacttcaagggacccgagctgctagtcgacttccaggagtacgactactcgctcgacatgtggagcctgggatgcatgtttgccagtatgatcttcaggaaggagccgttcttccacggccacgacaactacgaccagctggtcaagatttgcaaggtgcttggtaccgacgagctgtacgcgtacctggagaagtacgacatcgatctcgacccgcagtacgacgatatcctgggaagataccagcgaaagccgtggagcaggttcatcacgtccgagaaccagaggtacatctcgaacgacgccatcgacttcctcgacaagctgctgcgatacgaccaccaggagaggctcacggccaaggaggcgcaggatcacccgtactttgagcccgtgcgggctgctgcggcgcgcggcgaggtcgtggcgagctagacagtcgcgcagctcgtcacgcgatacagctcgtcccggctgtcgagcgccgagtccaaaacaggcttcggcgatgtcgtatgtgtgccgtctatctcggcggtgggtcacgcagggctagtttggctgcacgcaacgctgtacccgctcttcggtgaatcttatttctttctggtc

SEQ ID NO: 10840 - DNA, 1059 bp, Oryza sativa
  ref <308>: DATABASE ACCESSION NUMBER: AK108188
  ref <309>: DATABASE ENTRY DATE: 2002-08-28
cacagagtaatacagagggaggtgggaaggaacacacaagtgtgcttgatatcgaattccgcagccgcgatggccggtgttgttccgatgatcatcgttctggcgatgggcggcggcgcgctgggcgggcccgaggcgctccgcctcttgctcaccttcgccggccgaagccccctcgtcgacatcggcatcgtcgtcttcgtcatcgccgcgctcgccgcgccggcgctcggcaccatgcttcttgcgtgcttctaccgcacgccgcgcggcgcaagaggtgcggcggcggcggccgctgacctcttagccaagatgacgctggcggtgtccatggcggtagcgctcctcgtctccgcgtccctgctcgccctgccgctgttccagtccgggaacgtcgtcgtcggtcttctcgcgctcgccgttcccgccttcgtcgtaggcgccagcgccgcgcgcgtccgcggcgtcgcgcatctccgcagggcgcgcaatgcctccggcgcggtgacggacgcggggcgcgccgccgtgacgaccctgacggtgtccctcgccgccgtatgcatcctcctcggctcttgcgtcgcggtcggcggcctcgacgcgcaccacctcttcacctccttcgccttgaagaacccaatcatccacgcgcccaccggcgtcgccaccgccgccgtcgtcggcaccacgcttctcgccctcttcttccgcaaggcgcaaaatgcggcggccgcggccgcggccgctgccccactaccggccacggagcgcgccgccaagattatctcggacggtgccaatcccggcggcggctgcacgtgaaggttcccgcgccgcgagcccgcgacgcggccaccgtgtactacctggagtctggaatcaccgtactgtcatcgcattcgtgcagtgcagagtgtagtcctgtaatgctaatactcatgctcagctcgtgcagatggggaacgtgactgcgtgagctattgtgatgttttaattgttgattcgttctgtattcaggtgagataattaacagtgaagtttcagaaaaaaaag

SEQ ID NO: 10841 - DNA, 784 bp, Oryza sativa
  ref <308>: DATABASE ACCESSION NUMBER: AK108189
  ref <309>: DATABASE ENTRY DATE: 2002-08-28
gtgagccaagctttggtacgcgcagcacttcttctcatcccttccccgaactcacgaacgcacgccgccaccaccgcccaccgtcgtctcgtcggagatggcctcctccgcctcatggccggcgttcggagtaagcccagaggaagcagggaagggtaaatggtacatcgcaactgctgctaccaaccacatgaccaatgacaagagcctcatctccgacctcaagcctgtcgccgatggccgtaatatcattgctgatggcaatggtgcagggttgaaggtgcagggcaggggagctgtgaacacagaaactgtggttctccctgcagaagtgtggtatgtgccggagattgatgaaaacttggtttctgttgaccagctcaatgaacttggcctcagtatttcgattggccgaggtgtatgcaccgtcactagagttagtgatggatctgtagttggcaaagcgcgtagatcaggtggagtctatgaggtggaattcctcaaggttccccttaattagcaccagaaattccttgctgcagtatcagttggggtagtcagactcgtatgatgatattgcctactatatgcaatgcttgttgggttggaacttaagttggatctttcagtagttaagggatctggagttttctctgaatgtaaaaactaaaaagtgaaagaaggagctgcctgtgagcagaactgaggattttaccatgttggtttgaccttgtcttttaccactgtttttaagttcctgtagcctgttgagctgttcatatcc

SEQ ID NO: 10842 - DNA, 1212 bp, Oryza sativa
  ref <308>: DATABASE ACCESSION NUMBER: AK108190
  ref <309>: DATABASE ENTRY DATE: 2002-08-28
acagaaaattaccagagctaaactgtcttgcacatcctttcaccctgagtgacgcagtaatttggagtgtaaagtttactactagtacgcgtactcctcaagaacaccttgttggccggcggcgactacgcatggcggcggacggcggcgcgctgaagcggctgttcgagaagccgttgccggagaacccgacgctgctggaggcgctgtcggcgtggaaccacacccaccgcaagaagctcgtcgacccggcgtccttcaccgagatcttcggcgagctccacttccaggagaagccgcccgtcgtcgactccctcgctcgcgccgccgcccgcccctcgccgtcgccgccgcctccgcccccgccacgccgcacggtgtcatggctcgacatcaccgacgccgccaccgccgacaacgacaacgacaagagcaaggatgactcctcgctcgacgccctcctcaagccgcccaggccggcgagcggcggcgccaccgtgaagcggagcgcgagcttctgcctcaagagctcgacgtcgctgctgctctgcaccgaggggctcgggtcggagagcaccgtggacgccgacgacatggtcaaggacggcgacggcagcggcgccgtcgtcgacagcgggatggacgtggacgacgacgccagcgacgtcgccgccgccgtggcgggcgacgacgccttcggcgccggagggaaggagaatcggccgccgccgccgccgccgtcgttcccgccgccgatacggtcgatcgggcgcggcgggaagccgagtgtgtgcttccggtcggtgcgcgcggaggggaggttcgtgctgatggaggtggtcatccccgggaaggatctcctgcgggcgactcgcgagggcggccgcctcaggctgcagttctccaacgccgccgccgccgccgccgccgccgtcggcgtcatcgacgacgaggagatgcatggacaagaagcagcagcatgcgtaggcggcgacacgttcgcttaattaactcctattataatctattattcttgtgctaactaatttggtcaagaagcactaattaaacatacttgtgatgcatatatatgatttcatatacatacaatactttgtcaggtcataggaacatgtcgctctgtacaataagaatgtacgatctgacctgaatatcaaagcagtgaaagatctagaaaaagtttaagaggct

SEQ ID NO: 10843 - DNA, 1130 bp, Oryza sativa
  ref <308>: DATABASE ACCESSION NUMBER: AK108191
  ref <309>: DATABASE ENTRY DATE: 2002-08-28
acactgcaagctcacgctcaccctgtcacactcactccagtgtagtgtaccgcagcgcgagctttgcagggagcaatggcgatggcggtgcgggtcgcggcggggctcgtcgtcgcgctgctgctcgcgggcgacgcgtcggcggcgacgctggcgctgtacaaccggtgcgcggagacggtgtggccgggcatccagccgagcgccggcaaggagctgctcgcgcgcggcgggttccagctggcgcccaaccgcgccacctccatccgcctccccgccggctggtccggccgcgtctggggccgccagggctgcagcttcgacgccgcggggcgcggccgctgcgccacgggcgactgcggcggggcgctctactgcaacggcgccggcggcgcgccgccggccacgctggcggagatcaccctcgcgtccaccccggccgcgcaggacttctacgacgtgagcctcgtcgacggctacaacatccccatcgccatgaccccgtcccacggctccggcgccaactgcgtccccgcggggtgtatcagcgacctcaaccgcgtctgccccgccggcctcgccgtccgcggcggcggcggcgacaaccgcgtcgtcggatgccgcagcgcctgcgccgcctacggcgcgccgcagtactgctgcaccggccagttcgggagcccgcagcagtgcaagccgacggcgtactcccggctgttcaagacggcgtgccccaaggcctactcctacgcctacgacgacccgacctccatcctcacctgctccgccggtgcgtcctacatcgtcaccttctgcccgcaccgccgctagacagcgtaacccaacccaagcaaagatttgcttcccactcatcatgaacaatggcaaagacgctagctttagtcatggtgcatggcattgttgttgctgatgttcttggttcttcttgatgctgttgatgcgtcatgtattagtgccgtaataataataatactattattagcattaaaccagtgggttgtactgtagttttagcggttggtttgggtataacgtgaggagatctggtggtctaccactggtaggccgggaaaggaggaggtatatgggtatatggaagaactgaaact

SEQ ID NO: 10844 - DNA, 1127 bp, Oryza sativa
  ref <308>: DATABASE ACCESSION NUMBER: AK108192
  ref <309>: DATABASE ENTRY DATE: 2002-08-28
cttcttccaggaggtggccacggaccacggccgcgccgccgcggtgctgcgcgcgtgcacggcgttcctcggcggcgaggcggccggcgccggcgccgcgctgctcgtccggtgcctcgagacgctcgcgtcgtccggcggcgccgacggcaggtggctcgacgacgtggccgcgctccccgtggaggagttcgaggtcgccgtcgaggccatgcgcgcgcgcttcgcccacgaccacgacctcatgtacaccatcgttgatcactacctgcagaatcacagggggaagctgacggaggaggagaagagcagggtgtgctacaacgtgaactgcaccaagctgtcgcaccacctgttcatgcacctcgtccagaacccgcgcctcccgctccgcttcgtcgtgcaggccatgctcgtcgagcagctccactcccaccactccatgctgctcagcggcggtcaccatcaccacgccggcgccgccggcgcaccgagctccgccgcgccgcctgcttcgctcctcaagagctccctctccggcgcattcggtgcttgtggcggcttcgccgccaccgccgccgccgcgggcgacgccgccagcagcatgacgctcggcgacatcctccagcgcgacgccgtgctgcgccagtcggcgcacatcagggcgtccatgcaggccaccacccagcggatcgacagcctcgagcgcgagctcgccgggctccgcacgcgcctgcgccgccgtcatcaccaaggacaccacgaacaccaggggcctcaagtctcggctggtgctcgggttcaagaacctgttcggccggagaccagtcaccgccgccgccgccgcgccgcccacgtccggcgaacgcgccgctgcgcgcgtgagcgtgaacgacaaagccatgtccaccgatgcgccggagctcgacgccgacgccgacgccgacgagctgacgcggcctcaccggaggaatctgtccatcgtgtgatccgagcaattgcgtgcgtgtgcatggcgactgcaatgcacgcatgcatgatccgtgtggtatatacatctatcaggagaagtgatctgatcatgttgccactatctttgcacggccatatgatatattttcgatgct

SEQ ID NO: 10845 - DNA, 993 bp, Oryza sativa
  ref <308>: DATABASE ACCESSION NUMBER: AK108193
  ref <309>: DATABASE ENTRY DATE: 2002-08-28
aagcgaccttcgacaatcagccggccaccaaacaccgtcgcaccgacaagatgaagttgaacatctcctacccggccaacggctctcagaagctcatcgatatcgaggatgagcgcaagctccgcgtcttcatggaccgccgcatgggtcaggaagtccccggcgactccgttggcgacgagttcaagggctacgtcttcaagatcaccggcggcaacgacaagcagggcttccccatgaagcagggtgtcatgcaccctacccgtgtgcgcctgctcctcgccgacggccactcctgctaccgcgcccgccgcactggtgagcgcaagcgcaagtccgtccgtggctgcatcgtcgccgccgaccttgctgtccttgccctcgccattgtcaagcagggcgacgccgacatccccggccttaccgacaccgtccaccccaagcgtcttggtcccaagcgtgccaccaagatccgcaggttcttcggtctcagcaaggaagacgatgtccgcaagttcgtcattcgccgtgaggtccagcccaaggctgagggtgccaagccctacaccaaggctcctcgcatccagcgtctcgtcactccccagcgtctccagcacaagcgccacaggatcgcactcaagcgccgccaggccgaggcttccaaggacgctgccaacgagtacgctcagctcatgcacaagcgtgtccacgaggagaaggccaagaaggaggagatccgcaagcgccgcgcctccagcatgcacaagtaggttatacctgtgcatggatagacgctcctaggttccaggtttgccaaggtaccagatcttcaatctgggccgacgacctgcgccagtggtagagccactgggaggtcagctcgagtctgcgcgttcagcgatggttcagtccatataatgggcgacgaaaagtagacggagttcgacacttcatagcggcaatcaatggcggccttgcagctgccgtactctg

SEQ ID NO: 10846 - DNA, 820 bp, Oryza sativa
  ref <308>: DATABASE ACCESSION NUMBER: AK108194
  ref <309>: DATABASE ENTRY DATE: 2002-08-28
tggatcaagtgctggtgcgcccgccgcgctcgccccgagaggaccctatggcgacgcagctctccgccaccttcgcccctgccgcgaccaccaccgccacgcccctcccggcgccgcagcagcggctccggcacggccgccgctgctaccacgcgctgtcgctgcgccctccccgcgcggcgtccggcgatgacggcgccggcggcgaggtggagcccgctgccccggcggcgcccgccaagacggccaccgccacggacgacggcggcgacgacttcgaggagcgcgtcctgcgcatcaagtcccgcgtcgggcccaagaagcgaggcagcgccgcggcgcggaagaggaagggcggcgccggggcgtcgtccaagtccaaggctgccgtgacgctcccgcccgtgccgctgcgggaggcccggtcttccgtgggcgtgcccgttgagttcgggttcagcgcgtacagcgagaggctcaacggcgcgctcgcggcggtcggcctggcggcgctgctgctcgtggagctcggctccgggaaggcgctcgtcaagtaccaccagccggccacgctgttcctccaggtgtacaccgtcgccgcggcgggcgccgtgttcgtcaagtacgagaaggagcggatcagcgtgtggcccgggccgccggcgaccaagccgccggctaccggtgaatgattggcacatgggggtttctatttgacttttttgtaggatatgcttctttttttgtaatttacccatatacctcgttgagttactgtactttatcgacaaattgtgttgtgaaatattgaaattcggtt

SEQ ID NO: 10847 - DNA, 1307 bp, Oryza sativa
  ref <308>: DATABASE ACCESSION NUMBER: AK108195
  ref <309>: DATABASE ENTRY DATE: 2002-08-28
accgttggtttatgcagcagacgccgttgtccccggcactcccgctaacgtttccaaccaatgcctgccgaaatcgctggcgccggagaaggtgcggggcaagatcgtcgtgtgcttgaggggtactggcttgagggtggagaagggcctggaggtgaagctggcgggcggcgcggccattatcctcggcaacccgccggcgttcggaggcgaggtccccgtcgacgcgcatgtgctcccgggcaccgcagtctcctcggtcgacgttaacgccatcatccgctacatcaactccagctcgagcccgacagcggtgctggatccctcgaggaccgtcgtggacgtcaagccgtcgccggtgatggcgcagttctcgtcgcgcggccccaacgtgaatgagcccaacattctcaagcctgacgttacggccccggggctgaacatcctggcggcgtggagcgaggcatcgtcgccgacgaagctcgacggcgacaaccgcgtcgtcaagtacaacatcatgtcggggacatccatgtcgtgcccgcacgtctccgccaccgccgtcctcctcaagtccgcccacccgggctggagctccgccgcgatccgatcggccatcatgaccaccgccacaacgagcaacgcggagggcggcccaatgatggatgcggacgggacggtcgcggggcccattgactacggctcgggccacatcaggcccaagcacgcgctggacccgggcctcgtctacgacgcgtcgtaccaggactacctcctcttcgcgtgcgccagcggcggcgcgcagctcgaccactccctcccctgcccggcgaccccgccgccgccgtaccagctcaaccacccgtccctggccatccacggcctcaacggatccgtcaccgtgcagcggacggtgaccaacgtcggccagggcagcgcccgctacagcgtcgccgtggtcgagccgatgggggtctcggtgaaggtgtctccgaggagcctcagcttcgcgcgcaccggcgagaagaagtcgttcaggataaagatcgaggccaccaaagggagaggcggttggcgtgtaaacgggcagttcgtggcgggatcgtatacgtggagcgacggtgtccatgttgtgaggagccctcttgtcgttcttgtcgcgtgattcattcttaggttagattgattactctttactgcttaggatgcattgcttgaaagaagtgaaatctagccgaaagcctggaaggctggaaccatgttgtggcagataaattcagcgaaaagaaagcgaacacgacttatat

SEQ ID NO: 10848 - DNA, 1306 bp, Oryza sativa
  ref <308>: DATABASE ACCESSION NUMBER: AK108196
  ref <309>: DATABASE ENTRY DATE: 2002-08-28
atccatcctctcccctctcttattccatcgtttcctggacccgtctctctttccctcgtttctcttcggacctctggaacagcgtctgctctcgtctttttggaaccaggatcgcatacacacacactctctaactcccggagcaacgcatccacgtagaacaccatggctaccgaggcactgcttccgatcggcgcggccttcgacggcgcaacgcagcacgatctggaccgcgccaaggccgaggcgggcgaggcgtacttcccgaccgtgttcaacccggccacggtggagcgcaaaggccacgtggtgattggcaagggccgagcgggtgtcgccaagcgcacccaggatggcttcaaggtgtactacgaggtgcacggcaagggcgcgatcaaggtggcctttgtcatggggctcaacaacaccagctttggatggttgccgcaggtagaccatctggcgcgcgacgagcgctactcgtgcctggtgtttgacaaccgcggcgtgggcaattccgagacgccggcggggtggtacaagacgtcggatatggcggtggatacgtttgaggtgttggagcaggtgggatggacgggtgagcgcaatgtgcacgttgccggtgtttcgatgggcggcatgatcgcgttggaaatggctcgtcagcgacccgagttactcgcctcgctcacgctcatctcgactgcaccgggcaagcgattccacacgcccacctacggattaacctcgctcgcgcgtgtgctggcgggtcgtacgctcggcttcgacagcgaacagtaccgtctcaaccgcctcatctcgacgctcttccccgagtcgtggctggccgagaagagcgaaaaggatgcatcaaggaccaaccgcgaggtgctgtacgacatgttcaagtggcgatacgcttttaccattcgacagcagctccacggtgctgtcagccagatgaaggcggccgtgacgcactacatccccgacgccgacctggagcgcatcgacacggcggtgcccaagatctcgaccctcacgggcgataccgactttctcgtggatccgcgcaactcggcgtacctgcgcgacaagctgcccagcgccgacttccacgagttccccaacgccggccatgcgcttggaaaccagatcgcagaccaggtcaacgccatcctcgaaaaggctttcgccgacgccatcgccgcccagcgcaactagtttcttcaccgctctcctgcacatacacggatttttgttgatgattgatggattccgcaatcgcattctctttcgcactcgt

SEQ ID NO: 10849 - DNA, 802 bp, Oryza sativa
  ref <308>: DATABASE ACCESSION NUMBER: AK108197
  ref <309>: DATABASE ENTRY DATE: 2002-08-28
gggcagcaaaacactctcaagctatagcagagctctgaatatggagctagctagcaacactgaatgatcgaacgaacgatcagctagctgctagctagggcgagttttattgacggacacagatcgatcgatcgatcatacatatcgatctgcagctagttctcgcacgagtgtttgcacttgggccctggctggccggtgaactggtcctggcagacgtagcgaggaggcttcgacgacttcacccgcttgcaatccttgcacgcggcggcgcacttcttcaccttgtcgttgcagcggcagatcggcgggatcgacctggtgcaggtggtgttggtgcagcaatctccccacggccgcggcgtgcagaagggacccgggtcggcgccccagtagacgtcgctgcagatgagcgggcccgggaatggccccggcgcctcctggcacacctcgcactgtgccacgcacttgctgggctccagctcgtcgttgcagcgccactgcggcgggttggtcttcgtcggcagccgctcgatgttgtcgcagcacttccacggcttcttcttcgtcggcgcctgctgtgctgatcctccgtcggtcgggaggcgtatggtgttggtggtggtgtcgtcgtccgccgtgccgagggcggcggcggtgaggccggcgaggaggaggaagagaagggtggaagtagtcatggcggtcttcatcttcttcgagtagtagcttagttggtctcgaactctcgatgatatgtggtgttatttatggagaccaaataagataagctaaccccatc

SEQ ID NO: 10850 - DNA, 946 bp, Oryza sativa
  ref <308>: DATABASE ACCESSION NUMBER: AK108198
  ref <309>: DATABASE ENTRY DATE: 2002-08-28
aagcaaagctcacttggctagtccaatggcacagagatgaagtatgctccaaagtttgtggctatcctcctaatacaattcctttaaataccacacataactcctcccctccaaccccctactctttcgccaagaaatactacaccacacacacatttctaacttgtgaattgtgatcgatcgatcattcggtcgtgctagctacctcgtaatttcatcatcccaaatctccttgcaaaactcgtcttcgtcgtcgtatcatcatggggaattgcatggtgattcaagataggaacagggagatcaagatcatgagcatggacgtcgacggcgagatcctgaagctgccgccgccgccgccacccctcaacggcgtctcctccgacgacgacgacgaggcactccggccggcgacggccgacatggctgacgacccacccggcggcgccgtcgtgagggtgaagctggtggtcagaaagcaggagctgaagaagatgctgctgcacaacgacgccgccgccatctccctgaacgacatggtgtctctcatgcaaaaacaagctgaagcagatgagctgctgcaccagcaggagagctgcggatcagtgtggcagcctaccctgcagagcatacctgaaggcagcgttttctagctgcatgcagaacaaagaatgatgcatgcatgaatttaccattttggatctcttgaataagtttatgtatgtattcatggacaacaagagcagtcctagcttatatatgtatattagagagagatagaggggtatataatagctagattgataaggaattttgaggcaaggattctctttgtcttttcttcttgattaaacatatgcatgtaagaaggggtaaagatggtcctggaaatcaagcaagatgatagttttatcatgccttcgttcatgcatgagagattatgact

SEQ ID NO: 10851 - DNA, 1057 bp, Oryza sativa
  ref <308>: DATABASE ACCESSION NUMBER: AK108199
  ref <309>: DATABASE ENTRY DATE: 2002-08-28
gagcgatcgatccatctaccggcgatgattctgcggaggacgctgccgaggctggcctcggcgaaggacggcagcggcggcggcttcgccgacggccacttcccctccctccgcggccaccccgccgcgcgcgccaacgcgcgggacgccgccgagaagcaggcggcgctggctgcgaaggaggaggagatcagggaccaccggcgcggcgacgccgcggcggcgtcgccggcgccgtcgacggtgaaggagttccgggtgtaccggtggagcccggacgccccctcgcggcggccgcacctgcagtcgtaccacgtcgacctcgccacatgcggtcccatggtgctggacgtcctgcagaagatcaaggcggagcacgacgcgacgctggcgttccggcggtcgtgccgggagggcatctgcgggtcgtgctccatgtgcatcgacggggtgaacaccgtggcgtgcctcaggcccgtggacaccgacacctcgtcggccacgacggtgacgccgctgccccacatgtacgtcgtgagggacctcgtcgtcgacctgaccagcttctaccagcagtacaagtcggtggagccgtggctgaagaggaagacgaagacgaagacggagacgacggagcacgcgcagtcgccggaggagaggaagaggctggacgggctgtacgagtgcattctgtgcgcgtgctgcagcgcggcgtgcccgtcctactggtggaacgcggaggcgttcctggggccggcggcgctgctgcacgcgtaccggtgggtgtcggacagccgcgacgagtacgcggcggagcgggtgcaggcgctggcggaggggtgggacaagctctaccgctgccggatgatcaagagctgcacggccacctgccccaagagcctcgaccccgccgccgccatctccgccatgaagaccctgcaccagctcggcaagccatgacagagacacacagagagagaatgttgttctagtgtttagcgtgcgttccagttaattaatctatttttgaataataatccatcgaattactacgatt

SEQ ID NO: 10852 - DNA, 1090 bp, Oryza sativa
  ref <308>: DATABASE ACCESSION NUMBER: AK108200
  ref <309>: DATABASE ENTRY DATE: 2002-08-28
aagagagaaaagaacacagtgtgaatgtgcagggcgtgaccgtagcctcctcccagcgatgtcgccgaggaccgccatcaccggagaaaatccgccgccaccaccgctcggaaccttgccgctgctccgctggagagctcgtcggctgcacctcaaaggagcgccggcgaggagaggcggggtcgacgccgagagaggaggggcccggcgccgctccagatccgcgccgccgccgccgccgtcctcctcgctccgcctcctcgtcgccaccgagagaggaggagcccggtgccactccagatccgcaccgccgccgccgtcctcctcgctccgtctcctcgtcgccggcgcggctctccactccagtcccccactctcgttgagctcggcgaggtgcggcgtgcggggcgagacgagaggcggcgcgcggagaaggaggaggcgttgtcccggcgacgtgcgaagctcgggctggcggggacggcgcgcgtcgccacgggcgacgacgacacggcgtcggtggcgacgacggcgactaccaccaccgcgcacaaggcgttgtcgagcaccccgccattctgctacgcgcacggcgttatgcagacggcggacaccaaggacctcatcctcgccatccccaagctggagtctgctgtgtggaggtggtcgccggcccggcgctggaaaggggaaagtgggatagagtggaggtggtcgctgagaatgggaaagtagcagagagaatgggttggagtggttggcttgaggatcccgtgtagtaacctgcaccatgtgagactatgtgtggtgtggattcgttatgcatctacaaggtaactcaaacgagggacttgcactgctaccgcccttacacctcaattttcatagagctgcccaacctttttatgaagtccaaactgaaaaaggataggagtagactgcagttgggttcctccttttcgaggatctttcccaaattttcggttcagattgaaaaagaaacttgcttcaaaaactgcaccacagtccacagcacaccctgctccttcggtctgtcgtcctcctatgcaaatgcgagtagttacacctg

SEQ ID NO: 10853 - DNA, 1375 bp, Oryza sativa
  ref <308>: DATABASE ACCESSION NUMBER: AK108201
  ref <309>: DATABASE ENTRY DATE: 2002-08-28
agaacacgttgatcttgatcaatcaagaaatcgttctagctagaatgaggtgttcgatggcggcgatggcggtggtaatggcggtgatggcggcggcggcggcgtcgccggcggagggcgcgggggcgttcttcgtgttcggcgactcgctggtggacaacggcaataacaactacctcctgacgagcgcgcgcgccgacatgccgccgtacggcatcgaccacccgagccaccgccccacggggaggttctccaatggcctcaacatcccggacatcatcagcgagcacctcggcgccgagcccaccctcccttacctcagcccggacctccgcggcgccaagctcctcgtcggcgccaacttcgcctccgccggcgtcggcatcctcaacgacaccggcatccaattcgtgaacatcgtgaggatgagcaggcagctgcagtacttcgcggagtaccaggagaggctgcgcgcgctggtcggcgcggcgagggcgcggcggatcgtgaacggcgcgctcgtgctcatcaccctcggcggcaacgacttcgtcaacaactactacctcgtccccttctccctccgctcccagcagttcgccctccccgactacgtccgcttcctcatctccgagtacaagaaaatccaccagaggctgtacgacatgggggcgaggcgggtgctggtgacggggacggggccgctggggtgcgcgccggcggagcgcgcgctgcgggggcgcggcggcgggtgcgcgccgcaggtgatgcgcgcggcggagctgttcaacccgcagctgtcgcgcgcgctgggggagatgaacgcgcgcgtcggccgcccgggcgcgttcatggcggccaactcgttccgcgtccacttcgacttcatcagcaacccggcggcgttcgggttcgccacggcgagggacgcgtgctgcggccagggccccaacaacggcctcggcctctgcactgccatgtccaacctctgcgccgaccgcgacgcctacgtgttctgggacgcctaccaccccacggagaaggccaaccggatcatcgtcagccagttcgtcagggggtcgctcgactacgtctcgccgctcaacctcagcgccgcgctggagatcgacgccgcggaggaggcggcggcggcggcggcgaggcgccggcggcagcgcgcggtggcgaggctcgtcggcgacaagccgcacgcgtagctagcttgtgtgatgtgctggtgttaaccgtgttatggcaaggagagagacgtgtccatgccatgcatgtgtggctgttggggtgggtgctgagtactctcgcacgaggaaattaattggaagctgataataattccgattttcctaactaatttcag

SEQ ID NO: 10854 - DNA, 1305 bp, Oryza sativa
  ref <308>: DATABASE ACCESSION NUMBER: AK108202
  ref <309>: DATABASE ENTRY DATE: 2002-08-28
gaatccatggcgctgcggcgtttcgccgtcgccggccgcgtcctcctccaccgtgtggaatcccttccacctccgcgcccgccgctcgcgttcctctcctccgaatcccgcggccacctcgtccgccgcttctccaccccctcttccaccccaccgcacttcatggtccagtacctcgtctccaagtgcggcctctcgccggcggccgccgccaaggccgccccgcggttcgcccacctcgactcggcgtccaggcccgacgccgcgctcgccttcctccggtctcagggcctcacccgcgcgcaggtccgcgaggtcgtgtcgtggaagccggagctgctgctcagcgacgtcgacgccaccctcgaccccaagttccgcgccgtccgcgcgctcggcctcggccgcgccgacgtcgcgcgcctcttcgccctctacccgccggcgctcacctacggcatccacaccaacctcctcccgcgcgtcctcttctggatcgacttcctggggtccgccaagttactgatgaaatggctcgccaagacgtggctgctccggtacagcgtcgacgccctcctccgcaacctctccacgctccgatccctcggcgtccagcagagccgcatcaccaccacggtgcggatgcagccgacgctgatcacgcagacgccggccaggttccagaagctggtcggccgcgtcgaggcgtgcggcgtcccgccaagctccgggatgtacatgtgggccttcttcgcgctgcacaacgtcagcgagggcagcttccgtgccaagaaggcggccgtggtgggagccgcgggctgcacggaggaggagttcgacgccatgttccgccgcgcgccgtgcctcgtgttcgtgcccgcggcgctgctgcggcggaaggtggagttcctgatggcggaggccgggtgcgacgcgacgcacatcgtcaccaaccccgtgctgctgacgctgagcctcggcaagcggatggcgccgcggtgccgcgtcgtggaggcgttgcggtccaggggcgtgggcatcgggaagaaggcgaacctggggagcgtgatgagatatccggaggacaagttcgtggagcggtacgtactcaggtacaaggaagaggtacctgaactcctcgagctgtatcctccccgactttgcaagggaagctcgcagacacggtgacatttctgcgaaattgtgttgtgttacatccataggttgagcttgttgttaagggtacattattattgaagaagtgtaaaacattcgattctgaaatatctacccatttcgtgtttc

SEQ ID NO: 10855 - DNA, 935 bp, Oryza sativa
  ref <308>: DATABASE ACCESSION NUMBER: AK108203
  ref <309>: DATABASE ENTRY DATE: 2002-08-28
ccagcacagcagcggagacgaaggcggccacgcgcttttgacggcgaaccggcggcggcggcggcgaggatcgatggaggggtggaggaagaaggtcgcgttccgggcgcgccgcgcgtgggcggcgctcgtctccggccgcctccgcgcgaggaagcaaggcagccgtggcctcctgaagctacatgaggacgtgcagacctgcgactacaaggatgtgcaggtcatgttcgagatgctgacgtcggagctggaggcccagaagcagcagcagcagctgctgccgccgtcgccgcgcaagccggcgtggcccggcagctcgccgtcgccggccccggcgaagcagtagagacaacaagaacagcaagaagatgatgaggagaccgtgcgcttgcaatgcacggcactcgaaagaagaagaagaacaacaatatttgttactgaactttctttgttttgttttctttctcccagtttttagtactacaacagctttagtcctggttttgcctgatgcatctgcaatcagcagccaatgaatccgtccccctgcccttctgtcagtttactccggcaaaagagcgagagagaaaaaaaatgcagcaataagaagaagaagaagatggagaaggagataggctcaggagagcatcagattttgtggtgccatatgagcctcttttgcgtgtgtgtgtgtaaatacagctgctgctgattttttttttctcgcatgttgggagtgaagagggagcaagaggggttcatctcctgttatctgtttggcaaaatttatgcctcagggtgtacatttcttttatgtctgcctgtctgtttctgcatgtgttcttgaggaggcagtgatcttcagtttcctcatgacacagtggatgaaatcagcttctgtttcaagagaataatcatatccatatttgagc

SEQ ID NO: 10856 - DNA, 711 bp, Oryza sativa
  ref <308>: DATABASE ACCESSION NUMBER: AK108204
  ref <309>: DATABASE ENTRY DATE: 2002-08-28
gatctgattccccagcggcacttcccgatatgattccccatccgtcgccagaagtgaatggtgccagcggcgcttcctgatctgattccccatccgatctccgcggactccagggtggcgcttccgcggactccagggcggtgcttccacggactccagggcggaggcaagaggagtgaagggcggcgcttccgcggactccagggcaaaggcaagaggagtgaagggcggcgctcccgcggagttcttactgtgaagtccagggctgattgacgccggttcgcttctcgtcggtacagccctggtccgctcgttgtcgccagccacgagagaggtttgccgtcgtggtcaaggggcgatatggtggtcggaacagactgcaacggcgccgcagcggaactggatgctttgttgaagttgcagtagctggcccagtacaatatccatattggctgaattctgtagagagcgaagtaagaaactgcaatttcaagctactttgtttgaaatgaaacaaataataccttgggttgctggctgctttcaggacttgtagcataattttggtattgtggggattcatatgtttggccatggtctgtatctgatctggaaagtgtgtgaatttcttgattgattctgtcttcccaagtgggggccgtggtctgtaactggaatgttgttatctttattgtccgctgcttgttcggc

SEQ ID NO: 10857 - DNA, 766 bp, Oryza sativa
  ref <308>: DATABASE ACCESSION NUMBER: AK108205
  ref <309>: DATABASE ENTRY DATE: 2002-08-28
aactcgccaacccaccctgtacccgccgctcgatcgccgccgttctcgcccgaagaaggaaagcgccatggcgtcgatgaagcggaagtgccccgatgacgagacggcctgcggctccggcgccggcgccgccatgtgcgtcaccggctgcggattcttcggctccgaggccaccaacaacatgtgctcccggtgctaccgcgagcactccgcggacaacgacgccgtggaggaggcggcggcagccaacagcgacctcgagctggttggcgtggcggagacgacgacgaagaaggccaggatgagcgccgtcgtccccgtcgccgtcgcgtcatcttcatcggcggcggcagagcagccggcggcgaaggctgctacggcgccgaaccggtgcgcggcgtgccggaagaaggtggggctgacggggttcaagtgccggtgcggcggcaacttctgtggcggccaccgccacgccgacgcccacggctgcggcttcgactacaagagcgccgggaaggagcagatcgccaagcagaacccgctcgtcgtcgccgacaagctggccacccggatttgagctctcctctctctcttccatggaatccaacagcagtctgcaaaaccatcgacgagcacaagcaaacattgagtagcaagctcagtgatctgttctgaaacatgtaagattgaatacttgcatgtaatttagtatttgttttcactgaagaaacatgttcccattgacaataatctttatttatgagcc

SEQ ID NO: 10858 - DNA, 678 bp, Oryza sativa
  ref <308>: DATABASE ACCESSION NUMBER: AK108206
  ref <309>: DATABASE ENTRY DATE: 2002-08-28
gaacgagagacgagagacatcgccggcgaaaggagaggagagcagagagtggagtgcaatcgaagctacgtacggccgacgatcatgtcgtgcctgcttggccgggcggcggtgccggtgaagcgtgtctggctcggcctctccgcccgcctcggcctccggcgaaccaccggcctggggaagctgcggaatgaggtgcggacgtgcgagtacagcgacgtgcacgtcatgtgggagatgctcagctccatggacgccgccgcgccgccgcgccacgccgccgccgccgccggcaggaagaggcgtcgccccgccgccaccgccgcgtggagccgccttgtctcctgctgctgctgcgccttctgagaaatgttcatccgattcagagtcgaaaggagccctttgattccttttgccttcttggattataacattcgagaggcagccttcaaaacggaggaatttggatgattttcatggaaaatcagttcaattcacttggaaaaaggataaaattctcgtgttcaaaacggggaagtaggtagtagagcaaagatgtgctatttgcgtttgcgtgtatgtattcatgagttgtatgtacacataagctgctctgcttctgattcatgtacattactactaggattatgctcaatgtacaaaaccaattttgttcct

SEQ ID NO: 10859 - DNA, 686 bp, Oryza sativa
  ref <308>: DATABASE ACCESSION NUMBER: AK108207
  ref <309>: DATABASE ENTRY DATE: 2002-08-28
acggttcatagcaaggacaccacttatactggttagcacaaccgtgatcaagatgcagatctttgtcaagacccttacgggtaagaccatcacccttgaggtggagtcttcggacaccatcgacaacgtcaaggccaagatccaggacaaggagggcatcccccctgaccagcagcgccttatcttcgccggtaagcagctcgaggacggccgcaccctttcggactacaacatccagaaggagtcgaccctccacctcgtgctccgcctgcgtggtggtgccaagaagcgcaagaagaaggtgtacaccacccccaagcgcatcccgcacaagcgcaagaaggtcaagatgtccatcctcaagtactacaaggtggacggcgacggcaacatcaagcgcctgcgtcgcgagtgcccctcgcccgagtgcggcgccggcatcttcatgtcgtggcacaagaaccgccagtactgcggcaagtgcaagctcaccttcatgttcgaggagggcaccaagccccccaccgcctaaacgcggcctccaacacccaccccttgccatgttttaggccaatagcgacgctccaacgccgtttctcgatcgtcccaccctcgccatgacgcatcgagtccgccccatgcagccatggcgtatcggaaatgctcaagtgtcgttctgcatggtt

SEQ ID NO: 10860 - DNA, 900 bp, Oryza sativa
  ref <308>: DATABASE ACCESSION NUMBER: AK108208
  ref <309>: DATABASE ENTRY DATE: 2002-08-28
accatctcctcctcgtcatcgtcatcgtcttcctcctcgcgtcgccgatcacctcgccatggtgccgccggcggcgcacgcgccgaagaacctggggctgaggggggtgcggcgccggctgtggggcaggtgggcggcggagatccgcgtgccgcggggccaccgcgcggccgcgaggctgtggatcggcacgttcccgtccccggcggcggcggcgctcgcctacgacgccgcgctctactgcttccacggcggcgcgccgccggggaaccgcgccttcaacttcccgcacgcgccgcgcctccgcatcgacgaccgccgccgccacgcgctcacgccgggccacgtcagggccatcgccgagaggtacgcccacgacgtcggctccgtcctgttccgcccgctccctccgccgccgccgcccgtcgccgccgccgccgtccccgtgttcgccgcacctgcaccgcccatggcgccggcgccggccaaccatgctgccgatccttactactgcaacgagcctgacaccaccacagacgaggacgtcatggctgcggctgaccgcctcctctccatggacatcgaagaggtcgccgctttgatcgccattgttcagcaaggagagtgaccatatctacaacttcttagctagctagttacaccttctatgtagcatgtgtactatgcacttttgtggttgtgttgtgctgtcctaatggtgtaactagccatatcaaggaagacatgcatgatctagagtctagagtactctagccatggaataaattaacttagtctgtacttggtcatgcaccttgtgtatgatccttgtgtaagagaagtgtaataatcggttcttgaaaaggaactgttgttatatatgagatggatgttgtcatg

SEQ ID NO: 10861 - DNA, 934 bp, Oryza sativa
  ref <308>: DATABASE ACCESSION NUMBER: AK108209
  ref <309>: DATABASE ENTRY DATE: 2002-08-28
cttctcgaaatcgccggccgcaccgtctcctctctccccggccgtcgctgcgcctcctctctcgctggcgcgccacgccgccccagctccggtcgtcgtcctcctggcccctccgcgtccgcgtccccaagcgagcgctcgagctttgctttcaagctctcgctgagctccggagggtagagatgtcgtcctcctccgccgccgccttagccagaggcaaatccggaatctctgccgctaaattcgaagcgtctaagggattgggcgccaagccgaagcgatccgcctccgccaccggcagcagagggaagaccgagaagaaggtctactcgctgccaggccagaaattcgacccccctgaggagagagagcctctcaggatattctacgagtccttatccaagcagataccctccagtgagatggctgaattctggttgatggaacacgggttgttatctcccgaaagagcaaagaaagcatacgaaaaaaagcaaaagcggcaacagcaaatacgatcaggaacaccaattaaacccagcgtaaagaaagacaaaccggaaagttcaaaaaaaccaagctcatataatagttcagattcaaaggcaaaaaaaagagtcgattacagcgatgacgatgacgatttcattgtaaaactgaagagatccaggggatgatagtattcagataccagcatattcctatagcaccaaggctaataaacaggtgctgctctgaggtttccatggcaatggtaacaaccaaatgggttcatgatgattctggtggaacaacatttctgtttattgtcaatattggagtagaaagaaaaatggagatcctttacaatgataaaataaagtcatattggcagcattgtgtcttatgtaaagacaggcactttgtggagctaaagataaataggtttcccttt

SEQ ID NO: 10862 - DNA, 831 bp, Oryza sativa
  ref <308>: DATABASE ACCESSION NUMBER: AK108210
  ref <309>: DATABASE ENTRY DATE: 2002-08-28
accattttcactcactcactcacactgaactcctatggcctccgccgtcgtagccaagccaccggccgccgctccggcgagccgccgccgatgcttcgtcttcgtagagcgcgccgccgccgccgccgtcggcgtcaacgcggcgatcgctgccgtcgatgaccaccgcccagttccggccgcggccgccgccgccatggacgacgtcgtcggccgcgtcgcgcggcctgcgcgccccagcgcgcgcgccatcatggaggggacgcacaagcagatcagctccggcggcgcctcgggcggctactgcaccgtgccgtggtgcagcatctgcaccgggaataacccgttcgccattgccgagttcttgctgtgctgcaacctctgcggcgtccctctcgccggccgccccagcttcatctacattggagagaaggcgttctgcaaggaggagtgcaggtcgaggtacgtggtggaggaggcgctgcgcgaggcgagggaggagaagcgccgcgccgccgccgccgccgccgcgtcgccggagaagaagaaggaggcggcggcggcgaggaagggcggggaggagtgcagggaggggagcatcttcttcatctgcgccgacgacctgtgaagaatgtgatggatatgatgcatcatgcgtgcattgcatggcggatgataatcggagcttggctgtaataataatcgatctccaccataatataatacaatagtaatatacttagtgtactgtaatgaggatgaataaaggggatcaaatcaaggccaccatgcatggctagtcgatatatatctgagtattttgtgttgctc

SEQ ID NO: 10863 - DNA, 1021 bp, Oryza sativa
  ref <308>: DATABASE ACCESSION NUMBER: AK108211
  ref <309>: DATABASE ENTRY DATE: 2002-08-28
aatggaattactagcatatatacatgtgtactgatgtgcatgtgtactagcttcatccatcgtatcgatcgtcgcattgctaattaagcttctagtagttctagattggaggaagctaatatgggagcgagaggaagaagagatcgaatgggcagcgccggcggcggcggggggtcgccgccggtcgtcgtccggcggtacaaccggagcgaggcgccgcggatgcggtggccggaggagctgcaccgccgcttcgtccacgccgtccgccgcctcggcggatgccacgaggcaacaccgaagcgaattatgcagctgatgggcgctaagggagtcagtatatcgcacgttaaaagccatcttcagatgtacaggaactccaacaacagtagcaatgttaaccgtcgtcatcctgtaccccacaaatcgattggacgacgacggcgcagcaggatgaacagcagagacgacagatgagcagcttcagcttccttgcaacaagaacggtgccagcagctggaattgggagccatagccaccagagacctcaccggcggcaagcgctgcacgccggagacgacgacggctgcgagctgacgctgtcgatcagcggcggcgccgctgaagaatcgaaagacggtggctcgagcatcaccgacgacgacgacgagcttctgatccagccaccggcgcctaacatcatcaacgacgacggatcaacgcggcatggtcgtcgtcatccttttgcttgttccacacagccgctgccgccggcggccattaaccttgaacttacgatttcttctccttgctgctggctcacctagaaaatatacatgtactcctagaagctagctagttgtaatattttgctcttactgcaattaattcttgcatacatatgtgtgcaattaacatatagtatatatattccatggttgtacgggattacttgtacctagttttaggacttttggcagtagtttgtatactagattaatggattagttttgatgcttct

SEQ ID NO: 10864 - DNA, 715 bp, Oryza sativa
  ref <308>: DATABASE ACCESSION NUMBER: AK108212
  ref <309>: DATABASE ENTRY DATE: 2002-08-28
gtgattgatcatcacctcattatagaaagtgtctggggaaccatcaatcctcagaaacataaatgataaataataggattgaatccaaatgcaagccctttcatcaaccttgttcatcgacagagaaagatagggaggagggaggagggttgaggtggtgttcgtactgtgtcggcagcggggctggatcacagggcttcgaccggaggtgatagtggtggtcgagtgcggcgtagagttcatcggaggttgggaacggcccgacatcaacatcgcgccccccggaggcgaaatacccacgagaatcgctgtacactcgtacctcctcatcctcacacgggtcccgctcccgccctgctgtcctggacgccatggatggggatggcgccggccgccggccggcggcgggggcgttgccggcggacggtggcgtggcggggactagggcttggtggaatcgaaatggcgcaaggcgaagtggccaacacaagtgactattgggccggaattgggctcggcccatactaaaatttgcatgactggatcgagtcctcttgcatatgatgaggacgatctggtgtcttgctgttccatgagaaatatgcctatcgatcgatttctatttggtttcttaattatgtcgctcgatggagccgcttgattgctacagtgtatttgctaaattaacctaactagcaggagcatggaggagacg

SEQ ID NO: 10865 - DNA, 759 bp, Oryza sativa
  ref <308>: DATABASE ACCESSION NUMBER: AK108213
  ref <309>: DATABASE ENTRY DATE: 2002-08-28
acgtttgcaggcgggcccacctgcagatcgaccatcctcaagctccgaaatcgcaaaacacctcctcgcctccaaatctccaatcgatcagacaagccacgaaaaccctagccttgtcctgccgcgatcgccgtcgtgtcggcgcgtcggacccccgcccccgtttccccgattcgttcttggtctagtttgctgagtgagctgcagcgatggccgcgaaaggtcagccggtgaatgtgcagaaggagcaggtgaatatgcagaaggagcagatgtttggattggcagagaaagagatggaatatagggtggatcttttcaatcggcttacacaaacatgtttcagcaagtgcattgagaaaaggcataaagaagctgaactaaatatgggtgagaatagctgcattgatcgatgtgcttcgaagtattggcaggtgactaatttagttggacagctccttggaaatcagcctcaaatgtgagcttagagatgcaattgctcttattggtagtagaacatcattgtcttccttttttggcatggtagttcggcaaattattgagcacaatgagaggagaaaattgtcagttcctcccatttgtatctttgacatgagtctgcttgaccaacacataatgtttgagatacattccaacctgtatcagtactttcagcttgcagaaaggcggcatctgttggctgctgtcattttttggttggtgagctataaaacaatacagagatggaagtttgcctgc

SEQ ID NO: 10866 - DNA, 1016 bp, Oryza sativa
  ref <308>: DATABASE ACCESSION NUMBER: AK108214
  ref <309>: DATABASE ENTRY DATE: 2002-08-28
actcactcagactcagcttgacacagctcaagccaagccattcatggcggacgccaagatcggtgagctaggtgaggtgggggaaggcgaggtccctggcgagcaggtagcggaagctgtggcggtagggggcccactcgacgaccttgctcgccggcctgctctggcggcaccgctgcaccgccgccctcaggctctccggcaggcacctctgcacggcgtcgacgagcctctccggcgacagcctcgcgtccctggcgtacgactccaccagcttcggcagcgtcacccgctgctccttcctcaccccgaccgtcgcccggatgtactcctccctcgccgcctccagctgctgcgacagccgcttcgggctcagcaccctcacctgccatcgccatgaacacacatcaccaatcatgaattcctcttctactactgtagtggagtatgcttacttcgatgcagaaatgatgatgaacaaagtgcagtggatgcagtgctgctgctgctgaaacattccatggtacaagtttccagcagcagcagctgctaggtaattaaggtaggtagctcatatcgaggtgaagaaatgagaaagaaaagagaggagatatactacttgtcaagtttctttcatgattgtgtcatgtcaggatttgctttgcatggatagctttaacactttgagaaacatgcgtactgtactctactaggattatgttcatgttcagaagttcagaagttcagatttagagtgttcaggaaatggcatgcctagcttggttactgtttctgtcaggtgaaaaaattaagagatgggatggtgtgttctttttttttaccgcgggatcggaatggcttcctgaacaaagcgcaaagcgcaaaagaggctccgattgatggatggcaaaggcttgccattcccctcctgctttgctcgctttgcttttgatccttgggtgaagcaaagtcctcagccactgcttgcattaaaaggatcaacaaaaattccggtt

SEQ ID NO: 10867 - DNA, 836 bp, Oryza sativa
  ref <308>: DATABASE ACCESSION NUMBER: AK108215
  ref <309>: DATABASE ENTRY DATE: 2002-08-28
ttccacgtcgtctatccgcgcggcctccctaggaacgcgtagcaaactttggctacgggttcctcggtcgtaggtaggacccacggcgcgtcaaggatgagagagggaggagagagaacggtcatccttgtgctccacgccgccgatctcgtcggccagaggaggaaggaggactgtcgggcgcaaaggggaagctcaccagccgccgacggggagaaaggagctccgctgtccctcgccgcccaacccgcgtccgtcgtccctcaccacccgacccgcgtccaccgtccttcgccgagctcatcggcccccaccgccagatccacgcactccgtccctcgccgagctcgctcccgccgattcaacgctgctgccaccgaatggatggggatccggccggaagaggaggaggggaggcgctcgagctgccgcgccgcctcgatctgcggcggccagaagaggaggaggaggggaggcgctcgagccgccccaccgaccagcaccgtcgagctcctgatctgccgctggcgtcgtcgccgcatgggccgcccggtgtcggcgttgctgctcaggccgtccgtgccatcgtcaccgtccgccgagccgcttcacgccgccgccatcgttcgccgcgccgcgcaaaggggaatctcaccggccgcgcaggaggaggaaggggaggcgcggcggccggagaataggggaggcgtgcgggcggagatggagaagcgcgcgggcggactgggtggggatcagactgaggatatgggagagagaaatgatttttttttgtgtggctcctatttgaggctacatagcaatgtgagacttgtgat

SEQ ID NO: 10868 - DNA, 1435 bp, Oryza sativa
  ref <308>: DATABASE ACCESSION NUMBER: AK108216
  ref <309>: DATABASE ENTRY DATE: 2002-08-28
tggcctgatcatcgtattcccatcacacccatattaccacaatcatgaagggaaccacattcctcgccaccgcgatcgcggctggcaccgcctccgccggcgtgcacaagatgccgctgaagaaggtcccgctgtccaagcagctggagaacgccaacattggcgaccacatgcacgcgctcggccagaagtacatgggcatccgccccgagaaccacgccgaggagatgttcaaggagacctccatcaagcccgagaagggcggccacccagttcccgtcagcaacttcctcaacgctcagtacttctctgagatcgccatcggcactcctcctcaagagttcaaggtcgttttggacaccggtagctccaacctgtgggtccccagccgtgactgcggctccattgcctgttacctgcactccaagtacgaccacagcgagtcgtccacctacaagaagaacggctccgactttgccatcaggtacggctccggcagtcttgagggctacgtcagccaggacaccgtccagattggcgacctcaaggtcaagaaccagctgttcgctgaggcgacctctgagcccggtcttgccttcgcctttggccgtttcgacggtatcatgggtctcggctacgacaccatctctgtcaacggcatcgtcccgccgttctacagcatgatcaaccagggtctcctcgatgagcccgtgttcagcttctacctcagcgacaccaacgatgagggcgcagagagcgaggccttgttcggtggtatcaacaaggaccactacactggcgagttgaccaagattcccctccgtcgcaaggcttactgggaggttgatctcgacgagatcaccttcggtgaccagtctgcttctctggacaacaccggtgccatcctcgacaccggtacttccctcattgcccttccctccactcttgctgagttgctcaacaaggagattggcgccaagaagggttacaacggccagtacaccgtcgagtgcgagaagcgtgactccctccccgacctcaccttcaccctcaccggccacaacttcaccatcggcccctacgactacatccttgaggttcagggcagctgcatcagctccttcatgggcttcgacatccctgagcctgctggtccccttgtcatcctcggtgacgctttcctcaggaaatactactccgtctacgatgtcggcaacaacgccgttggtctcgccaaggccaagtaaacgcgtcggtgacgacatgagaatgtgacaggatgtatgacaccagggaaggaaatccggcgtccaacattgtgagttggacagggctgttaataggcgctcgggctttgtgaagcagtgtttgctttgctcgtcttgcgtgtagcattaggcatccagattgaatgaatccataagtacgcatattg

SEQ ID NO: 10869 - DNA, 1121 bp, Oryza sativa
  ref <308>: DATABASE ACCESSION NUMBER: AK108217
  ref <309>: DATABASE ENTRY DATE: 2002-08-28
catcaccaatgctgccgacgctgcgacgcactcgcgccaccaatcgaccgatgtggcgcagagcgagggcacctcgtccacaccatcgcccatcgacctctcgggcggcggtgccatgccgcctccgtccggtcccaccaataagatccttacgcccagctccatcatgggcatccgctccagtcccggctcgcaagcacagtcgcccaacagccgtgcatccggcgccgcctccttgtccgcgctcaagggcaaggcgcgcgacgagctacggtcgcagccaccgcagcagcagcagcagcagcaacagcaagcgatggtgcagcagcaattgcagccggaaggcacgggtatggcttcgcagccgacgcatcagatgtatcccaacattgcgccgttcccttcggcagcggcacacatgggtgctgcgcccaaggtgacgttcaatctgccgcagatgggcggtatgccgatccagccgggcggattgtcgcaggcggagcgcgatgcatggctctcgtacaagtcggctggcggtctcgagtcgcggcgtacatcgcacaaggccgccgagcagaagcggcgcgactcgctcaagttctgctttgacgagctgcgcggtctgctccccgccatcacgctcgacgaggatgcgcccaacggctcgttgctgggtcctgatggtgttgaggaggaccgcgaggcggagcgcttcaatcccgccgacgtgggcgatcccgagatggcaagatcggcaaacaaggccatctccaaggtcgcgctgctcaggcacagcaacgagtacctcatccggctcaagaagaggctcgaccgcagagaccaggcgctggctgtgtgcagaaacgagatccacgagctcagggagaaactcggcctgccgccttcggacgatccgagtgtgtccggccgaggtgcaccgctgggatggaccgacgccgatgattacgatgaaggcatgggcaaccattccgcagccatgtccgccgcacaaagcccctccgacgccaaaccagagatggaccagaccgcatgagctcttttctcgttcggctttctttgcttattctagctagaccgatgcaatgcattatctctatctc

SEQ ID NO: 10870 - DNA, 1132 bp, Oryza sativa
  ref <308>: DATABASE ACCESSION NUMBER: AK108218
  ref <309>: DATABASE ENTRY DATE: 2002-08-28
caccccccgcgctgcagcgcacgctccgcatctacgtgttcaacaccttcgccaaccaggcgccgcgcaccatcccgccgcccaagaacgccgagccgcccacctggtcgctcaagatcatcggccgcgtgctcgaggacggcgccgagctggaccccgccagcgtcgtgcccaagcacaaccctgtgtaccccaagttctcgtccttcttcaagagggtgacgattgcgctcgacccgtcgctgtacccggagaacccgctgatcatttgggagaatgcgcggtcggccgccccacaggaagggttcgaggtgaagaggaaaggggataaggagttctccgcgaatatccggctggagatgaactataaccctgagaagttcaagctctcgcagcctctgatggaggtgctcggggttgaggtggacactcgttcgagggtgattgctgccctctggcagtacatcaaagcgaagaagctgcagaatccaaccgatccttcgttctttatgtgtgatccacagttgaagaaggtctttggggaggataagctgaggtttgcgatgctatcgcagaagatatcacagcatctctctcctccgccgcccatcaacttggagcataagattaagctctctgggaatggcgcgcatgcgagtgcttgctatgatgtgattgtggatgttcctttccctctgcagaaggagatgtctgcatttcttgccaacactgagaagcacaaggacattgaggcatgtgatgaggtgatatctgcttcgatcaagaagatccatgagcaccgcaggaggagggcattcttccttggtttcagccagtccccagtggagttcatcaatgcactgatagcgtctcagagtaaagatttgaagctgatcgcaggagaagcaaataggaatattgaaagagaaagacgtgcagacttctataatcaaccatgggttgaggatgctgtcataagatacctgaaccgcaaaccggctagcggtaatgagggcccaggcggtggtgctggtggctcatgaggaaaggggttggtattactgtagtgccattttggtgtagaaacaagctatctgttatgtactagtaaaaattcagatatgttagcgac

SEQ ID NO: 10871 - DNA, 942 bp, Oryza sativa
  ref <308>: DATABASE ACCESSION NUMBER: AK108219
  ref <309>: DATABASE ENTRY DATE: 2002-08-28
gcgcgccggtgcgcagatcatcacggtccacggcagaacacgaagcatgaagggccaccacaccggtttagctgactgggccaagatccgcgcagttaaagaggcggtgggtgtaccggtgtttgcgaacggtaatgtgctgtacccgcaggactggcaggacgcactggagcagactcgtgcggatggcgtgatgagtgccgagggtaatctgtacaacccggcggtgtttatgtcctcgctgcccacggagccgagtgcgatgtttcccaacgcaccgcagttgccgttcccttcgctagcacggatggcacacgagtacctcgacattgtgacgcagctgcgcacgccgacgtcgagcagcgcgatcaaggcgcaccttttccgtctctgtcgtcccggcctcgaggtgcaccgcgacctgcgcgagtccctgggcaaatctcactacgatcacaccgcaacgggcgaagcgcgcatcgcaacctaccgcgcctttgtcaccgagctcgaacgccgtctcaacctggaccgggctgaagacaagtggaacgcaccccaggatccaccgttgccggggtcggtatcgttcttgacgccgcccgatgcgagcaacccggacgtccatcgaccggcgttcatcccgcattggctggcacagccgtacttccgcccaccgctcgtgaccgatgagcaacaggacgatgacgccaaaaaggcgcgcagggagagggtcgctgaaaccgcacagggcaaggtcaaggccgaagcgaagacggcgaggcagaggagccagagtgcagagcctgcgcagggcgacgagaagcgtccgcgcaccacgctgccccacgacacagcaccaccccaggccatgccagcactgtagcccgaatccgacacacacacacatcactggaaatgcaaagcgacatttgcattggg

SEQ ID NO: 10872 - DNA, 643 bp, Oryza sativa
  ref <308>: DATABASE ACCESSION NUMBER: AK108220
  ref <309>: DATABASE ENTRY DATE: 2002-08-28
ctccttctaccgccatgcctccttcgtctcgcctcccacgccgctcctcctcccggtccgccgccgcgcctccttgcctcccacgccgtggcggcacgccggggacgcctcgcgctcctcccccacctcccctcgcgccttcgctccttctccgcgagctcaagaagctcgcaggaagccatggcgagtctcgcatccggccccccatggatgacgtcgtcaccgacgcgtcgcggcttcttcccggacgacctcgacaacttcaccgctccaccgacgcatcgcggcttctcccccgtgacgcctcctcatctcccccaccagggcggcgcagaggcagggaggggtcggcgtggccaggggcgtggcggcgctagccccgccctggagcgtggtggacgggctcggcgtcgacctggccaaggcggagcttggcgtcatgacgcgcgtggcggcggagctcggcggcggccgggaggaaggcgcactcctccttggcgttcttggcggcggcgttcttgattttttttgtgtgattttgtgtgactcttgattttcttctatgattttgtgtctcttgtgtgattcttctggtaatcgccgtgacgatctgtgttcttgattttgcttgctaattttgagg

SEQ ID NO: 10873 - DNA, 2146 bp, Oryza sativa
  ref <308>: DATABASE ACCESSION NUMBER: AK108221
  ref <309>: DATABASE ENTRY DATE: 2002-08-28
agcgccgattctctccctcttcttccccctccgtcgtcttcgtcgtcgtcgcccctgttgccgtcgagatgacacgctcgactgggagactcggcttgctcgtcgggcctctggcgctggctctccagccctgccgggccgaacgggaagcggtccaccacgatgcatcctggcagcccgagtacgtgctggtggccacggccggaaacatcactctcaactgcgagtcccggtactcggttacttacaacggcacatctccagggccgacgctgtacatgcgggaggggaagacgacgtgggtacgggtctacaacaacacgactgaccagaacgtcaccacgcattggcacgggctcagccagaggttggcgcccctctcggatggctcgcctctcgtcgctcagtggccaactgctcccggtgaatacttcgactatgaggtccgcccagagatcggcgacgcggggacctactttctccactcgcacgtactcctccaagccatgacagcccatggtctgattatcgtggagtcggccaaccaaactgagccgtatgagtatgacgccgacatccccatgggcttttacgatttttatcgtcgagaagatggcgatatggtggccggtctctacgccactcctttcaagtgggtcggtgagccagatgctctgctgctaaacgggtactcgggtacagcctccttcagccatgcatccgatgccacgtgccagccctatgtcatcgaggtcgaacccggcaaaacgtatcgtttgcgattcgtcggcggcatgtccctgtcctttgtcttcgtcggaatcgaggaccacagtgaactgaccatcatcgaggcggacgggcagtacaccaagcccgtcacgacggaccacatccagatcgcgagtggccagcgcttcagtgctctcctgagaaccaagtcgcaggaagagctgctcgcccgtgggaaatacaccttctgggtccggtatgagagtcgagaccgacccaccatggtcacgggtcatgctctcgtccggtacaagttgcccgccgccgggttgaatgggccctcttcagtggtggccctaccggaggatcttccatcgtctcctcccgcacacctgacgaccgatctgacggaatatacgcaatggttggagtacacgctcgaatccctggtgccggacaaggcgttcccgaccctcgccgaggtgacgaggactgtatacatcaccatgaaacaagtgattgtcgacggcaactatagcaacggccaaatcagcggcaacgtgcagtggagcatgaacggcttgccctggcaagaagaggtcatggcgcgcgacaaccacgcgccatacctcatcaatgcctttttaacaggcctgacgcccaactacagtgcggcgctagcgaaccagggctgggacccggtgtccaaggcgttcccggcgcgggtaggcgaagtgctcgacatcgtttggctgagcaactcggggtcgacgggcggatgggacacgcacccgatacacatgcacggccaccacggctgggacatggggagtgccaacgggacgtacgacgccgtcgagaatgagaaacgattcgcgaatggctacgtgccggccaagcgcgactcgttgcaactgtaccgctacgcgaaggggggggtgcctcacacgacggcgggctggcgcaccttccggctgcgcatcaccgaggagaacgtcggcgcctggatgatgcactgccacgtcctgccgcacatggtcatgggcatggtgacggtgtgggtgtttggcgaaatcgccgacatcctgaaggagattccgcagccgtacatttctggctacctcgaatacggaggcagcgcgtatggcaatgcctcgttcgacccgctagtcatgtcgtatttcgactgagtggtgacgaaggcctcttctggagcacaggagttcgaggtgcgccattccgtggtctagcgtatccgacgcacagtagggcgtagatgcggcttggtctggtccgaggggggggggggagatggttccttcatggccagcctcatgtcgtcttgcgacagggtatgatgtatcttggactggtagcggccgtagtattgtgaatctcagatggaatccaaccc

SEQ ID NO: 10874 - DNA, 918 bp, Oryza sativa
  ref <308>: DATABASE ACCESSION NUMBER: AK108222
  ref <309>: DATABASE ENTRY DATE: 2002-08-28
gactaaattacctttgcctaatcagcggggccgtccaccgcatcaccaacccttcaatccaactcgcctcttcctcctcccctacgacgccgggaaattcctccgctccgcgcctcgcctcgccgcctcggcatccgcgcccactcgtcgccgcctcgccgccgtcccttcgcgtgcgccggcgcgcggcggcggcggaggccgcctggggagcgtttccgcgggacgcggccagactgcaagggaaacaatggcgcgtagtatgaggacatgtttgcacagtggaagacttgcgcttcttgcaatactggtttctggtggaattgtattgcagattctggcctgtgctctgtataacaactggtggccaatgctaacagttcttatgtacctcatactaccaatgcccctcatatttttcctgggctccaacagcccctcaatgatgtctaatgatggcgatacttgggtgagcttcacaaaattcttgacgggcgcatcgatagtggggagcatcgccatcccgtcgatcctgaagcatgccggcgtcattggatggggagcgctcacgatggagctatcttctttcctggtctttggcgtcgcgatcctgtggctgattcaaatgaacagcgaagacgagtacagcagcgcgttctgatcgatcggtacgccccttctcttgcccgcgtggttaataccttgcgatgaagcagccgtaaacttgtgtacagatactgtcgaagccttggctcctgtggtcccattcagtagcgtgaacccttacatgttcagattgcatgtacaaatttgaaattcggtgtaagatggtttggttatgtcctccggctgatttcaacttgaatcatgattagtttttgtgatttttgtcggtatgagatgttgatggacactaag

SEQ ID NO: 10875 - DNA, 988 bp, Oryza sativa
  ref <308>: DATABASE ACCESSION NUMBER: AK108223
  ref <309>: DATABASE ENTRY DATE: 2002-08-28
gagccgctgctgctgcggtagctagcttgcttgccgttcgttcgtgtgtgtgtgcgtgtgcgtaagcttaagaggttgattggctaagctagcaagccggccgcatggcgacttccggcgacgtcgaagaggtgccggagccgggcatggatcacccggctgagccatgcatgggcgtcggcggcgaccagctggtgccgacgacggaggaaataagcctcccgctggcggccgagacgacgtcagatcaccatgaagcggcacagctggagcagtccgcggagacgtcgacgtcagagtcggaatcagaggaggtggccgccaagacgacgtccgattccagtgaggcggcggcggttattcccaagcacgccgcggagggttcgtcgacggcgtcagaggaggagcaggtagcgaagaaggagctgaaggaagccgaggaggacgatggcctgcagggcgagagcgcgcgggagaggctgaagcggcacaggcgggagatggccgggagggtgtgggtgccggacatgtgggggcaggagaagctgctcaaggactgggtggactgcgccgccttcgaccgcccgctcgtgccgcccgacctgctcacggcgcgccgggcgctcgtcgccgagtgctgcgcgcgccgcccggaccggacgacgacgccgcccggaccggacgacgacgccgcccgccagatccagccctctccgggtgcaaaaaagctgctcctgattatcgagcttgattactagcagcgcttcaattcgcctccagcttcactagccatattagctagccgcgtgcatacgccttctttttttgctcaaataagagatattacccttcttgtttccgagttgtgagggtcctttttttttcctgttctaaacttctaattctgatgatagtgtgaattacatttactgatttacacatatatgagctttccctgcataaagaaagggttttgtcatgtatatat

SEQ ID NO: 10876 - DNA, 650 bp, Oryza sativa
  ref <308>: DATABASE ACCESSION NUMBER: AK108224
  ref <309>: DATABASE ENTRY DATE: 2002-08-28
aatagggagtcgggaccgagcacgcaacagcttgcgatggagtcaccgccccgtcctcatttctcccccccctcctcatacctagacagagagcgaagccagaggcgatggtttggcgacgagctcgacggagagaacgacgatgagctcttcaatccctggccaccgtcttcaatcgtcgccgtcccgcaccttcttccgccgccggccaccagatccgggagggtagccggtagcgagcagtggggaaagagagggggctgcagcggtgaccagcgcagcgagtggaggacggtggcagccagcagagcgggtggaggacagcgacgaccagtgaccggcgcagcgggtggaggacgacgacgaccggtgcggaggaggagggttgcggcgatgaccagcgcagcgagtggaggacggtggcagccagcatagcgggtggaggacgacaacgaccggtgcggaggagggctgcggcgatgaccagcgcagcgggtggaggacggcgaccggtgcagcaacgattagtgcggcggcgggaggatgacatcgacgagaacgagatgcacattttttttcttttctttctttttatttttttccctcacctgttatagcgtatataaagcggcgaattattgatcgttggc

SEQ ID NO: 10877 - DNA, 1141 bp, Oryza sativa
  ref <308>: DATABASE ACCESSION NUMBER: AK108225
  ref <309>: DATABASE ENTRY DATE: 2002-08-28
tcaagccggagaacctgctgctcgacgaggccgggaacctcaaggtggtcgacttcggcctcagcgcgctcgccgaccacgcccgcgccgacggcctcctccacacgctctgcggcacgccggggtacgccgcgcccgaggtgctccgcgacaagggctacgacggcgccaaagccgacctctggtcctgcggcgtcatcctctacgtgctcctcgccgggtccctcccgttccccgacgacaacatcgtcaccctgtaccggaaggcccagcgcggcgactaccggtgcccggcgtggctgtccaccgacgcgcgccgcctcatccccaggctgctcgaccccaacccgaccacccgcatcagcgtcgcgcagctcgtcgagacgccgtggttcaagaagacgtccatctccaggcctgtgagcatagagcttcctccggcctttgccgatcctgctccggctaaggaggaggccgagaaggacgagccggagacgctgaacgcgttccacctgatatcactctcggaggggttcgacctctcgccgctgttcgagggggactcggccaaggggaggcgggacggtggcatgctgttcgcgacgcgggagccagcgagcggcgtgatctcccgcctcgagggggtggcggcgcgcggcggcggccggatgcgggtgaccaagagcggcgcccgcggcgtgcgcctggagggcgcggagcgcggcggggccaagggccgcctcgccgtggccgccgacatcttcagcgtggcgccctccgtcctcgtcgtcgacgtcaagaaggacggcggcgacacgctcgagtaccgctcattctgcagcgaggagctccggccggcgctccaggacatcgtctggggcgccgccgccgacccaacgccgaccgccgccgtctgatgccaccattgttagcgtccaaagtcattgtgtcacagtagccgatgctgttcttcctcctcctgtgcttgattcgatagcgacgtgcatgaactagtatcgctgtttgggtggtgggggcagttggcaagaacaaatctgtatctctgcctcaaaagcaacagcatttttttttcttttgcacaagttgcaattgtttttgtgatggtctttgcttacatctg

SEQ ID NO: 10878 - DNA, 1089 bp, Oryza sativa
  ref <308>: DATABASE ACCESSION NUMBER: AK108226
  ref <309>: DATABASE ENTRY DATE: 2002-08-28
gaaagtgtcgtgatcttttttttcttcatttttggtgagtttgttaagtttcgtggcgattttgcaggtgggatttggatttggatttggattggcggcgatgctgcggaggatggtggtgtcggacacggacgccggcgtcgatcggcggcgtccggcggttcatcggctcggtctcggcgagcgagatcgagcagtcggaggactacacctgcatcatcgctcgcggccctaatcccaagacgacccacatatttggggactgcatcttggagccccagacgatggacgcctccgcctccgccgccgccatggatgtgacggaagcacccaccgagtcctactgggtggtgaagtgcgacgccggcgccgccccggcctccggcggcggcgacttcttgagctcctgcttcacttgcaagaagaagctggagggaaatgacatttacatttaccgtggtgagaaagcattctgcagcgccaattgccgggaccaacaaatcccgatcgaagaggaagccgagaacaacaccaccatcgtctcctccccgccctcatcctgctcctccctccacgaggacatcttcatggccggcatgttcgtcgcgacatgacctgacccttcccgtggcctggaccgaccgattgaacctgtcctcgcctccgcaagttgtccaaatttttttccccctggtcttctaccaggggatagatcaagatgatcgaatcaccagctcacattgctatctatcatcagtctgttgtttttgattcagcaaactgaagaagaagaagaagccaatgttcttggtgggtcattatcactggagacgatgagcttttttcttttactggacctggaaacttgcagagatctgggctttttagagaaaagagaggtcgcctgcctgcctttagtgattttagtcgtgtagttttgatcctaaggctgctggccagtgcccacatccattttttttcttccttttctttcttcttcatttcttgctctttggcagcagtgacaatgtctgcaatattgctacactacttctgctgtgagataatgacattgagctgctttaggtc

SEQ ID NO: 10879 - DNA, 864 bp, Oryza sativa
  ref <308>: DATABASE ACCESSION NUMBER: AK108227
  ref <309>: DATABASE ENTRY DATE: 2002-08-28
attttttttagctcgtcattaagagcgaaagaaagttacttggaattctttggtttgttgtaatgacaatcacgagagaagaagcggagagcaaggagatggagagcctacgggtgcacgccagcgcgctgctctcgctgtcgtcgcctgcagcgtcggcgtcgcagccgacgtcgtcgtcgtcgacgacggagggggtgttcgagtgcaagacgtgcagcaagcggttcccgtcgttccaggcgctgggcgggcaccggacgagccacacgcggctgcaggcgaagctgctgagcgaccccgccgcggcggcggcggcggcggccgagagggacagggcacgcgtccacgagtgcgccgtgtgcggggtcgagttctccatggggcaggcgctcggcggccacatgcgccggcacaggggcgagacgggcacgacgaccgtcgtgctcgcggacgccgacgactcgggcggcgccaccgtgccgcagccgccggagcccatgccggacctgaactacccgccgctggaggacgccggcgacggctcggagcctgagttacttaaccttcttgtataagttgcatcgatagatatacatgtgaattgaattggcgtctgtacatagatatggtggatggattctttaccaaatttgatcgaaaaaaagaactaaattttggagcgtgatgatcatagcatgtaagttgtaacaaatgattgttaactgtaagataggaattctattcatttgttctcttctgtacaaaattacaaataggttgattaattagttggtcggttgtggttgattctttgtaaaataccaatttactagtataaatatactgacagcttattgtttc

SEQ ID NO: 10880 - DNA, 819 bp, Oryza sativa
  ref <308>: DATABASE ACCESSION NUMBER: AK108228
  ref <309>: DATABASE ENTRY DATE: 2002-08-28
attgagtcggccttgttggtactggctccctcccttctctttctctccttccgggcgcctcccccacagcagcgagagatcgagcgatgagagttgggcaacgaggcagccgcaggtcgctcgtcgccgccggatggcgccctccctcctcgcagccgcagccccagatggcgccctccctcctcgacgccgcctcgcccttcctcctctacggcgccgccgccgccggtggcagcagcaggctgctcgccgccgccaccaccggtcaccgtgccgcctcctctctccgcgtcagcgcccttaagtactgccggatctacaagccctaccaccggatctagaagccccggagctccggtcgctgcctccttcaccctccgccccaggtcgccggtcgcctcatctccaccatctcgagctcctgggcatcagatccggtctctatgtggttggggaccaccggatctggtcacccccatgctccggccaccgccttcttcgtctactccgccgccatcgtctcttcgtctactccgccaccgagctcgggtcgccgtcgcctccatccacgtagtgctgaccgccgtttcttcgtcttctccgcgcccaagctgatggcaggtggaggcccattgttctgttcatgatggacgattatgcttgccttccttgtgttgttcatgttgctactgtgattgatgattctgcttcttgttgcgattgtgattcctgtgatttgtaattgggacaaatgtaatggagacgagaagaattgcgatgatttttttgatttgtgaatgccagatgtgatttgtgatt

SEQ ID NO: 10881 - DNA, 1146 bp, Oryza sativa
  ref <308>: DATABASE ACCESSION NUMBER: AK108229
  ref <309>: DATABASE ENTRY DATE: 2002-08-28
atttagtgcagagacttgttaatgattgtaatattcctactactagctagttaagtataagcatgatacattgcacattatacttcatatatagtattataattagcttatcttgtcgtgtgtttatgccttgatgcaagctatagctcctggctctgaaacaatagttttaagaaatatataatttatggcgtgcaactcctattcttagaagtgtccacctgccaccgccatggcacgtgcgtacgtgaaactgacgtaatattgagctggcagaagtagcagagcaactagatagaccagcagcacccacatggatattggtgggcaacgcatgcagcttaattcaacgtgcatgatgccacttgtgatatctagctacttgctcaacgtccaaaagatgcaaaacttgttgtatgatatgatgctgccatgattggcttatcatttgatgtaatagtccccgttgtttatcttttctaatgccatgtgtatatatgattctgtcagtctggaaggatgtattacctgaacaggaagaccttgaagaaaagctggatcaggcccaaggagcagagcgtgaacctggagctcaacatctcgactacccagccaaccgtcgtcgtcgtccccatcattatcgatggaggaagcaccggagctgctgctactccagttgctgttgctgttgttgcagaggagacaaagaagggtggcaccatcgtcagctctggacctggaggcaacatggtggccgtgccttgtgtcaattgccacctcctcgtcatgctctgcaagtcctccccatcctgtcccaactgcaagttcgcgcagccgttggcgccaccgccgccggccctgccgcaccgcaagctcgacgccgtcaagccgctggagaccttgagccttctccattagggcagtctagctagcagttggtgcttgcttgcttgcatgcatgcccccgtgctcaaagggcaggtggctgtagaaagaaaaaaccctagtagcacgtgggcaattagtactgtttgagggaaggactattgatcactatgttaatccagggactttgacatagaatggtgagggtgaggaggaggcaatataaatgtattattattaatcaatcaattagttaatagt

SEQ ID NO: 10882 - DNA, 1177 bp, Oryza sativa
  ref <308>: DATABASE ACCESSION NUMBER: AK108230
  ref <309>: DATABASE ENTRY DATE: 2002-08-28
acactgcgatccccatccatcttctccgcacacgctacactcctctcgatcgatcttctcctcccgtctcgatcagctgattcgcccagcctccggtagcttgcttgtgcttcgtatccatggatcctcaccacagctcccacgtccatgccggagccgccactcctaactgcacgtgcaggttgcccaaggaggaggatctagccgccgccgtcgtcgtcgtcgacgtcgaggcggctcctcactacacgtcgttgaaggcggccgaggccgacgtcgtcccgagaggagtcggcggcggcggcggcggtggcgaaggggacggtggcgaggaggtgaactacatggcccgcgcgcagtggctccgcgccgcggtcctcggcgccaacgacgggctcgtctccgtggcgtccctcatgatcggcatcggcgccgtgaacgaaaacaacaaggccatgctcgtgtccgggctggccgggctcgtggccggcgcgtgcagcatggccatcggcgagttcgtgtccgtgtacgcgcagtacgacatcgaggtgacgcagatcgagcgcgacggcgacatcgacggcgccgatgccgcggccgcgagggagaaactgccgagcccgacgcaggccgcgttcgcgtcggcgctggcgttcgcgatcggcggcctcctgccgttgctgacgagcgggttcatcaagccgtggggccccagggtcggcgtcgtgtgcgccgcgagcagcgtcgggctggccggcttcggcgccgcgggcgggtacctcggcggcgccaacatggtgaggtccggcactagggtcctcctcggcggctggctcgccatgctcatcacctacgccgtgctccggctgttcgcgacgatctttcacggcatgaacatctcgtcgtcggcgtgatgatgcgtgtgacgcagaaatcgatctatctggagatgaaaaagaaaataatcaaggggttgtgctagctagctgtttaattaactactcttggtttgccagtagtactgtacctagtggctgattattaactagcgaatccctggataccgaactgggaataatcagggggtgtaagtgtaatggttgttgtgaatttgtgatgaggcaagaccaggcaaatggtctcaaatgagaatattggtgttaattattgtataccg

SEQ ID NO: 10883 - DNA, 789 bp, Oryza sativa
  ref <308>: DATABASE ACCESSION NUMBER: AK108231
  ref <309>: DATABASE ENTRY DATE: 2002-08-28
gtgctagttgttctcgtctccttgcagaggcggaacacccaacagacgcagctctctaatggaacagaaggagtcctcgctgatcatcgcggttgatctctgttgctgccgctccctcacaaagatacggaaaaccctgtgcaagttgcaagagagtgaggacatcagggcgatcatgtatgacgacaaggccgggacggtggcgatctccggtggtttcgacccactcgtgctcccctgcaagcttcgccgcaaggccggtagcgtgatcaaggacatccacctcaagaaggagagagagaagaacagggtgccgccaccgccgccgccaccaccacctcagccggcgcccgcagccagggcggcgttcggcaccatatgtggcgccggggtggcgccggggcgcgcctgcctctgtctcggtcagtgccgctgtcactgcgggggaggctacggctgccgctgctgcggcgcggcaccgccgtgctactgcgtgccgatcggaggaggaggctgctccgtcgtccagttcacctatgatgaaccatctcctgcttgcagtatcatgtgatggatgacgcccgggtgatctcgtaattccatcataaatttgggagaagacaatactaattaaagaaataagatatacctttagtagaagctttaatttacatgtaagtacaatataatggcgagtacaaatttcatgtaatttgcatttctgcactacactgttatatgcctttcccataaaaaaaagaagaatatcattgtagagttggaccagtg

SEQ ID NO: 10884 - DNA, 1118 bp, Oryza sativa
  ref <308>: DATABASE ACCESSION NUMBER: AK108232
  ref <309>: DATABASE ENTRY DATE: 2002-08-28
aaaacaagattcacagaaactaccatcaataacaggactcctgcacttcatacatggccactgccagctctataaacaagaggtttagcctcgccggtgccacggcgcttgtcaccggtggcagcaaaggcatcggccgcgccatcgtggaagagctggcgagcttcggcgcgacggtgcacacctgcgctcggaaccaggcggagctgagcagatgccaggaggagtggacggccaagggcctcgccgtcaccgtctccgtctgcgacgtggcggtgcgcgccgacagggaggcgctcgccggcagggtgtccgccatgttcgacggcaagctcagcatcctggtgaacaacgctgggacggcgtacctgaagccggcggcggacctgacgccggaggagacgtcgaggttgatgacgaccaacttcgagtcgtgcttccacctgagccagctgttctaccctctcctcaaggactccggaagaggcagtatcgttaatatctcgtccgtcgcttctgtcctcgcgttccattctcttcctatctactcggctgccaaaggagcaatgaaccaagtcacaaggaacctggcttgtgagtgggcgagcgatgggatcagagtcaattccgttgcaccgggctacatccagactccactcctaactgccttcgtggccggcaacgatttcgcacaggttgagttcaaccgtcttcctttgggccgtctcggtaaacctgaggacatctcgtcgttggtggcgttcctgtgcatgcctgcggcctcctacatcactggccagattatatgcgtcgatgggggccgtatgctttcttaataaactctacatatacaaaataaagatatatcatgtatcataatatattctactgaattgggagacttccaagaagaatgaaatctttgtgtgcccgtgtaccaaccacacacaacaggctagctagtcttctctgcatgcgtagagcatagactgggtgtaatgtgtaaaatggccaatatatatttgtattaagtttgggaaatcatgtggagaagattggcaagccgagtgtaatgaattttccatgaaataaaatttacggttcctatgattattgat

SEQ ID NO: 10885 - DNA, 788 bp, Oryza sativa
  ref <308>: DATABASE ACCESSION NUMBER: AK108233
  ref <309>: DATABASE ENTRY DATE: 2002-08-28
aaactcctccagagctcttgccatggcccccaaaatccccatcttcttcttcctcctcgccctggctgccggcgtgcagggtgagaccggcggtgtcggcggcggcggaggcaacgtggagtacaactgcgtgtacaccgtgttcgtgaggacggggtccgcgtggaagggcggcacggactcgacgatcggcgtggagttcgccggcgcggacgggcgcggcgtgcggatcgccgacctggagcggtggggcggcctgatgggcgccggccacgactactacgagcggggcaacctggacgtgttcagcggccgcggcccgtgcctcccggcggcgccgtgctggatgaacctcacctccgacggcgccggcgcccaccacgggtggtactgcaactacgtcgaggtgacggccaccggcccgcacggcgggtgcgcgcagcggcggttcgacgtcgagcagtggctcgccaccgacgcctcgccgtaccggctcaccgccgtgcgcgaccagtgccggggccacgccgcggcgtgacgccaccgcggtggcgcgagcgcaccgctcgccggcggtggcttggcaatagtaataacgtaaataaaacggagagctgttcacgtgtgtaggcttacgaatggacgcgtgctcacaggcgtcgatctgtttgagttggctcttgtctccgaactctgttctgcttgcacttcctttgcttggcctgtgcccactggataaccaacagcatgatcagaaaaattacggcaataaacacaaacaaggattg

SEQ ID NO: 10886 - DNA, 570 bp, Oryza sativa
  ref <308>: DATABASE ACCESSION NUMBER: AK108234
  ref <309>: DATABASE ENTRY DATE: 2002-08-28
ctcttcctgcgcgcgcccgacggcggcggcggcgttcgcagatgcgtcgagtgcaacgccgtcgccggcggcggcggcggcggcggcaggcaggtggtgcgggcgtggtcgtaccagtgccagacgtgcccggacagcgagctctgcctcgcctgcgcgctcggtcgcgacggcgtcccgccgtgctgctgctgtggccaatgcgtgtgcggcggcggctgcttcgtcggctgcgccgggttggcgggcaacgccatgggacacttcatccatgagctcttccgtggatgcactggacttagtttcaagtcggcgatgggcactgcaagaccaccagcttgaattaatacgtattcatcatctcttaattgctcttcttcttgtgccgtgcaaataatgtataagagatttttgcttcgatctagcaaaaagtatctcgatgtatcgatactaaatcatttctgatcgttggatctaactaggcgggatggatgttagatccaacgatcggaaacgatttagtaccgtgagatgccggtagcttgagatatttttgttttttatcagagt

SEQ ID NO: 10887 - DNA, 774 bp, Oryza sativa
  ref <308>: DATABASE ACCESSION NUMBER: AK108235
  ref <309>: DATABASE ENTRY DATE: 2002-08-28
acagctgctgcgactaccaccaccaccaccaccaccacactctccactccacccgcacacccacactagcgcaaccatgttggcccagaggatcgcacagcagtccctcaggcggctggccgcccagacgcctgccagcaggttcgcggctcctgctgccattgccatgggcaccgccttcaccacacagcgcagacacgccgccaccactcccatgagcccgacccaggcctccgacgagatcctcgcaaagcagcgcctcaaccgccccgtcgctccccacctcagcatctacaagccgcagattacctggtacggctctgcgctcaaccgcgtcaccggcgtcgccctctccggcggcttctacgccttcggcatcctctacctcatcgcgcccaccgtcggctggcacctcgagagctccgtgctcgccgccagcttcgccgcgtggccactcgccctcaaggtcctcaccaaattcaccatcgccatgcctttcacctaccactcgttcaacggcttgaggcatttggcctgggacaccgcgagcatgatcaacaacaagcaggtgcagcagacgggttggtttgtcgttggtcttagtgttgtgagctcgcttgcgctggctttcttgtaggaagggagatgggattttgaactctgtacatggtagaatgtgattgctcttttttttgtacatgcaactggaaggctggagtgctgtttcatgtggcatgcttagaaagaggctatgtactgactctcgtgcaaacg

SEQ ID NO: 10888 - DNA, 832 bp, Oryza sativa
  ref <308>: DATABASE ACCESSION NUMBER: AK108236
  ref <309>: DATABASE ENTRY DATE: 2002-08-28
aacaaattgcatttcttacatttggactcactcacatcctaaaaactgatcctatcatcactacagtcattcacacgaggacacgcaacgccaaagctcctcaatcgccggcgaccttgtccggttcaggcgacacgtccgccgtcaccggcggcggcgccggcctgaccctcctccgcgtggcgagcacggtcatgccgccggcgaggcggaccgtgtaggtgcggtcgttgcggatggtgaccgtgccgccgcccacccacgcgccgttccggagcacctccaccgccgtccccggcggcagcagcggcggcagcggcgtctccttcttcttcttcttcgccttcttgctccccgccgccgccgccgcttctccgccgccgcgcggttgctgcgatcccttcgtcttccacggcggcgggctcttcttcctcgccaccatagctcgcgatcgatcgatcgcgagctctgatcagtgaaaaatcaatggaggagacgagggggctcgtggatttcgtggagtatttgtaggcggcttttgctcgctctcgcggggtgaatcggagtccgactcggattgtgttggacgacacgttacgtagcgctacgctacgtaggaacgaacgaacgacgcggacgcgcgctcggtagatcgatgctaccgactcttgacacgatgtacgtgacgggcaaagccaatgccattaagccagccgtgcactgcaactggttggtacatgtatgccacggacgccatggcgacgaactccgacatttctgcaagtccgagttgtcgctgctgtcgtgtacaaggcacgtaggtttttgcttc

SEQ ID NO: 10889 - DNA, 1874 bp, Oryza sativa
  ref <308>: DATABASE ACCESSION NUMBER: AK108237
  ref <309>: DATABASE ENTRY DATE: 2002-08-28
acagcgcagtgccgccatggagagcatcaacgtagcaccaggaacaaccgctacgcctcgcatggcgccgccgccgccgccgccgtgcatcaccaacctccagagtacccttcgctacaacaacctgctcttgcaccgcaagacgaaggggtggaagccgcggaacgtgtcctgcagggtcgaccgccgcgacgtgctcctcggcatcagcggcgcggccgccatggtggccacgcagggcggcggcggcgcgctcgcggcgcccatccaggccccggacctcggcgactgccaccagcccgtggacgtccccgccacggcgccggcgatcaactgctgcccgacgtacagcgccggcaccgtcgccgtcgacttcgcgccgccgccggcgtcctcgccgctccgcgtgcggccggcggctcacctggcggacagggcgtacctggccaagtacgagagggccgtgtcgctcatgaagaagctccccgccgacgacccccgcagcttcgagcagcagtggcgcgtccactgcgcctactgcgacggcgcgtacgaccaggtcggcttccccggcttggagatccagatacacagctgctggctcttcttcccatggcacaggatgtacctgtacttccatgagaggatactgggcaagctgatcggcgacgagacgttcgcgctgccgttctggaactgggacgcgccggacggcatgtcgttccccgcgatgtacgccaacaggtggtcgccgctgtacgacccgcggcgcaaccaggctcacctgccaccgttcccgctcgacctcgactacagtggaaccgacacgaacatcccgaaagaccagctgatcgatcagaacctcaacatcatgtaccgccagatgatttcgggagctaggaaggcggagctgttcatggggcagccgtaccgcgccggcgaccagccggagccgggggcgggcaccgtcgagagcgtgccgcacaaccccgtccacagatggaccggcgacccgaggcagccgaacggcgaggacatgggcatcttctactcggcggcgcgcgacccggtgttcttcgcgcaccacggcaacgtcgaccgcatgtggcacatccgccgcggcctcctcttccccggcgacaccgacttcaccgaccccgactggctcgacgccagcttcttcttctacgacgaggaggcccgcctcgtccgcgtccgcgtccgcgacaccctcgacccgtcggcgctgcgcttcacgtaccaggacgtgggtctcccgtggctgaacgccaagccgtccacgggagcagccagcacgccggcgcccgcggccggcgcgttcccggcgaccctggacaagaccgtgcgggtggccgtgacgaggcccagggcgtcgaggagccgcgaggagaaggaggaggaggaggaggtcgagatccccgaccactccacgtacgtcaagttcgacgtgttcgtgaacgcgcccgagagcggggacggcgcggcgacgtgcgcggcgacgtgcgccggcagcgtcgcgctggcgccgcacgggatccaccgcgaggggcagctgtcgccgaggaagacggaggcgaggttcggcatatgcgacttgctggacgacatcggcgccgacggcgacaagacgatcgtcgtgtcgatcgtgccgaggtgtggctgcgattcggtcaccgtcgccggcgtcagcatcggctacgctaagtgaagcacaacgtgaaccgtggacgtatatttatcatctatacatgtgaacccagatggagagacggatttgtgtttgatatgtgtgtgactaatgattgtatacaaaataatgccagtaatataatgagcatggatgatattggctt

SEQ ID NO: 10890 - DNA, 1442 bp, Oryza sativa
  ref <308>: DATABASE ACCESSION NUMBER: AK108238
  ref <309>: DATABASE ENTRY DATE: 2002-08-28
aaccacctcgactctacaagatgatcgctggatcgttcacagcttccagactctctagggggagcctttcgggcatcggccgcctggcgctgcgtgtgcccgcagcagcacgttgctacaccgccggcagcctcaagatcaatgcggaccgaatgatgaagacgctgcacgagacgtgcgaatggggcgcagcgcaccgatacggggacggaccattcgagacgggtatggcgcgtctgacgcttgacaaggacgacgcgactgctcgacgctggctgtggaaggaggcggagaagctaggctgttcggtggacgtcgacgagatgggcaacatgtttatgatccgcaaaggcaagaaggacggcaggccaactgcgatgggtagtcatctggacacacagccgacgggcggaaggtacgacggcatcctgggcgtgatggccggactggaagcgctgcgcacgatgaacgaccacaaggtggagaccgagtacccagtggcgctggtcaactggaccaacgaggagggcgcacgcttcccacagtcgatcgtcggctcgggtgtgtggtgccacgatgtgccgctggagaaggcatggaatctgcaggacgtgaaggatgcgtcgctcacgatgaagtcggagctcgccaagatcggcttcctcggatcgacgcggtgcagccacgaagccacgccactggcggcgcactttgagcttcatatcgagcagggtccgatcctggaagcgacgggcaagaaggtcggcatcgttcagggtggacaggcgtacaagtggtttgacatcaacgtgcgcggtcgtgaatgccacacgggatccacaccgttcgacacccgctccgacgccatgctgtgcgcatcgcgcatcattgtcgagagcaatcgcatcgccaagcagcacaaaggtctcgcaagcacgggcatcttgcgcctctcgcctggaagcgtcaacacatgccctggccacgtctttttcacactggacgttcgacatccttcgacggacaagctcgcggcgctgtgcggtgagatcgaagcggcggcgcagcgaatcgcggccgaggagagcgaaaaggggtgcagcctcgagtgggtcgagacgttcgacagcccagcgatcacgttccaccgcgactgcatcgacagcgtgcgcaaggcagtcgaggccaactacggcagcgatgcaggcgttgacatctacagcggcgcaggccacgatacatgctcgaccagcaaggtgtgcccatcctcgatggtcttcatcacgagcaaggagggcatctcgcacaatccgcgggagtattcgtcgccgcaagactgtgcgaccggtgcgcaggtcctcatggatgcagcactgctgtacgattcgcagcgccagcaatgaagtgcgcgggaaggaaaataagccccgctcatcagccac

SEQ ID NO: 10891 - DNA, 791 bp, Oryza sativa
  ref <308>: DATABASE ACCESSION NUMBER: AK108239
  ref <309>: DATABASE ENTRY DATE: 2002-08-28
cgcatccaacctccgaactagcaatagaaaattccaacattttcgccaacattaattcccatgggattgaagctttcttgcatcagccggcgacgcggctcgccggtgccggcgccggccagggtcatcgccgccgacggctcgctcaaggagctccatgcggccgcctctcccgccgtcgccgacgtgctccgcggcgagggcgagtccttcttcgtgtgcaactccgacacgctctacttcaacgagcagccgccggcgatggcgccgggggaggcgctccggccggggcagatatacttcgtgctcccggcggcgatgctcgggcagccgctgtccaccgccgacatggccgcgctggcggtgcgcgcgagcgccgcgctcgctgccgtcaaggcgccgcgccgccgaggggctcgccgcggcggcgacaggaagatgaagacggtgcgcgtcacgccgctgcgggacgagggcctcgacggcggcgacgtcctgctccacgagaagctcaacgagcggactctgggtgagttcccggcgtcgtggagcccgccgaagagcggcggcgagaagctcgccgcggcggcgcggtcgcggttgaagcgcgtgctgagcatcatccaagaggatgcataaatattcaattttttccacttcttttttggggaaacaattttttttcagaagctcgaagcccaatacatgcttaaagctttaattaatacttgctctgtttcagaatgtttcaaaaaaaattgtctcgggttcttcttatatcgcaagaaagg

SEQ ID NO: 10892 - DNA, 1186 bp, Oryza sativa
  ref <308>: DATABASE ACCESSION NUMBER: AK108240
  ref <309>: DATABASE ENTRY DATE: 2002-08-28
acgaccaaaccctaacccgcgatccgcctccgccgccgccaccaccaccacccacccggatccccacctccctccccgatctcaccacctccgtataaaggcggctcggtttgaaaaatctttgcctccggaggaggagggggggatggctgccgcggcggtggatccgatggcgctggggctggggacgagcggaggaggaggaggaggcgagtcggcggtggggggtgatggggcggagccggtggatctcgtcgagcacccctccgggatcgtccccaccctccagaacattgtttcgacagtaaatctggactgcaggttggatctgaaaaaaatcgctctacaggctcgtaatgcagagtacaacccaaagcgttttgctgcagttatcatgaggataagggacccaaagacaacagccctgatatttgcttcgggaaagatggtttgcactggagcaaagagcgaagaccattcaaagcttgctgcgaggaagtatgcgcgaatcgtccaaaagcttggcttcccagcaaagttcaaggatttcaagatccagaacattgttggttcatgtgatgtcaaatttcctattcgcctggagggccatgcttattctcatggcgcattctctagttatgagccagagctcttccctgggctgatttaccggatgaagcagccaaagattgtgcttctcatttttgtctctggcaagattgttctcactggagctaagtaccgcaaagagatttacgctgcctttgagaacatgttcccggtgctcactgaatacaggaaaactcagcagcgctgagggaatgatttgtcgacagaatggggagttcgctgccgctgtacataccatcttaaggacctggctgccaagattttgagacatgcacctggcgtcattcctttttctttcctttgttcttcgtagcagtagggtaggagagcaactgcgtaaaggagagtatgtaaacaagttgatcaaagtattcttttgataaactaatgctgacatgcaagaaatgcatcctgacttgagatcatgtgttgtgtgcctgcgttctgaattgtaaagtacagtttgattgtgagagaagtggtactccatacgaagtatggaaaatatcacattcttctctctccatgcaaagcaagattcagctaacgagttaac

SEQ ID NO: 10893 - DNA, 1343 bp, Oryza sativa
  ref <308>: DATABASE ACCESSION NUMBER: AK108241
  ref <309>: DATABASE ENTRY DATE: 2002-08-28
gtctcgccaccaacgtctcccctcaagttctcaaactcttctccagcttacccgacgacatgacagactggaagaaccccgtcgtgctgggacacggcttctatgcggcgaccgcgctcatgtggttgtgcgtagggctgttcttctacgatacgctccgcttcctccgctttgacgtctcgatcctcctgggtcgtcgaccgcgcaggtggccgcagctgccgtatctgttcagccgtgtgggcctgtggacctacttgctgaccaacatctactttgtggtggcgggcaccgagttcaactgcaacggcgtgctgcaggccgtcgagatgcagatgggctggatcgccgtgtcgtcgtcgatgctgctcgccttccgcgccgtgtgcgtgtactcgggccgtgcgcgcaccttggtctcgctactgctcaccattctgacgctcggcatgctcgccacctggatggtgggcgtcaaggacaccaaggccgcctgggtggtcggcggtggcaacccgtggcaggagggttcgtgcgcgttcacgtacatgtccaagcagtactcgatcaagtacattgtgacgatcgtattcgacatggtggtcatgctgctcactgtggcgggtgtggtgcgcatgaacggcggctcgcgcatcggcgccgtgctggtcaaccagggcatccagtactttgtgctgaccgcgctcatcaacgcgctcgtgacgggcctgacgctggcggacctcaacccggtcatgtcgctgatcggcgccatcccgagtgccacgatttcggtcatgtgctcgacgcgcctgtacgtcgagctggccgaagaggcagcgcctaagcccgaaggcgtcaactcgtcgcagctctcgtcgtcgctgagcggctcgggggccgagaagatcgcacgcttcttcaagcgttcgagccagaacccatcgcagctgcaaccatcgatggccatgcgcagcacgtcgtcgtccaacaacggcaccgctgtcgctggcctcacctcgctcagctacattgcgcgcaacgagtcgcagtcgcgcgacgacaagagctttgccattagctcccacgacgacctcgaggcccagaccacgcgcgctcagcccggcaccgtcgtcaatattgtcgaggagcgcactatcgtgcgcgagcccatgcccgaccacctcgctggcgtgctttacggccgtacctcggacaccgctgacgagggcgtcgccgaccatccgtacagcactgtcaagggccactttccgcgcctaagcaagtcgtgacgtgcgctcgcctactcatcgcccttccggaataaacctcatttaatgcag

SEQ ID NO: 10894 - DNA, 1690 bp, Oryza sativa
  ref <308>: DATABASE ACCESSION NUMBER: AK108242
  ref <309>: DATABASE ENTRY DATE: 2002-08-28
atccccgtcaacctcaactcccctggaacaaagtatttggcgccatgtcgcacatgatcgcctctgccatgtccgtggcgcagcagacgctcggctccggctccaccaccaacgactcctcggaccaccagccgggcctctcgcctcccctctcgcccgtcggtgaacaggacatcgagctcaccgctcccactcccgcggccgcccgtgcctcgcgccgccccgctaccgctcccaactcgcccatgccacctcatctccagtcgtatcgcaacaacctcggcaacgacatcaccatcgacctcaacatcggccccagcacctcgtccgcctacgcgcgtgcccagggcagcgccgccttccaccacgcccacaagcaccatccccactcgccctcgccctctcgcgctccgctcccctccaccgccgcccccaccgaagctgccggccaatcggcggacggcaagtccgcgcacctcgccgacccctcgcaggataccgaggcggcggcaggcccttcgcgttcgcgcgccagctcgctcggctacggcggcctcgcacccgccacgcccggcggagagaccgatccgctgctgctgcgttcgcgcgtcgtcgaagagtccgaggtgcgtcgacgccactcgggcaagggccgcaaccgccgcaacgagcgccagatccgcgacttttacgaggcgcagaacgagcacatcgagcggctgctcaagcccatctccaagcacgccgacgagggcaagcaggaccgcgagtcgtcggcgctcaaggtcaagatcgccgtatacgcgtcgatcggcgccaactttgtgctcgccatcctccagctctacgccgccgtcagctcgctctcgctctcgctctttgccacggcggcggactcggtgttcgatccgtttgccaacctcgtgctcaactggctccaccgcaagagcgagaacgtcgacgagagaaagtggcccatcggcggctcgcgcttcgagccgatcggcaacatcacctatgcggcgctcatgggcatggtctcggccatcctcgtggtcgagtccatccaggaattggctacgggcgatggcgacaagaagctcttcatcccctcgctcattgccgtcggcgtcgcctttgtcaccaaggcgatcctggccatctactgctacggactgcgcaagtactcgtcgcaggtcgaggtgctgtatcaggaccaccgcaacgacctgtttatcaacgggtttggtatcttcacctctgcggcgggtgcgacgattgccggatggatcgatcctgcgggtgcgctcatcatctcggtggcgatcattgtctcgtggacgcgcacggcgtttggcgagttcaagacgctggcgggtgccgctgcgccgaccgactttttgcagctggtcacgtacaatgcggcgctgttcagcgacgagatccaggcgatcgagagcgtgcgtgcctacagctctgggccgcgctacattgtggagatcgacattgtcatgcatcccgagacgccgctgtggaagagccacgatctgagccaggcgctccaggaccagctcgaatcgctccccatggtcgaacgcgcctttatccacgtcgaccacgaagtcgaacacgcctttgaacatcgtaagaacatctagacccatcgcaatccaataaaaaggtttcggcg

SEQ ID NO: 10895 - DNA, 1046 bp, Oryza sativa
  ref <308>: DATABASE ACCESSION NUMBER: AK108243
  ref <309>: DATABASE ENTRY DATE: 2002-08-28
agctagccgaggacctgcgccttgaaggcgtccacgtgcgccgggtcgatggacaccgagagctgcacctcgccgtcgcgccggccgccgacgagcaccatctcgccgtcgtggttcatcgacacgagctcgacgcgcgccggcctcccgaacccgaagtcggcggcgccgtacgccccgaaccgtgggctcgccgccacgttcgccatgcgggagaaggggatctgcatcacccgcgcgatcgccgacccgtccgccgtcccggcgagcggcgccgcctccatctccgccaccgccgcctgaaccgcccgcgccgcgcgcagcagcccgcgctcgccgcggagctccgccgcgttggcgcagcgcgccaggcacatcctcacgcagttcccgaggtacccctcgccgacggcggggtcgagccgcgcccggaggtcggcgaggaagatcaggtacgtgtcgtccccgtcggcgagcgccttggaccggacgaacgccgcccaccccatcgccgccagcgccacgaacgtcgacaccggcttggcggcgccgccgccatcggcagcctcctccgccgaggcgagctcgtcgatgcgccgcttcaacgcgcggatggcgtcggcgccgaggcggaacgtccggcgagccagccggaatcgctggctgaagtcctgctgatccccgctcgcctgcaagcatccatggcgggtggtggtgatctcgtcagtaaatttgcattcacggcgagcgagagagagatcatgacgcgtgcatgccattgcttgctccgccacgccaccgcggcgagctccgcatgcgcttaacattggggggagaaggaaaccatggttggatggcgtaccaagcaaaggttgacgacacatacacacttcgaagaggctacactacactacagtacatgcttcatgcatgatggaagcttcgatttttgtttatttatttgaactaccagaaagattttttgggctgttttttttatttggttgaattttattcagaattcaaatacattacaaccattttgc

SEQ ID NO: 10896 - DNA, 1056 bp, Oryza sativa
  ref <308>: DATABASE ACCESSION NUMBER: AK108244
  ref <309>: DATABASE ENTRY DATE: 2002-08-28
gagatcggatgccgctgaggaggaggaggaggcgctactaatcctctccgcccgccgcgccgaggggatcttggatcgacgaggagggggaggggagcagatgcgggcgagccggccggtggtgcacccggtggaggcgccgccgccggcagctttggcggtggcggcggcggcggtggcggtggaggccggggttggagcaggaggtggagcggcggcgcatggcggggagaacgcgcagccacgaggggtgcggatgaaggacccccccggggcgcccgggacgcccggcggcctcggcctccgcctcgtgcaggccttcttcgccgccgccgcgctcgccgtcatggcctccaccgacgacttcccctccgtctccgccttctgttaccttgttgcagcagccatcttgcaatgcttgtggagcctttcactagccgttgttgatatttatgcacttcttgtgaagcgttctttgcggaatccacaggctgtgtgtatatttaccatcggagatgggatcacagggacactaaccctaggtgcagcatgtgcatcagcaggcatcaccgtgctcattggcaatgacctgaacatatgcgcaaacaatcactgtgcaagtttcgaaactgcaaccgcgatggctttcatcagctggtttgcacttgcaccgtcctgcgtcttgaacttctggtcgatggcctccagatgaggacacagcttgtatttagacataattttgggctgtttgtcagccagatcactcggtgcaacagccaggagaaaacgtagtgcagctaattatactacgaccaagttgatgaatgcctgtgtaatgaaatttggtgtcgaattgtttgtacaaaataggggatagtttgttctgcaagagggtggttgtgaagctctgcaattttttttttttgaaaacggcatgtttcttgtaagaagctttttgtgatctgaaaacacagagctcaacgtgccgatttgttatgtcattttattattctgatgtgatcttcattcccgagaaatatgcagttcacattttgc

SEQ ID NO: 10897 - DNA, 1472 bp, Oryza sativa
  ref <308>: DATABASE ACCESSION NUMBER: AK108245
  ref <309>: DATABASE ENTRY DATE: 2002-08-28
actggacgccaattacaaatagatagaaccctcgccgagccggtaaccacgggaagcatatcgatgacgccattttccccgcatctcgtcgccgccgccgccgcgctcctcggcgtcctcgccaccgccgtcgccggaggcgggacgggcgcctacacccgcgtgttcagcttcggcgactcgctcaccgacaccggcaatgcgctgcacctcccgtccaccggcggcggcggcggcccggccagccgccctccctacggcgagaccttcttccgccgccccaccggccgcgcctccgacggccgcctcgccgtcgacttcatcgtggaggcgctgcggctgcggcacccggcgccgtacctcgccgccggcggcgagacggcggcggagttccggcacggcgtgaacttcgccgtcggcgggtcgacggcgctgccgccggagttctacgagggccgtggtctcaagccgttcgtgccggtctctctcgcgaaccagaccgcctggttctacaaagtcttgcagattcttggatcttcagatcacgggaggaggaagatcatggcgagctcgctgttcatcgtcggggagatcggcgtgaacgactacctcgtctccctcgtcggcaacctcaccgtcggcgaggtcgagacctccgtcgtgccgcacatcgtcgctgccatccgctccaccgtgaacgaggtgatcgccgccggagcgacgacggtggtggtgccggggatgatacctctcggctgcgagccgcagctgctcgcgctctaccagggcggcggcggcgtcgccggcgacgactacgacccggagtccggctgcatgacgcggctgaacggcctcgccgagcaccacaaccgcgagctgcgccgcgccgtcgccgagctccgcggcgcgcacccaggcgcgtccgtcgtcgtggcctacgccgacctctaccgcgccgtcgccgacatcgtcgcctcgccggggaggcacgggttcgggggcgcgccgctcgccgcgtgctgcggcgccggcgccggcgcgtacaacttcgacatggcggcattctgcggcgcggcggggtcgacggcgtgcgcggacccgtcggcgtacgtgtcgtgggacggcgtgcacttcaccgaggcggccaacaggcacatcgcctgcgccgtgctggaggccggcggcggcgcaccgccggccgtggcaacgccgctggcgacgtggtcggcggcggcggaggctggacgtagtaggatagggtgctcttagactgagtatacgtggatggctgggatagcttccacgtggaggcccacggtgagcccgtggccctacgccctcttgctgaacatgtggatgaattgatccatcacctttctgttttgttgaccagtgaagcagactactgttggctgttgccgtcagacatttgggcaaaagatgtattcagtgatgtcatactgatatattgg

SEQ ID NO: 10898 - DNA, 1169 bp, Oryza sativa
  ref <308>: DATABASE ACCESSION NUMBER: AK108246
  ref <309>: DATABASE ENTRY DATE: 2002-08-28
aagtgttttcctagctaggtagctagctagctagacgagcttgccggccggccggccggcgacggcgaccatggacttcgatgaccatgacgacggcgacgaggagatgccgccgatgccggtgagctcgagctacgagactccgccgcagcatggccttgccggcggtgggatggcgcccaagcctcctggtgagattggcagccgtgtgaagggccccagctgcggtggcggcaggtaccgcgagtgcctcaagaaccacgcggttggcatcggcggccacgccgtggacggctgcggcgagttcatggcggccggcgaggagggcaccatcgacgcgctccgctgcgccgcgtgcaactgccaccgcaacttccaccggaaggagtccgagtcgcttgccggcgagggctcgcccttctccccggccgccgtcgtcccctacggcgccacgccgcaccaccagttctccccgtactaccgcacccctgccggttacctccaccaccaccagcaccacatggccgcggcagccgcggccgccgccgccgcagccggcggctacccgcagcggcccctcgcgctcccgtccacctcccacagcggccgcgacgacggcgacgacctgtccgggatggtggggcccatgtcggcggtggggccgctcagcggcatgtccctcggcgccggcccgtccggctccggctccggcaagaagcggttccgcaccaagttcacccaggagcagaaggacaagatgctggcgttcgccgagcgcgtcgggtggcgcatccagaagcacgacgaggccgccgtgcagcagttctgtgacgaggtcggcgtcaagcgccacgtgctcaaggtgtggatgcacaacaacaagcacaccctgggcaagaagctgccatgaccgggagcaaatgcatttgatctcatcgtcggcatgcatgaccaagttgtgggacgacgcatgcatccatgtccatcccaagctagctgagctgatcgaccggccgtggcttagccacccggaccccggtatggtaggtacctgaaccttatttatttagagttggacttaattaattggtggcttaggttaatctgtagcaagagagactgagagagcattcgttctcggctctagtaggtggttctttcttcttttc

SEQ ID NO: 10899 - DNA, 705 bp, Oryza sativa
  ref <308>: DATABASE ACCESSION NUMBER: AK108247
  ref <309>: DATABASE ENTRY DATE: 2002-08-28
attcataggcgataggtcgttaatcacctgtttcatgtaaacactattgggtattatcactagggatggcaatttcccccgcggggccgggtcctctgcggggacccgcccctacggaggcaggggcgggtgggatttttcacccgcgggtgcgctggggtcggggccccgcatttggccggggaggggacggggggaacatttcactcgccggccacatctcggcgtcgccactcgccagccaccatctcccctcccctcctctccaatctcccctccggcgtccggcctcacgtctcccatcccctccacggctccagctcagggcggcggcgacacacagggcgcggcggcagcgcatagggcggcagggcgcagtggggaggcgagacaggcaagggcacgcggcgaggttgcggcggccggcgagacatgcaagggcgtggcgaggcgacgggcgcagccggcgaggttgcagcgcacaggcgtggcggcggccggcgattcacgtctccaatactcccaaatactctaggcgattcacatgcgaggtattgctccatctccaatactccaagtctccaactgtgccttgtgaatgaaagtgtgcccaaatgcatgggttggtgagttggtctcttaggagataatccatgtgatgcactgagttgataattgtcttgaattttctatgttgattggatg

SEQ ID NO: 10900 - DNA, 1056 bp, Oryza sativa
  ref <308>: DATABASE ACCESSION NUMBER: AK108248
  ref <309>: DATABASE ENTRY DATE: 2002-08-28
actctctcttcttcttcttcattccaatcgaagaagagaagcgaagagaagagggttaatccgcgctatatatagccgcctcatgcaatcgcaaacctaagctgctctgctccgcggcacacaacacgcattctggttaatcccctctctttgtctgcgcgtgaggttttcttgccaatggagtcctcgccggcggcgacggtgaccccggctgccgcagcaatgtcggaggcgccggcggtggcggcgccgaggccgagggaccctgggttgttcggaagcttcgacctccccgccgcctgggggtgccgcaggcccatggctttctgcagggaccttgacgccgccgccttggtcggctccgaacccaacgccgccgccgccgccgctgctgctggagacgccgtggagcccaagcgtaacgcctcccgatcgccgcccaaaggaggcgacgctcctgtggcggcggcggcggcgcaggaagctccgcggaagcagtggaacctgcggtatcggaagggcgggcgggacggcggcgaggacgcgctgcagaacaagaagctctggaacatggaagccgccggcggcggcggcggcggcggcgccagggcgagccgcgggttctcggtggagctgacgcgccaggagatcgacgccgacttcttcgcgatcaccggccggaaggcgccgcgcaagccggcgaagcggcccaggagcgtccagcgacaagtcgactcgatttgccctgggaactcgctctgggaggtgagccgcgatcgctacaaggtgaacgagaaggggggattctgagttgctccaagaaggaggagatggattttccgagaagcaagatcaaccattggcttatcgtagttatagacagagagagattcagactgtcagtcagaattgtttcagtgcatccatgcttatgctgttgatgatgaatcttgtgtagttttttacctgactgttggggttttgcttctcgctttcgtgaagcctctgcaaactcttctttcttttatgcctagttcggaaacagttaacagaaag

SEQ ID NO: 10901 - DNA, 1247 bp, Oryza sativa
  ref <308>: DATABASE ACCESSION NUMBER: AK108249
  ref <309>: DATABASE ENTRY DATE: 2002-08-28
acctcaaagtacagtttcctcttttttttttcttcggtggtgttgggagtggacaaggtagtgtgagtgagtagtgagcaccatggcgagccgagagcacctcctgctcgacccggcggcgctggccgtctcttgggctgaccccgctgcggtggagatcccgcccgagctcctcgccgcgctgggtgagtacctgtccgccaggcgtagcgacggggaggccgaggccgacgccgaggcggaggctgatgatgagttcatgatgtacgagttcaaggtgcggcggtgcgcgcgggcgcggagccacgactggacggcgtgcccgtacgcgcaccctggcgaggccgcgaggcggcgtgacccgaggcgcgtggcgtacacgggcgagccgtgcccggacttccgccgccggccgggcgccgcgtgcccgaggggcagcacgtgcccgttcgcgcacggcacgttcgagctctggctccacccgtcgcgctaccgcacgcggccgtgccgcgcgggcgtcgcgtgccgccgccgcgtctgcttcttcgcgcacaccgccggcgagctccgcgccgggtccaaggaagactcgccgctgtcgctctcccccaagtcgaccctggcctccctctgggagtcgccgccggtgtcgccggtggaggggcggaggtgggtggacggcatcgatgaatgcgacgcggacgcggagatggaagagttgatgttcgcaatgcgggagctcggcctccggaaggtgaggccgtcggcatcgtccgtaacgccggtgctaccgccggtgacggacgaggacgggccggatttcgggtgggtgtccgagcttgtgatgtagaagcacccgacaagctcaaagacatcatctctctcggcggcgacgattaagatgcagaggcgcctcgcagaacagcttcattaattaagttcacttcaattcgatgatcatttcgcaaattgcatcattcttctgtacataaacaaatatggtgcaagttaatctgaacacagcaatccgtaactgtaagtgtggcgtgcgtttgcctgcctttttttttcgaaaatcttggggagctagtagcacccttgcttttcgattattattattattatctaccagtgtagatatggagtgtaatatgctaatagcctctgcctgtttcgtgatattatcacatttgatgtacttaattatgctaaattcgatgcttttttttatctatcttcctgtggtt

SEQ ID NO: 10902 - DNA, 1189 bp, Oryza sativa
  ref <308>: DATABASE ACCESSION NUMBER: AK108250
  ref <309>: DATABASE ENTRY DATE: 2002-08-28
acaaagtagctagttcactcttagctagctccgacgtgatcgatcgcgcgagctagctaactaagctgcttcgtcgtcgtcgctcgctcatggacgcgccgcggctgcaccattccgccagggcgctcctcctcgtggcgccgagcgcgtctcccgcgccggcggcggtgccaccaggagtcgccggcgctctgccggtcgccgagaatggccgcggcggtcccctcgccgtgtcgtcgctcaacaccaacaccatcgtcctgctcgtgctcctcgtctgcggcctcgtcgccgccgtcgcgctccacgtcgtactccagtgcgcgctccgcgtcacgcggcgcgcgtgctacggcgcggagaccgccgccgccgccgctgcaggaggaggaggagaaggaggccgcgcgaggcggggtggcggaggcgggggcaggaagcggacgccgccgctgtcgaagacgatcccgcgcgtggcgtacacggaggggctcgagctggccgggtcgtcgcggtcggagtgcgtgatatgcctcgccgagttcgcgcgcggggagcacgtgcgcgtgctgccgggctgcaaccacggcttccacgaccgctgcattgaccggtggctcgcggcgcggccgacgtgccccacgtgcaggcaggcgccgttcgccgccgccgccgccgatcccgtcgcgccgccggaccctgcaccggcggccgtgcaggtggtgcgagtcatagtactcactagtcaatagctggtacccatggtggcatactggcatgagctgcttagacgtggtcgatcgcctcgtgtgcagcggccgcgccactgtgtccacagctagtatacagtgtgtgttgccgacttggcgagttggcgtgtgtcgccgaatcggcaaacgtttcgaagccgttacacttggtaaagtgggcgatggatgtgtaggggtgtacaagtgttcgggcctatgcatattgcacgcaggagcaggacacgatggtacgaagccgaatcgaggcgaaacgggagtaatctgccctgccgggttccctgcggactgtcagcctttgacgctgtgagtctgtgacaagcactttttttttttagcaaaacagaccatgtcctgtgagatggtgacaaagcacaagtgttacacatttttccctttgtatatgtgcatgtaaattttgc

SEQ ID NO: 10903 - DNA, 1039 bp, Oryza sativa
  ref <308>: DATABASE ACCESSION NUMBER: AK108251
  ref <309>: DATABASE ENTRY DATE: 2002-08-28
tcgccatcgccatcgccatcgccatcgccatcgcactcagcactcaacccggatcccccgcgcaatcaccacaggctcgaatctcagcagccgctgcctagacaactttcggatcctacacgactcgcggtagaccgtaccaataccaacacgacggtgctggcgtgcatccactagacaccaacggatcggattggaggagacgccggcagacatcgcacgatgatgcgtctcgtatcgctattgctggcgctggtgacgctgttctttacaagcggcgtggttgcgcccgacccgccgtcgttcacaccaggactctcgactaacgcacctgctgcatctggcacatcagcgcagggctcagccacatccacttctgccaacatcccgtcgtcggcacccgtgggtggcatcacggtgacgcaacccatccagacggccgacccatcgtactacaagatcgcacgcggcgtcgacgtcacgttcggctggaactttacgtcggtgctgcagtatccgcgcacgctcaccgtgcaggcgtactgctcggacaacctcaacacgtacaacattgcgaccgatctgcccggcacagcgacgagcgtggtgtggtcgccgtacaactactcgacgagcgtcgaggtgtcgaatccgaacctgccgcagctcatcgccgcttcgtacaggctgctggtgtacgacgagcgcggcatgaacgtgggtgcctcgcccggtctcatgcagcccaacaccaaggtccaattcgcgctctacaacccgcaggcctacacgccgcttgcgagtggatggatctgcgcggcgtgcagcggtgcaaccggcctcaaggcaacgcatcctgcgtttgtcggcctgctggctacggtggtgattgccgtggtgtctggctggaacctcctctcgagacagacgggcatggccgggctggtcgacgacgagtgaagcccaagcccaacctcgtcgtgctattataacaggctcgcacctcgcatgtgtgtgaatggacactttttttcctctc

SEQ ID NO: 10904 - DNA, 1101 bp, Oryza sativa
  ref <308>: DATABASE ACCESSION NUMBER: AK108252
  ref <309>: DATABASE ENTRY DATE: 2002-08-28
aagaaacaccacacctcgccgccggcgacccaccggagagcgggcaagccagcctcccgcgccgcccaccccatggcgtcccgccggtcgctccatctcctcactgcctcccgcggcatcttctccaccccgcacctcgcctccctcggctggttcgacaagatcaagagcaccttcaccggcaagaagcccgacgaggccaccgacccctccgccaacttcaccctactccagttcgcggattcgatggagaaggcgaggaagctggggacgttcaagaacttcgtgatggggcggtgcagcgaggccaccgtcgtcaacgccttcgagaagcactccgccgtcctccgctacctcggcaccatcgaccccaccggcgagaaactcaagaacagcgacaagatcggtgccaccaagcactgcaactgcacgattgcggatgtggagcacatactggccaagtacacatgggctaaggaggctcagaagaagatagtaaagctcaaagaagaagggaagccgttgccgaagaacttcaatgaggtgaaaaacctaatgggttctacaccactggacgttggcagatctaatctggaaaagagtggacagataagtagaaatgctatgtgcccctgtggttctaagaaacaatataaaaagtgctgtggagcttcttgaagtgaagaccatgttttcctttgtgctgaccacatgaaatattttgattagccatgatcaagaagagcattcctctctttttttttcacttcagcagcaatgcagatcatcctgccacaaacctgacattgaaatatgtaaagcaccataactgaggtttgcatgactgagtttttttttttgccaaaattgcattacatctaagccggctttgttgttaaatttgcttgtttatataagaagtcatggaaatatccatcacattctgcgtagaaagcctgaactttgttcaagcaacgcccgtagatcaattttttttttggtttatgggtacattactaagtcgagagatgcactatacatgatgtatcctgaagctggtcattccgtttgtttgggaaagtagcatgtgaatactgatgc

SEQ ID NO: 10905 - DNA, 815 bp, Oryza sativa
  ref <308>: DATABASE ACCESSION NUMBER: AK108253
  ref <309>: DATABASE ENTRY DATE: 2002-08-28
ggctgccggcgaccgacgaccgagatgggggaagtgtgcaagcgagtggcgccgagcgtgcgggaggaggaggaggaggaggagaatggcgacggcggcggcgtcgacccggcagcggagtcgtcgtcggcgaagctgtacgaggacgtgccggagatgccgctgatggcgctgaaccacatctcccgcctctgcaagtccatcgacgcctccgtccgcttctacgtcaaggccctcggcttcgtcctcatccaccgccctcccgctctcgacttcaacggcgcctggcttttcaactacggagttgggatccatctcgtccagagagacgacgcgaggagagcgcccgacgtcaaccccggggacctcgaccccatggacaaccacatctccttccaatgcgaggacatggggatgatggagaagaggctgaacgagatggggatcgagtacatgaagcggaccatcaacgaggaggagggctcgcccatcgaccagctcttcttcaaggaccccgacggcttcatgatcgagatctgcaactgcgagaacctcgagctcgtccccgctggcgccctcggccgcctcaggctgccccgagaccgccacaacccgccgctccggatggccgccgccggcaacgacgaggcgtgagaaaaacgtacatccaagtgtacgtagttagtaaaattaagtagctgtcaggtctgagtacgcgaggttggctggttgaccggccggcccggcgaaatttcggttagctggttgcgtcgttgcaagcttgagtttgcgtatgctattactttcgttcgttg

SEQ ID NO: 10906 - DNA, 584 bp, Oryza sativa
  ref <308>: DATABASE ACCESSION NUMBER: AK108254
  ref <309>: DATABASE ENTRY DATE: 2002-08-28
atcatcctcaacaatattgtctacaccatctggaatcttgtttaacactagtattgtagaatcagcaatggcagcatacaccagcaagatctttgccctgtttgccttaattgctctttctgcaagtgccactactgcaatcaccactatgcagtatttcccaccaacattagccatgggcaccatggatccgtgtaggcagtacatgatgcaaacgttgggcatgggtagctccacagccatgttcatgtcgcagccaatggcgctcctgcagcagcaatgttgcatgcagctacaaggcatgatgcctcagtgccactgtggcaccagttgccagatgatgcagagcatgcaacaagttatttgtgctggactcgggcagcagcagatggtgaagatggcgatgcagatgccatacatgtgcaacatggcccctgtcaacttccaactctcttcctgtggttgttgttgatcaaacgttggttacatgtactctagtaataaggtgttgcatactatcgtgtgcagacactagaaataagaaccattgaataaaatatcaatcattttcagaaaaaaaaacg

SEQ ID NO: 10907 - DNA, 614 bp, Oryza sativa
  ref <308>: DATABASE ACCESSION NUMBER: AK108255
  ref <309>: DATABASE ENTRY DATE: 2002-08-28
gaaaaaaaacagaaaccttccagaccggagtggagcctctctgtcccgtggcggccatgtcagccggaagcgaaagagcccacgccgccttcgcgagcccctcgccggtgtcgggggccttcttctccgcctccggctcaatcctctccggctcaatcctctccggctcaatcctctcctcctcctccgccgctgtcaccaccaccaccagcgcgggtaggaccccgtcctcctcctccggagcgcccacgaaaaagaagaagaagccgccgttccgccccgtcgccgacgacaccaagcccgtcctccgcgacccgatatctcggtcggacccggtggagaccgagcaggccgtgctgcggctgccgccattcccctagggtacaggtccgcacgccgctgaccgacgatgttactaccagggttcaagaatcaggtatcgacatgatgattagctcctacatttttcttctgcgcaagcctgcccattgtcactcctataatttgctcagactgtggtatgtgtagtgtactacagtacacttggctactctgctaaaccctgtagacgaaaaatcactctcttaaatattcattgcctcataggttcatct

SEQ ID NO: 10908 - DNA, 1070 bp, Oryza sativa
  ref <308>: DATABASE ACCESSION NUMBER: AK108256
  ref <309>: DATABASE ENTRY DATE: 2002-08-28
atcgccattgctgcctagctattctactagctttgtttctctcttggcgacgaggctgtggagaaggggtagaagcagtacgtcttggtggtggcagcgttttgggggatgagggcgggcgggatgctgtgccggtcgcaggcggcgacggcggtgtgcgtgccgggggacgcgcgctccatgatcgtgtcgcgccgcgccgaccgcaccatcgccgaggacgcgcgcctcgcgcacgacgtcaggtacgcgcgcctcggcgctgctgcatccgccggcggcgcgcgggtcccgtcgcggcggttcgcggcgccgaggcaggcgcttactcctcctcctcctccgccgccgccgccgcagccgccgaagcagcaccggcgccctcgccgcggggccggcgtcgcggtgacgttccccatggtgaccaagagccccaaggagaccccggcgagggagatggccgcagccgccgccgccgccaagcgcgcgcccctcgccgccgcgtcgcccggcgaccaagtcctccaggtggtggtcatgaaggtggctattcactgccaggggtgtgcagggaaagtgaggaagcatatctccaagatggaaggtgtgacgtcgttcagcatcgacctggagagcaagaaggtgacagtgatgggtcacgtgtcgccggcgggcgtcctcgagagcatctccaaggtcaagaaggccgagctcctcttcctctgatcatcatcgtcctctcgccgtcgccgtcgccggacgccgccggcgcgtcgccatggatgctagcttcgctgagaaagaagtatatgctttctgcatgcgaaattcttctagctagctagtggctactgggcacagcaagaagagagaggttaattagaggagagatagagggagagagagagagagacagaggcaggggtacatgctgtgatagatcgatgggtgaaagcttagagagaggcaggggcagaggcaggcatgcgtggtgaactgtgcgttgctggtgtcttgtgctgtgtcgtgtactcgtgtgtgtgtgtccatgcatatgctttgctttactc

SEQ ID NO: 10909 - DNA, 1173 bp, Oryza sativa
  ref <308>: DATABASE ACCESSION NUMBER: AK108257
  ref <309>: DATABASE ENTRY DATE: 2002-08-28
actgcgagagctcagtggagggagaagaccatcaccaccatgggcgccagcctgagcctcgtgccgctcctcgactacttcgcgcgccgggagttcgccgccgccggcctcagccccggcgccgtcacgctgccgtacccgggcgacggcggcgaggcgacctgcaccgtccactactgggcctccacgggggagccgctgctgccgccgctgctgctcgtgcatgggttcggcccacgggccacctggcagtggcgctgccaggtgggcccactgtcccggcatttccacctcatcgtgcccgacctcatcggcttcggcggcagctcgttcggcggcgactccgccgcctcgccgccgtcggaggctacgcaggcggcggcgctggcggcgctgctggacgcgctgccggggatgaaggggaggcgggtggcggtggcggggaccagctacggcgggttcgtggcgtactggctggcgcgcacggcgggggccgggagggttggccccgtggtgatcgcgagctccgacctgctcaagacggcggcggacgaccgggggttcctgaagagggccggcgacgggtggagcggcgtggaggaggtgctcctgccggccgagcccgccgcgatgcggaagctgctggagatggcctcgtgccggccgccgccgccggtgctgatgccggacttcatcctccgcgacttcatccagaaacttttcacggagaacagagagcaacttattcaactcttcaaggggatcacagttggcacagacaagttcccagtaactccaatatctcaggaagtgttgattgtctggggagagcaagatcagttgttcccggttgagaaggcttatgcagttcagagttctttggatgggaaagctagagtggaaatcataagcaaaacaggccatgctccacagctggaggatccaacccggttcaacaagatcctgctagacttcttgctggctactcacaagcctgatccttcgtcaaatggcgcatcgcaataagtcggatgcccactcgaatatttgattgattgaaataagatggttagccaccttcgtccattcatagctaaaatttgtactacgaattatttgagaacgcacattgagaaataattaaagaaaatgggtggattgttgatttgtttt

SEQ ID NO: 10910 - DNA, 824 bp, Oryza sativa
  ref <308>: DATABASE ACCESSION NUMBER: AK108258
  ref <309>: DATABASE ENTRY DATE: 2002-08-28
atcaggaattcatcagaacagcagtttagccagttgttcttacccgtgtccactcgtttgggctcatctttggggcgaagaccctgaccgtgtggaccgtggacgccgcgaggaagctgggccggtcacattccttggcccccggcttcgcaacgcgcctggtgtactccgtcatggtggctcggctgcggccgcggccgcgggaggacgtatcgttccgggcggcgctgaggaagaagacggcccgctgggcgcacgcgtcgtcgcggctcagcggccgcgtgttgaagacgaacgggccatcggcccacgaccgccacgtcttgaacgtccggagcggcacctccagctcgtgaggcgccacggcccacgggtacagctgcaccgtgtaaccccacgacaccgacacggaccaggtgtagcgcggcccgcgctggtagcagaacgcctgctgcagcgaccgcgcctggtcgagccgcgacgcgcgcaccagccgccgcgccgcgtccagcgggctgccatgctgccccccggggctgatgggctcgatgtggtcgaggtggtggagcgacaccagcggcgccagcgggtgggcggccagcatcccgtacgcgtcgccgcggacgtccacctgtcagtcgttgttgcggccacagttgttagtaagaagattctcgatgccagatggtgaacgatggtgaggacgacaagaagacagagggcagaaagtgacaaatggcgaccttgttacgacacgccacaaaggctgtgtttagttggggaaaagaaattttttgggtgtcacatcagacgtttgaccggac

SEQ ID NO: 10911 - DNA, 1031 bp, Oryza sativa
  ref <308>: DATABASE ACCESSION NUMBER: AK108259
  ref <309>: DATABASE ENTRY DATE: 2002-08-28
aagctagctcgcgcgcaaattaatcgccgatcgatcctacgatgaagcggaagcggccggcggcgctgcgcggcggggaggaggcggcggcggcggcgctgaagcgtgggccgtggacgcccgaggaggacgaggtgctggcgcggttcgtggcgcgggaggggtgcgaccggtggcgcacgctgccgcggcgcgcgggcctgctgcgctgcggcaagagctgccgcctccggtggatgaactacctccgccccgacatcaagcgctgccccatcgccgacgacgaggaggacctcatcctccgcctccaccgcctcctcggcaaccggtggtcgctgatcgccgggaggttgccggggcgcacggacaacgagatcaagaactactggaactcgcatctcagcaagaagctcatcgcgcagggcatcgacccgcggacgcacaagccgctgacggccgccgccgatcactccaacgccgccgctgccgtcgccgccacttcttacaagaaggcggtgccggccaagccgccgaggacggcatcctcgccggccgctggcattgagtgcagcgacgatcgtgcccgaccggccgacggtggcggtgacttcgcagcgatggtgagcgccgccgatgccgagggattcgaaggaggatttggcgatcagttctgtgccgaggatgcagttcatggtggcttcgacatgggttccgcttccgccatggtgggtgacgacgacttctcctcgtttcttgattctctgatcaacgacgagcagttaggcgatctcttcgtcgtcgagggcaacgatcacgagcatggcaatggtgagattggtcatggagacgtcatggaatccaaacagtaatctttcgggagattgatcagggaataagttgaccatgagaaaacatgtaagaacagcttgtctgctgagtcatgaccggtgatgtgtatgtgatggaagaaaacgtatgtacgacttaatgcttgcacctatactactgctgtgtgcattattcgagtgatc

SEQ ID NO: 10912 - DNA, 624 bp, Oryza sativa
  ref <308>: DATABASE ACCESSION NUMBER: AK108260
  ref <309>: DATABASE ENTRY DATE: 2002-08-28
ttggattagcatcagcagcaagggcggcgacacggcgcgtgtccgctcatgcagatgcagcggccgccaataattgtcggagcaaagggctagccgggaggcgcgcacacctcgtcacatggcgtgtccccgagcagagatgagagatggtgaggatgagatggccccccgcgtcgtctcctctaccggcgcgcgcccgcgcgctgcacgcaggtagcgccatccacattcctcgagccgcgccgtgtcatgtggaaacagcgagcggccacaacccacctcgtcgtgctcctcctcccggtttggtttcgtttggtttggtttgttttcctctcctccgctcggacgccgatccgtccccgtggctcgcggcagagtgtgtgactctgcacaggacaggatggccaccctgccaaccgtgtacttgctctggatatttctggctcctccgtcctcccggagctctctctctctctcgctgcctgtagctgtactccaaattgtgtgacgaccaggccaccagggacctggttttcagttgctgctaatataacaaaatatcacgtggtaggctggtggatataattgcagggagatgtattttataaaccctctcctttttcg

SEQ ID NO: 10913 - DNA, 958 bp, Oryza sativa
  ref <308>: DATABASE ACCESSION NUMBER: AK108261
  ref <309>: DATABASE ENTRY DATE: 2002-08-28
atcccatcaattgttcggattcaagagtagtcagcctcactctcttcctccaaatcattggtgctgctgctactgtgtaccggagatgaacggcgctggtggtgcgggaggagcagcggcagggaagttgccaatggtgagccaccgacgggtgcagtgcagactagcggacaagcggtgtgagctccgggaggaagagatggagtatatccggcagttccaccgccacgagcccagcagcaaccagtgcacctcgttcgtcgccaagcatatcaaggcgcccctccaaaccgtttggtcactagtgaggaggtttgatcagccacaacttttcaaaccttttgtgagaaagtgcgtaatgcgagaaaacattattgtgaccggatgtgttagggaggtcaatgttcaaagcgggcttccagccacaaggagcactgagaggttagagttgcttgatgataacgaacatatcctcaaagtcaagtttattgggggcgatcatatgttgaagaattactcatccatcctaaccatccactctgaggtcatcgatggccaacttggaacattggtggtcgaatcatttgtagtggatattccagatgggaacaccaaagacgacatatgctatttcatcgagaacgttctcaggtgcaaccttatgacccttgctgatgtgtcagaggagcgccttgccaatccttgatctcactctgctttcttggttgattgatgatcagaataatccatatataaaattggtggaccttattgaaactctcagaaaacatcagagcttcttgatcgacattgcatactaaagcttgttctatagaatttagagcaattaaggcactcacttcagtttactacaaacatatgtgcaactttgttacttcgctcgtgcaaaaaaatgtcgaactgagatgaaacaacgttactttgatggattgtattc

SEQ ID NO: 10914 - DNA, 870 bp, Oryza sativa
  ref <308>: DATABASE ACCESSION NUMBER: AK108262
  ref <309>: DATABASE ENTRY DATE: 2002-08-28
tcactccaactcgcctcccgtccctgacattggcagcttctcctacagctggccgactaacaagccgctcgcgcgcgccgacgacgacacgcacgcgcggggatgcagcttcgacttctcgccgccgtcgttcgagtgctccaagcaagccgcggcgatggcccacgccgaccagatgttccgcgacggccttctcctcccactgcgagccgtacggcgtcagggaggcggcggcggcggcgacgacgacggcggcggcggcgacgtcagcggcgcccccaagcgggacgctatctcggtgctcctgcggccgcgctatgtggactcggcccagaggatcacgacgacgatccccgcgagcaagcgccacctgctgccccggctggcgtcgccaagttccccgcgttcgtctctccgcgttgcggcggctccggggtggtcgccgagctccgtcctcggactcggggcgagcaacaagctcaggctgccgtccttggggaggaggtgcggccgcgtgctgccgaggcggctctcgtgcaagtgtctgacgttcctggaaccgctatatcagaagatggcgagctgctgtgtcgggagaaggatcacgacgaggcacgcttatggccgtgccgccgccgatgagtcccgcaatattaaggtgtgcgaggatgcaatcagggacgctattctgcactgcaaaacatcactctagatgatcacgcagggggcacctggaatgcacgcaggctagagcttgggccttttgggctggagcttgcaatgtgttactattgatctttatgctttgccgtagataagatttgaaatcttttttttaatggaatcagcacgagattgtgctttttcatt

SEQ ID NO: 10915 - DNA, 584 bp, Oryza sativa
  ref <308>: DATABASE ACCESSION NUMBER: AK108263
  ref <309>: DATABASE ENTRY DATE: 2002-08-28
cctttgcgctacggtgtttcctccacgcgcgccggcggcgagacgagcactgccggtggcacctcggatgagtccggcggcggactatcactccaccagcactctccaactgctacacagcaggctgacgacggcagcgacacagccatcaagcagggcaaggcagggtagggcaaggcggcaagcagacatagagcgaggcgggatggcagccaaggagcaaggcggagcaggcggccatggagcaaggcgacgccagttgcagattgtcgtcggtggccgcggcgccgtccccgcctcctcggatgagtccttcggtttcccgggcggccatgcttcagccttcaggtcaacgatgttggtactgttcctgaacctggtttgtgaatcttgagatgatattgttcctgagaacaatgtgtgcgcagtttctctctctctctctctctctctctctctctctctctctctctctcgtgtatgctgcagattagtgcacatttgacatggatgctaaacatatggtctagagaggagatcgagctgagactaaattcagaaagaacatttggtgaaattcagag

SEQ ID NO: 10916 - DNA, 991 bp, Oryza sativa
  ref <308>: DATABASE ACCESSION NUMBER: AK108264
  ref <309>: DATABASE ENTRY DATE: 2002-08-28
accgcgccgcaatgccggccgggcgctggagccgccaccgacagctccacctccgtctccgtggctcccgaggaattcgagttcttcgtgctcccgtccggtggcctcgccctcgccggcgcggacgaggatggcatgtgcgtcgccgacgaggtattctccgacgggaagctccttccgctgcggctctcatccgcaaaccccgtggaagcggcagcgctccggctgctccgctcggactcgctcgacggtgccacgacggcgtcgtccgccagcggcttcagctcgcgctccgacagccggagcgcgagctcgagcagcagcagcagcagctgcgtcagccggagcacctcacagaagagcgcgtcctccgacaccgccggccgaagcaaccagccgtccaaggccgcctcgtccgacgccctcctgccgccgcggcggcggccgctgtcgggcagcctgttctacgcgcacccgagcccgtcgccgcgtccgtcgcagcgcttgagcggcggtggcggcggctcggcagggcggcgcagcaccgggtccgcgccgccggcatcgtggggcctcctacgcctgggcgtcgtcggcgcccccgacgtctacccgcctcgtcccgctcccgccgcggcgagaggagggagccgcagcgcgaggttcgagcagccgagagccgccgctaaggatgcggtggcatgggaaaagaatctcccgttgggcttcctgggcgccggtcttgtgtgcaactgctcgccggacgccgtcgagcctgtcggctcggcggaggccgcggcggcggcggcggcgaggaggcggaggaggaaagtagcagagaagaacacgggagaggtgaagagtggacagagtaacactattcgtcggagtagaatccttgagtggttagaggaactctccatttccaaggaaaaaccgctacttagacataattattttgtttttccgttcaatcccaattttttcattt

SEQ ID NO: 10917 - DNA, 558 bp, Oryza sativa
  ref <308>: DATABASE ACCESSION NUMBER: AK108265
  ref <309>: DATABASE ENTRY DATE: 2002-08-28
aacacacagacacacccacggaattccgcgaatcaatcgcatccagcacacggcagcagcaatgtgcttagccacggtggacgacggccgccacgccatggcggcctccatccgcgccttctacctccgcctctcgtccccggcgccggccgagctcacgctcgtctacctcccggccatcggcggcgccgcgctggagctcggcgtgcgactgcgagtgcgggacgtgcggggatgacgagtgggaggtggtcggagacgacggcgagctcgacacgccggagatggaggcggagacgttgacgtgggcgctggagatgggagcatgggctgtctgcgtcggagtcggacttctcgccacggcgaggcgattccggcggaaacgggcgttctggtgacccgctcgccgcgacggccaccaagaggacgccctttcgttttttttctttcacctttcaagtgtaaaatgtccaaattttgtagatttttagttcaagatttcacatcatcttctcaaagagtgtgtacatatgatcgatcaacgaaattgccttctcc

SEQ ID NO: 10918 - DNA, 1688 bp, Oryza sativa
  ref <308>: DATABASE ACCESSION NUMBER: AK108266
  ref <309>: DATABASE ENTRY DATE: 2002-08-28
ggagtccacgctcttatcccgaaatgagtccgaagaagctggctgacatctacccgccgccggggatgatcggccacctggtctccacggtggagctcggcaagctgctcgtgccgcacggcatcgatgtcaccatcgtcctcggcggccaggacgacgggggcgccgctgctaccgcgtctttcctagcggacgccgccgccaccaacccagagctctccttccaccgcctcccgcaacccacgctcccctgcaacgtgcccgctgatgattacgtgtctcgctcgggtcttcgagtttgcacgggcttccggccccgatctatgtgacttcctccggtccacctccccggccgtcctcatcatcgacttcttctgctacagcgccctcgacgttggcgccgagctccgcatcccgacgtacttcttcctcaccacttgcatcgctagcctcgcttttctgctgtaccttccagtcatccaagaggagaataccatgagcttcagagatctcagtggtgacctcgtgcacgcgccgggtatcccaccgataccggcagatcacctccccatgtctcagttagaccgcgacagcgtgagcagcaggcacttcctcgccttgtccgaacaggtgtgcaactcgcacggtgttatggtaaatagctgccactccctcgagcggcgcgcggccgacgccatcgtcgccggtctctgcacgttcccagggcgtcgaacgccgccgctgcactgcatagggccactgataaagccgcgggaggaggacagtacagagcgccacgagtgcctcgcctggcttgacgcgcagcccaaggccagcgtgttgttcctctgtttcggcagcttgggcgtgttcagcgtggagcagatcaagcaggtggccgtcggcctagagacgagcggccaccggttcctgtgggtggtgcgtcccccgcctggcttggagcacgtaaccgggcctgacctcgacgcgctcatcttcccggaaggcttcctacgccggaccaagggaagggggctcgaggtcatatcgtgttcaccgcaacgcgaggtgctggagcacggtgcggtgggcgggttcgtgtcacactgtggatggaactcggtgttggaggcggtcacagcgggggtgcccatgctggcatggccgttgtacgcggagcagaggatgaacaaggtgttcttggtggaagagatgcgtttggccgtgggggtggaaggctatgacaaaggaatcgttacggcggaggagattcaggagaaggcgaggtggctcatggattctgacggtggaagagagctccgggagcggactttggcggccatgcgagaggtgaaagaggcgccaagtgacaaaggtgagtccaaaatgacgttgttagaactcgtaagccagtggaaaagtgactgaaaggagacggatagggagatgaacagtaatgttaacgggctagccttctgcaccgtttggtccaaaataaacataccaggtcatactatagtatatttccgccagagtagtaaaaatccttgtagaatatttaagttggagtgaattgcatgctggatcatttatttttatcaatgttgtagcttagactagaggtaacacaatattttcaacatttaaccgggtaagcttgcaaaaggtttctgcttacacgggtggag

SEQ ID NO: 10919 - DNA, 1025 bp, Oryza sativa
  ref <308>: DATABASE ACCESSION NUMBER: AK108267
  ref <309>: DATABASE ENTRY DATE: 2002-08-28
accacattcccccgcgattccctccactccccactcggcagctcgccattccaccaccaccgcgccgccgcggcgcatcgggccatggcgcccgccgccgccgccgcgtgcgccgcctccgtccgcgccgacccgccgggcatcctcgactacggcgccatccacgcctgcctcctgggcggggaccgccgcgcctccctcccggcgctcgcgctcctcctcctcctccacttccgcgtcctcgccgccgccgcggggacccacttctcccccgcggtctcccgcctcgcggcccgcctccgcctctccccgtccatggccgccgtcacgctcctcgcgctcggcaacggcgcccccgatgcgttcgcctccgccgccgcgctcggcggggccggcgggatgcggcgtgcggggctcgccgcgatcctctccgccggagccttcgtctccgcgttcgtcgtcggggccgtcgcgctcatcgccgcgccgttcgctgtcccgcccgcgtcgttcgcccgcgacgtcttcttctacctcctcgccgcctccggcctcttctacatctaccttagcgccgagatatacctctggcaggccatcgggctcgtgctcttctacgtcttcttcgtgggcttagtggtatacatggatttggatgctgaggggaaggcggtgagcaccaccgagctggaggtggtgaatggcattggtcgcgtggtgatggacttgccggtaacagtggaggatcgcaagcaacaacaccctactttgtgcacgatgttcagtaagttgctgcagagcaatggttcatttcgatggggatggttcacgaggtgcaagatgcctccaggctgcaatacaacttcttatcttggcagctgatgcatacagcccttcacactgaattggcttgtactggtctggcatgttcctgtggattcttctgtaccttcattttacgagttcatgagttcaggccagaggggagatcttgctggcgatgtgcatcagtgcatgcactgtct

SEQ ID NO: 10920 - DNA, 828 bp, Oryza sativa
  ref <308>: DATABASE ACCESSION NUMBER: AK108268
  ref <309>: DATABASE ENTRY DATE: 2002-08-28
agctgcggcatggagacttctctgcggctgcgcggcggcgggtcacgtccgcagtcaaagtcacaggagggcctccgcatccacgccaaggagaagctccccatcgcctccaacgcgctcctccaggctcacggcgagatccacgccgccaccggcgccccgacctatctcgccctcctcttcaggaacttctatccccgtctctccgccaatctaggcctaggcctcgccatccacttccgcaacaaccaaccactaccactagcatgggacaacttctcctacaccctccgtgccagcaaggctatcatccccttcccctccaacgccttgctcgggatcaacctcaagggacgcctcctcgccgacaaatacttcaacccgaccgcccggactgctgccgtcgagttagcatggaccatacttgatctcaaaaggggtcaagatgtcaggctcaaacttggatatcaactcttgcacaagatgccttatttccaactcagggaaaacaattggacttttaatgcttatatggatggaaaatgggatgttaggtttgacctgtgatcaaaaggcaatgaatggaggatggatgttgcatcgtgagaagaaccggaggaccggatagcatgctgttgggcacattggaatgcacggccgatttctcatccttaaacaagtaagtggtactacttttaattggatgagttcataattgaaaaccatttgtgcagttgtatttgggtcacctgttgtagctcgttaatgccttctgtgtgttgtggaccctgtcagttggactgagaatatatagattcaggtgtgagc

SEQ ID NO: 10921 - DNA, 777 bp, Oryza sativa
  ref <308>: DATABASE ACCESSION NUMBER: AK108269
  ref <309>: DATABASE ENTRY DATE: 2002-08-28
tacgtctccccaacccaacgtctcactcctctctctctatctcctgtcctgccctgccctgccctgcaggcgaggctagctgcaggtcaattcattggctctgtgctagcttgggactgaatcctcctctcttgagggcgccgcgctatccgtccatggcgccgtcgtaccgcccctactccggggagtatcagtacggcaacggcaacgcggtggtgccgtatggcggtggcggcgagcggaggatgaaggcggtgtgtcggtgggtgcctggtgcgtggtggctgtcggacccggagatgaagcggcggcggagggtggccggatacaagtcgtacgcggtggaggggaaggtgaaggcgtccatccgcagggggctccgctggatcaaggccaagtgctcccacatcgtccgccgctagatattttactctactactctctacttgttcttcttgctactgcaacttttatttgcaatcgatcgatgtccttcttgcttgcttgattcacgagcacagcactcttgttcgtttgcaataacatccatctgccaagtttgcttgctttccctttcccccaactcctcctccactgctttggttgggttgggagatcttgctagcttgcagatgtttctagctcctagctagttatatactgtttcttgtcgatctattgtcaatttgtcatagtacgattgattgatgtctgattactgtaatggcgcgtacgtgtaatgttgcgatgagagctcaaacaagcaaacgtttggag

SEQ ID NO: 10922 - DNA, 972 bp, Oryza sativa
  ref <308>: DATABASE ACCESSION NUMBER: AK108270
  ref <309>: DATABASE ENTRY DATE: 2002-08-28
ctctcgggcatttcgtcgaacagcctcacggcgcgtcgcggacgctgcggtgcctggcgtacatgaagaccagcgacgacgccaccgcgagggaaccagcaccctccaggatgacgaacttgaagtggaatccccgcgtggacggaggctcctgcagcctatagctaggtagggggccgagctcggagctccgcggcggcaaggactgggcgcccggcggaggagtaggcggggaagagattggcggcgaagtcggggcgcgtggagagaccggaggtgacggcgatggctctcagcgacgcagtgatcgctgcgcgcgcggtggcgtcgccggtggcttggtctccaggatcgttcaggtccttgattccagcttccatgtttgggatccgcgccgccgccgcttcttcgccaggtcccgaggatgccgccgccactcggcgttggggcaggcggtgaggagagcgccgtcggtgaggagggcggggcgaggatgcgccaccgccgcccgccatgaccgctccgaggacgacgaccacgagcacgagcacgaggacgcgcacgccgctccactccagaatccgcgccgccgccgtggtcctctcgcgccgccgccgttgtcctcccacgccgccgctccagattcgcgccaccgccgtcctcctcgctccgctttctcattgccgccgagagattcgcggggacgacgcgcgccgccgtgggcgacgacgacgacgccgcgtcggtggcgacgacggcgacctgtgccgccgcgcgctccggctgtgtcgggtgggtgggagtgaaagtaggagagggaaaggggaaaggagagaaaggggaaagtggaagagagaataggttggggtagttgttttgggatcacccgtagtaccctgcactgtaagatgtgtggattcgttgtgtatctatcctatgtggcatacgaggtaacgcaaatgaggtgctgtg

SEQ ID NO: 10923 - DNA, 977 bp, Oryza sativa
  ref <308>: DATABASE ACCESSION NUMBER: AK108271
  ref <309>: DATABASE ENTRY DATE: 2002-08-28
ttgaagaaattagagtgctcaaagcaagccatcgctctggatacattagcatgggataacatcataggattccggtcctattgtgttggccttcgggatcggagtaatgattaatagggacagtcgggggcattcgtatttcatagtcagaggtgaaattcttggatttatgaaagacgaacaactgcgaaagcatttgccaaggatgttttcattaatcaagaacgaaagttgggggctcgaagacgatcagataccgtcctagtctcaaccataaacgatgccgaccagggatcggcggatgttgcttataggactccgccggcaccttatgagaaatcaaaggtctctcctagctgcaatataccactagcagcagggcgcccagttgcgcgatcgatcgatcgagctccgtggtgccaagaacgccctgtacggcgcgccggtatgtgcgtggaggagtcggagggcgcggagaggctggattttggggagcccgccgccgccgccgccgacgccgggaagagcaagagcaagagccccgacgaactcccctcgcctcgggttcgtttgatttcccttcatggcgtgaaggaaggaaggacgatgatgatgagattgggaaggaaggaaggaaggaaggaagcaaagcatgcccttctgggtgcttgctttgtgcacacgcctcttccgtttcttgaaacacatggagtattattagaagtgattgtgattcttttttcttgtttaattattactgctagctagtactgattgtgcctagactgatcgtgtgtgtggaggagttaagttttctgcatttgttagctgcgaagtttggtggcctggtaggtgttcttcttgccaatgtgtgatgatactactactaatactacgttattggtcacctgttcattgcattgttcattggtactttgattttgtactgaatatatataattatagtcgcagcttcc

SEQ ID NO: 10924 - DNA, 1217 bp, Oryza sativa
  ref <308>: DATABASE ACCESSION NUMBER: AK108272
  ref <309>: DATABASE ENTRY DATE: 2002-08-28
gtgttgcgtgctctccgtctcagccatggctgccgctgccgacgctgctccaaagacgatgagagctgtgcagtacgataagtacggcggaggaccagaaggcctcaagcatgtggaagtgccgatcccggcgccgaaggaaggggagttgctgatcaagatggaggcggcgagcatcaaccccatcgactggaagattcagaaggggatgctccgcctcttcctgcccaagaaattccccttcattccagttggtgatctatccggcgaggtggtggagctcggcggcggcgtgagcggcttcaagccgggagacaaggtcgtttccatgagcttcccgaactgcggcgggctcgccgagtacgcggtggcgccggcgtcgctcacggtggcgaggccgcccgaggtgtccgcggccgatggcgccaccttgccggcggccgcgggctccgcgctccagcagctgaaggcggccggagtcaggttcgacgcggacgccgacgccgccgccgccgccggcggccccaagaacgtgctggtcaccgcggcgtcgggcggcgtgggccactacgccgttcagctcgccaagctcgccggcctccacgtcacggccacctgcggcgcccgcaacctcgccttcgtccgcgacggcctcggcgccgacgaggcgctcgactacaggacccccgacggcgccgcgctgcggagcccgtcgggcaggaggtacgacgcggtggcgcactgcgcgccgccggcgccgtggccggtgttcagggacgccctggccgacgccggcggcgtcgtggtcgacctcacgccgggggtcgccgccaccgtcaggtcgttcctgcacagggtgaccttctccaagaagaggctcgtgccgctgatcctgatgcccaagaaggaggagatggagtggctggtcgacatggccaagcaagggaagctcaagaccaccatagattccaagtaccctctgagcagagcacaggaggcttgggctaagagcatggaaggccatgccacgggcaagatcgttgtagaaatgggaggcacagaatgagcattgcaaattgcaatgtacctccctaagtgtgaggattagcaccatggattcatgatgtcataaaaaaaagatgaacagttcggattgagtctgttgtaatcattctcctcatgcaaagattcagcctcgatccagagtcattcacctt

SEQ ID NO: 10925 - DNA, 1128 bp, Oryza sativa
  ref <308>: DATABASE ACCESSION NUMBER: AK108273
  ref <309>: DATABASE ENTRY DATE: 2002-08-28
aaatcccaatccccactcccacctcactccccccctctcttcgcctccctctctctctcctccgccatggtcatggacaagtccagcctcccgccgccgccgccgcctcccgcctcttccgcttccgccgccgccgcctcttccgccctcaaagccctgaacaagtcatcctacaagatctccaagcagacctcctcgtcatctctggcttcgatgaaggcatcccaatcgccaccgccgccgccgccgcatcctcgccgcccttctcctcctccgctcccgccgccgccggctcctccttcgtccgcccccgccgcggttgaccacccgccgccgcaaccgcctgtgtacaacatcgacaagtccgacttccgggacgtcgtccagaagctcaccggctccccctgccacctcctcccgcctcaggctcagccgccggcccccgccgccgccgtctccatgctccctccccagcccccgcctcctaccatcatggcgcctccgcccccacccccgccgtcggccattccgacccgcctccaccgcatccggccgccgccgctggctccgccccgcccgccgcccatcctgcagccggcaccgcccgcgctctctccgcttccgccgctgccggccgtctgcatgacggcggagtcccccatctcggcctacatgcgccgcctccgcgggatgccgtcgccgatccacgtgcccacctcgccgctcgggttcgggtgcctgccctctccacggacgccgccatcgcccggtgtacccatgccggccaccagcccccgcgtccgcgacccgtgaccgagaaccagccatgggtgctcctgctgctgctgctgctgcttccaatgtgtagatatggccggtgtaggagagatctggcgaggcggcggcgacgacgaaaggaggaaggagcaatacaattacaatgtgttagcttcaccttaaaatcttagctcaattttttttagcatgttctacctaccttataatattttgttggtgtatatggcgatgaattgatcatgtttggctaattttgtaacaagcttatgcaatatgtagtagcaaaactcaaatctttatatgcaaaatttatttagaagaatttcatgg

SEQ ID NO: 10926 - DNA, 919 bp, Oryza sativa
  ref <308>: DATABASE ACCESSION NUMBER: AK108274
  ref <309>: DATABASE ENTRY DATE: 2002-08-28
gtcttcctccagccacgccattctgtcgcctcctccacttcttctccttcgccatggctgtgcaggcgcagtatgggggtgggatggcggcggggatgtgcttgccagaccatgaggtggaggcgcagatgcgggagctcggcgcgatgttctcggcggcaggtggtggttgctacaacggcggcggtggcggcggagggtatgactgcgccgccgtggtgagcggcgcggcgcagagcgagctgacgtgcaacaacggtggtgtttgtggtggtgcggtggggatgggggtgggggcggggaggaagcgggagagggaggtggtggagcagtatgcggcggtggcgtcgtccgcggcgctgctgccgatccccgggatgatgaaggtggcggcgccggtgagccggttggtggagtcggggatgacgtcgacgagtgggaggtcagcggcggcggtgggggatgcgctggtgtcggagctgtgcgcgcagagcgcggagatcgacgcggtggtgcggatggagtgcgagcccaagctggacgcttgccccgtctgcctcgccgccaagaacgcctccgtccacatcgccatcaactgatcgaacaccgtcctcctcatcgccatcgatctcgctaactccagatgagtaatttagctagacatagattaggtagggggattagctgaattgatccagttcgttttgttcttttagtattagggtaaaaaaaatgatgacatggttaaattcaattggcgttttgtgttcatcccctctctgtaaaattaccgctcagtggaaaatttcaccgtgtcctcttttggccttccgggtcaagaaaagcttacaagttgtaaaaaaaaaagtcaggcatctgattgtaaaaattgaatgcatggccctttttttaccatttt

SEQ ID NO: 10927 - DNA, 716 bp, Oryza sativa
  ref <308>: DATABASE ACCESSION NUMBER: AK108275
  ref <309>: DATABASE ENTRY DATE: 2002-08-28
aacatacgtaccagctgaatagctgatggcggtgcaaccactaaaacaccgtacccatctctctctctctttctctctataaatttgacacaataaaaagaggggtcatcgttgggtgctcctcatttctctagtgatcttctttttcttttcttttgttttctgtctctagcgaactactagttcttggatccgatcgaccgaccctaccacccttgatttcatggagtgcatggcgagtactgaagagtctctcccagcttcttcctccatggatagttgcagcggcgaactgccgacgacgacgacgacggcgccggcgcaatccacggcgtcttccggctgccgaccgccggcgacggcggcgaagcggcggagtctgatcagcacagatcttcgcctcgggctcaccctctcctccgtcgtccacatcgacggcaacaacccttctaccccaaggcaagatttcgatctctgatcattctgcacacctactgctttaatttcagagaaattttaagatacttgagaaggtattcgatacatagtcgtaagaagtttgctttcggtcttttcggttttcgtttttttttcctcccttgttccctggcaatggccattcgaccggttgcatcgtgtaattgaaatcttgccttttctaatatattgacatgtaactcttttgcgcattcgtgaaaaaaagaaacatgttaaag

SEQ ID NO: 10928 - DNA, 1228 bp, Oryza sativa
  ref <308>: DATABASE ACCESSION NUMBER: AK108276
  ref <309>: DATABASE ENTRY DATE: 2002-08-28
gaacggccggcaagccatggcagccctggcgcagctcgccggagcggcggtgcgggtggcgctcgccgccttgctggcgctgctcctcccggcctaccgcgtctacaggctcaccgcctccttcctcggcgccctcctcgccgccgccgccgacgacgacgtcgccggcaaggtcgtcctcatcaccggcgcctcctccggcatcggcgagcatctggcttacgagtacgcgaggaggggggcgtacctggcgctggtggcgaggagggaggagagcctccgggaggtcggcgacgcggcgctggcggccggctcgccgggcgtcctcgtcgtcgccggcgacgtctccagccccgacgactgccgcaagttcgtcgatgacaccatccgctacttcggtagattggatcacctggtgaacaacgcgtcgatctggcaggttggcaagttcgaagagctcaccgatgtcaaccacttcaggaaactgatggacatcaacttttggggccacgcgtatccgacccgccacgccatccctcacctgaagaagacgcgtggccggatcgtcggcgtcacctccaactcgtcctacatcttcatgccaagaaacaccttctacaatgccagcaaggcggcggcggccaacttgtacgagacgctgaggatggagctcgccggcgacggcatcgccattaccgaggtcatcccgggtgtggtcgagtcggagatcaccaaggggaagatgctcaccaaggagggcgacatgagagtagaccaagatgaacgagacgcgatcctaggggcggcgccggtggagcgcgccggcgagttcgcgagggcggcggtgcggggcgtgtgcggcggggagaggtacgtgttcgagccgcggtggtacagggcggcgtacacgctcagggtgtgcttcccggaggccctggagtggtgcgcccggctgctgacggtgtggcggctcggtccggcgacgacggacacggcgggccggtggctgctcctcggcgtccccggccagcgatggctctccagccggcgtcgctccggtcgccggagatcaaggctcggtgaaggctggagttgtgtgctgcccggctttggctagctagctagcttcgtcgtattgagttttggtcttctctttctcaacagcagcctgcagtctgtatgtaataaacgtgttccagggtgattttcatttgttaggaatactcct

SEQ ID NO: 10929 - DNA, 1126 bp, Oryza sativa
  ref <308>: DATABASE ACCESSION NUMBER: AK108277
  ref <309>: DATABASE ENTRY DATE: 2002-08-28
aacactacccatgaactgatgaacaacctgcagtcagagatggcgtcgccgcgaatctgctgttcggcgctgctcgtgctgctcctggtttcctcgtgcaatgcaggtgaccacccggcctgcccggcggcgtggtcggcggcggtgggggcggagctgttccacggcggcgtcggcggcggcggcggcggggaggcgcagtgcagcgcggcggcgccgcacacgccggtggccgtgttcgcgcacgacgtggacccggtgcggttcgcgctgaacctggagttcgccgaggcggagttcttcctgcacgcggcgttcggcgtggggctggaccacctcgcccccaacctgacgctgggcggcccgccgccggtgggcgccaggaaggccggcctcgacgagctcacgtggcgcgtctgcgccgagttcgcctaccaggagatcggccacctgagggcaatccagaggacagtgggtgggatcccaaggtctgatagacctgagcgcacacaacttcgccagggtaatggacgaggcggtcggctaccacctagacccgcccttcgaccccgacgccaacagcctcaacttcctcctggccgtctacgtcatcccttacctgggcatcaacggctacacgggcaccaacccgctgatcgacggctacgccaccaagcgcctcgtcgccggcctgctcgccgtcgagtctggccaggacgccgtcgtgcgcggcctcctcttcgagcaccgccgcgagacagtgtccccctacggtgccacggtggcagagctcaccgaccgtgtgtcggcgctgcgaaacaagctagggcagtgcggagtgaaggacgaggggctcatcgtgccagagcagctcggcgctgaggggaagatatgcaccaacatcctctccgccaacgtcgactcgctctcctacagccgaacgccggcagagttgcttaggatactctatctaactggcgatgagcacgtacccggcgggttctacccggagggcgctaatgggaggattgcccgaatgttcctcaaaaagccacctcgcattaaccacggtgtctaattagctatgcctacaattggtaaatgggtcctatcctcctattacctc

SEQ ID NO: 10930 - DNA, 763 bp, Oryza sativa
  ref <308>: DATABASE ACCESSION NUMBER: AK108278
  ref <309>: DATABASE ENTRY DATE: 2002-08-28
acgattctcctctctcctctcctcacttatgcctctcggcggcagcagtgccccacggcgacggcggcgcaacggtggaggcgcgggatccggcgggcggcggcagtccccgcatggatccggcgggcggcggccgtccccgcatggatccggcggccggccgccctcccccgccacggatccggcgcgagaaccgcctgccctcccctcccctccccggcagcaacgggagcgcgcgggcggcggatctagcgggcaggcgggcgacgacgggcggcagcggctcctcccatccctctcccctcccctcccctccctggcggcaacgggagcacgcaggcggcggaaccaacgggcgagtgagcgacgacgggcggcccgcggccgtccctgcacggatccggcgcccggtcgccctccccccgccacggatccggcacgggaggctggcgggaggcgccaatgacgaggcgggagcggcgacgctgccgccgccgccgacgaggcgggagcgacggcgacgacccgatctagggttttcttttttttttgaatttttttcggttttctgtttttccgtgcggtggcataagcaaccgcagatttcgcgattttcccaggcgatttgttccagacaggccaaatctctgcacgcaaaaaaccgatttaccgcataggaaaacgcttagtgtagtaatgtgtaagcataacagacaagcccgtgatataattgaacttatatggcaatgttgttttcaatatc

SEQ ID NO: 10931 - DNA, 1056 bp, Oryza sativa
  ref <308>: DATABASE ACCESSION NUMBER: AK108279
  ref <309>: DATABASE ENTRY DATE: 2002-08-28
gcgaggcggcaatgttcaccgacggcatgtcgaggttggcggtgggggtgagcctcatgctggcgctcagcctcgcgctgttcctcaccatcgcggtgctcctcctcgccgacctcttctgctcccacctccgcaggcgctggatgcgcgcggaggagggggaggcgttgtcccggcggcgcgcgaagctcgggctggcggggacgtcgcgcgccgccgcgggcgacgacgacgcggcgtcggtggcgacgacggcgaccaccaccaccgcgcgcgaggcgctgtcgagcaccccgccgttctactacgcgcacggcgtcatgcaggcggcggcggacaccaaggacctcctcctcgccatccccaagctggagtccgccgtgtggaggtggtcgccggcccggcgctcgtcgccgtcctccagctcctccgccaacagcgaccgcttcgtgtgcatctccaacccggtgtacgagcggggcgccgcgcccccggccgacgttcgtggggacacggacacgccattcgagacgcccgacgcctcgccgtcgccatttgggatcacggaggaggtggaagaagagggtggcgagttctcgccgccattgtccgtgatgaggaagctgccgccattgggcgtcgtggcgtgtcccccgccatcgatgggtttcatcgacggccggccgtctctgggcttcaccgatggccggccgtcgctgacggcgtggtcggggacggtcaccgacaccaaccgggcctcctcgtcgtcgtccaatctcaccgctcacttcttctcttcctggtcacccaagtgacagattggaggattacttgtagtatccatatggagtattgatttagcagtagtgcagtgcttgttagctagagctcgattgaattcattgattttctctctttgatatgtccggtccttcgatttgctgggttttgttggtttaatctagcaggttttctctaacaataactaactttgtttgcctcatttgctcatttggtttgtcatgttgatggatagaatcatcgaaagtgttactc

SEQ ID NO: 10932 - DNA, 803 bp, Oryza sativa
  ref <308>: DATABASE ACCESSION NUMBER: AK108280
  ref <309>: DATABASE ENTRY DATE: 2002-08-28
attgccttttcggtcgaatctagcagagcggcgagcaacccccacccactttgactccgatcctccccgcccccagcgcgatagcccatccgatcccaaattccggcgagatggcggtcagcctgtggcgcgcggtgatgggcgcggccggcggcggcggctcctcgtcgtcgtccgcggccggcggcgacgcggggggcggcgtggagttctggcacggcggggagcgcacggggtggctgaacaagcagggggagtacatcaagacgtggcggcggcggtggttcgtgctcaagcaggggcggctgttctggttcaaggacgccgccgtgacgcgcggctcggtgccccgcggcgtcatccccgtcgccacctgcctcgccgtcaagggcgccgaggacgtcatcaaccgccagttcgccttcgagctctccaccccgaccgacaccatgtacttcatcgccgactccgagaaagagaaggaagagtggatcaattccatcggccgatccattgttcagcactcccgctccgtcaccgacgccgaggtcgtcgactacgacagccgccccaactccaagcccccaccgcagccgaagacgagcgaagagagtgaaccgtcagcgtaagatagcggtgatctctggctctcaatatgcatatctattgtatgattttatctactcaagtagtagtaattgtgaatttttagtttttgttttcttctcttggttaattatatgtatattattgactgctacctgagaataagttcaaggttttgccgtgtggctagttctttt

SEQ ID NO: 10933 - DNA, 939 bp, Oryza sativa
  ref <308>: DATABASE ACCESSION NUMBER: AK108281
  ref <309>: DATABASE ENTRY DATE: 2002-08-28
accgccctaccccttccgtcccaactcccaaccccattaccccattccgccctacccctcgaagcaggagaaaggaaggagaggcggcgggagggaagtcgcacgtcgtcgtcggggtcggcggcgcacgtcggaggcggaggcggaggcggcgccctccctccctccctccctgtgtcttcccccactcctcccaaaacccgacggccggcggcgcggcggagggctgcggctgaaggagtctgagagggcggcgcacggcgggtaaccacgaccgaagcatggaagctggaggggttaggaggaggcggagccccatggagatagcagctttttttacaccggcgaccgcagcggcagaggcggttgtcgcgatcactaggaactgggttttttacttctgcatgcgtaccattgtcttcgctggagggttgcttgcgctttttattggctatgttatggctgcctattccaagacctggcttgatagcctgtcgttactgccccttctatttgcagctgtcatcctacctgtgtatgctgcagtggctatccaggatgcacgacgcttggagagagagagggtggtttggatagtgcgcaaggcactcgagattgagggcctgtaagagcggcctgtcttggtttagagagaaagaacaaagattagacacacagaacaacgagtttttttccatgttgtttcttgggcagcgtgatcagtgacactttagcttgtagggaagtagactgaggttggcaggaaattactccactagaacactgggggacaagatggaacttacagggttttcttgctgtgacttgtacagcatgtaatgtaccaaatgatgctcggatgatccatggtgggtctgagatagttcagtgcaaactgcaaagaccataacctgctgataataagcattgtgaaaatgg

SEQ ID NO: 10934 - DNA, 892 bp, Oryza sativa
  ref <308>: DATABASE ACCESSION NUMBER: AK108282
  ref <309>: DATABASE ENTRY DATE: 2002-08-28
gtgcaccaccacgagagcggtggctatgcagccatgcgggcgccgtctcctcggcgccggcaccgcctcgccgccgccgctgccgggcttgggttcggcttcggcccactcgatggaccgcgcgcagcgggcgcacatggtgcgggcgctgggggtgaccaccacggtgctcttcgtcgccagcgtctcctacatcgcgctcaccgcgctctacgcctgcttctgcgacggcggcgggcggcgacggcgagaagacggcgggtcgtcgtcggtgcgccccgagccgtccgaggagaccaagcgcgcgctcgacgggatcccggtgcacgtggtccagatgccgccccgcgacggcggcggcggcggcgccgacgaggagggcggcagcggcgactgcgcggtgtgcctggcggagtacgccgccggggacgaggtgcgcgtgctgccggcgtgcgggcatgggttccacagggagtgcgtcgaccggtggctgctcacgcgcgcgcccacctgccccgtctgccgcgcacccgtcgtcgcgcgcgtcgagggcccggacgacgacgccaaggaggattactgcggcgacggcgagagcgtcgagaggcacggcggcggcggcggcgacattggcttcctgtccgtcgccggcgagtcccgcgtgcttcctgcgatttgattttgctacgagtactcatcagctgtaatagggtacttagtaggtgtttagctcaattttgctagctgtggacaaacgtagcttagtaggatgattcgagtttgtttattggcgagagcaataacgatcatacgagtagtttcactttcagggttacaagttcatgtgcgatcaatctggttatttagttattataccttcttaaaatttctg

SEQ ID NO: 10935 - DNA, 1022 bp, Oryza sativa
  ref <308>: DATABASE ACCESSION NUMBER: AK108283
  ref <309>: DATABASE ENTRY DATE: 2002-08-28
gtgagctatacacactgacagtgtagtgtgctgctctcctagctagctagagaacgccacacactggactggactggatggaggcgtcgtcgaacaccaacgccatggccggcgtgatggcgccgctgatgctgcacggccgcgtggcaattgtcaccggcggcgccggcggcatcgggtcggccgtgtcgaggcacctggcgtccctcggcgcgcgcgtcgcggtcgcctacatcggggaccccgcgccggcgaacgagctggtgagcggcatcaacgacggctacttgcgcgcggaggaggaagagaagcgcgggccgcgggccatcgcggtggaggcggacgtgtcggacgcggcgcgggtgagggcgctgttcgacgcggcggcggcggcgttcggcggcgagatccacatcctggtgacgacggcggccgtgctggacttcgcgtacccggcgctggcggagacgagcgaggcagcgtacgacgccatgttcggcgtgaacgcgcgcggcaccttcctgtgctgccgcgaggccgcgaaccggctggcgcgcggcggccgggggcgcatcgtgacgttctcgtcgtcgggcgtcgggtcgctccggccggggtacgcggcgtacgcggcgagcaaggcggcggtggaggtgatgaccaagatcctggcgcgcgagctgcgcggcacggggatcacggcgaacgcagtggcgcccgggtccacgggcacgccgatgatgtacaccggcaagacagaggaggacatggcgcggtacatcgccgaggcgccgctgggccgcctcggcatgcccgacgacatcgcgccgctcgtcggcttcctcgccagcgacgccggcggctggatcaacgcccaggtcatccgctgcaacggcggcactatctagctaccctggcctgcgcgccaaaataaatgatttctccgttctaaaatataacaacctaaaataaaaaagatatatcatgtactaaaaatttaaacgtaagatttataatattag

SEQ ID NO: 10936 - DNA, 717 bp, Oryza sativa
  ref <308>: DATABASE ACCESSION NUMBER: AK108284
  ref <309>: DATABASE ENTRY DATE: 2002-08-28
gagacgacgccaacgcggcggcggcggcggcggcgaagaggaaggcgaggagctcgtcgtcgccggcacgcgcgcagcgcagcgcagggtcgccgacttgcgtgttgcggtcgcctcgcctcgccgccccgcgctgttgatcggtcggcgaggacaggaggcgccgaggcgggggtgatgcggcggtcgtcgagcggggcgcgcgtgtcgtcggagggcggcagcggcggcggcggagagatcgaaggagtggggctgccgacgtgcgacccgcagtcggcggcggggcggagggaggcggcgcgggcgcgggcgctgcagcgcgccgtgcactgcatcccgctcgtgctgatcctctgcgccctcctcctctggctctccgcctcttgagcctcttcgattgataaccaatgggtgtttcaagtggatctgacgccacaatgtagagtttatagagaaaacaaaatacaagtgaactagatcaggcatgatcaagtaaaacacagagacattaagttacaaaaagattaccacagcaagaagctcatctactacagttatatttttttggtttcccctgaaaagggtagctgttttcggtatagatattctttgaactttagattggagatgagatgatttggcgaccattacagtttgtatacaaaggaagtgtgtactcttttcctacactaagcatgtataatacttacatct

SEQ ID NO: 10937 - DNA, 863 bp, Oryza sativa
  ref <308>: DATABASE ACCESSION NUMBER: AK108285
  ref <309>: DATABASE ENTRY DATE: 2002-08-28
gatcacgagttcttcgagctgatcagcaagatcatcatcatcagctagagctagctaaagtagcttaattagcatcgatcgatgacggaggggaagaagacgaagacgaagccgcacaggagggcgtgctgcctgctgctcgccgccgtcgccgtcctcggcgcgctggtgctggcgctctacctcgtctaccgcccccgtccgccgcgcgtggtggccacgccggtggacgtgacgatcgagctcttcagcctcgtgccgccgaagctgaaggccgccgtcggcgtgcacgtggtggtgaccaacccgagcaactcggcgtaccggtacggcgagtcgctggcgtcggtgacgtaccacggcgagcgcgtgggcgcgtcggtggtgccccgcggcgaggtggaggcgaggtcgacgcggctgatcgagccggcgacggcggtggacgtggtgcgcgtcgccgagagcccgcacttcgcgcacgacgcggccgccggcgtgctgccgttcgtggcggtgaccaccgtggaggggaaggcgctggtgctccggtcgttcgaggtgagcgtgtccgtggaggtggtgtgcttcgtgcagatgtacgtgttccacggcgagagcacctcgcgctgcgtctccaccgtccgcacggccacggaaaccgtctcgtcggagccatccggcgcccgtggcgcacgtaactctgttcctagctatgactagctaaactacacacgtactacgtagtattacactacactacacatgtcacaaactttattatttattggagtactttttacagtgtttcattttgtaatttttgagtgtatatatatacatatatgcattccttcagttct

SEQ ID NO: 10938 - DNA, 697 bp, Oryza sativa
  ref <308>: DATABASE ACCESSION NUMBER: AK108286
  ref <309>: DATABASE ENTRY DATE: 2002-08-28
gagcttccaatccaagtcggcaaagtccccaagtgtaacacgcaggcgagcacaaaaccgcacaaatatgtcgacggtggagcaggaggagctgtccgagtgcgaggtgctgtggccggagacgcgccacggcgctccggggagcccgtatgggccatcgacggcggctcccggaggagcctccagggatcaccgccggcagcgctctgcgcccgtggacattcccaggcccgcccacctgccccgcgggcgcgccgacctggacgacgaggaggaggaggaggagcacgacggcgccatggtgccgccgcacctgatggtgtcgcgcaggtggtcggaggggaaggcggcggcgttctcgctgcggtcggggcccgggcgggcgcaccgggacctcagccacctgcgcaactccgtgttgcggatgaccggcttcatcgaagggtgacagtgacagagaaggcgggcccgccgtcgtctgtgcatacgtgcgagcgaggaaagtagccggtggcaccacgcgtcttcgccacggtgttgggctgttggtcagtcaattttgttgggctcatcttccccgtggctgccagtcgaaatgatgagtctcccttgggttggttcatggaaatcggccggtagcgagtttaggattatttttctcggaatggaataaactactgtgagattcttcagattg

SEQ ID NO: 10939 - DNA, 1018 bp, Oryza sativa
  ref <308>: DATABASE ACCESSION NUMBER: AK108287
  ref <309>: DATABASE ENTRY DATE: 2002-08-28
actcccaacactctctctcctcgctgccgctgccgccgccgccgccgccgccgccgcacacacgcgccggaaatgaagaagatctttggagccaagaagagcaaggacccgcccccatccatccaggacgctaccgaacgaatcaacaagaggggggagagcgtggacgacaagatcaagaagctggacgaagagctcggccgttacaaggagcagatcaggaagacacgccctggaccctcccaggacgccattaaggcccgcgccatcaggcttctcaagcacaagcgcatgtacgaagaacagcgcaacatgctctacaaccagacctataatctcgaccaagtcgctttcgctgccgatggcctcaaagacgctcagcagaccatgaatgccatgaaggccgccaataaagagctcaagggtatgatgaagacagtcaagattgaggacatcgataatatgcaagatgagatgactgacctgatggatgtgagcaacgaaatacaagaatcccttggtagaagctacaacatccctgacgatgttgatgaggaagaactaatgggagaactggatgctttggaggctgatatggagtttgagtcaagtgcagtcccatcgtatcttcaaccagacaaggaatccgatttcgatgcagagcttaatttgccagctgcacctaccgctcctgcagcagtcccagtaagcaggcagcaggtggatgagctaggattgccagcagtccctcgagcatcaatccgcagttagaacagtaattcatgtacctttgcttgtgattggcattgacgtgagaacccattgctatgcaattgcagttgaacaattaatctgtgtatgtgtttctcttcatgagtcgccttgatttgttaaaccgagcttgcagtcttatatcttccactctgccttttagaaaaggggatttcgagttgtgatgggttgaggttgattagatgcatcatatgatgctttgtcggtggtggtggttctttcaatt

SEQ ID NO: 10940 - DNA, 696 bp, Oryza sativa
  ref <308>: DATABASE ACCESSION NUMBER: AK108288
  ref <309>: DATABASE ENTRY DATE: 2002-08-28
gattcactctcctagtcctagagtcctggtccatctttcttggcttcttgatatggcagaccgaccacccgccgcgcgcgcagccttacccggtccgccccggccgctgcgcggccaagcgcacacggacctcccgctccgccggcgcatccagcatcacgcgtacgactccgcgaggctcgtcggtttcctcgccctggctgtcaccctcgcggcgctccttgtcctcgcgggcgtcacgctcaccgtcgccttcgtcgcgcttgtcgtcctcagcccgctcctgctcctcaccagccctctctgggtgccgatggccgccgcggtcttcgtctccggggccgcctcgatcatcggctggtgcctcgccgtgggcgcggtggcggccggcacgtgggcgtaccggtacttcacggggcggcatcgtcgacccgtgggcgcacaccgggtggactacgacgtcggcgcgggcaccgcgagcggctggatgggctactacgcgcgggagtacggcgcgcgcccccgcgtccacgtgaaggacgccgctcccggggcgtaggcggcacgcggctctccttgccgcgtgtggcgtctcgactctcgcggacgtactctcggtgtcgccgtgcgtgtctccatgccatatgttttgtagtgtcacgccttgagcgctatatatattgcaagtttgcaact

SEQ ID NO: 10941 - DNA, 733 bp, Oryza sativa
  ref <308>: DATABASE ACCESSION NUMBER: AK108289
  ref <309>: DATABASE ENTRY DATE: 2002-08-28
gtgtccgcgcgttggtacaccgcagtacgtctcgtgggcacgcagcggcgtgtaccacccctgcaggtgcgcggcggcgtccaccggcgaggagatcaaggagcgttccggcgcgctcgtcctcgatcgatgcagaggcgccgtgagggcgagcgcgccggcgcgcctcccccgtctcctccccgctggacgcccgcgccgcaccggccggcgtggtacgcgccgctgcgcttccacggagacgagacgacgagctcgcacgcacgtacgcgcgcggccgggtaagttgccaagatgaagccgcctcagcgcgcgtgcgcgcgcgcgcgctctccgcacgcccgcgccgcgcgccgacccgatggatcatgcaactgctagctgccggccggtgcgcgctcgggccggcttgttgaatcatgcaagagtggtggcgcctgctcgatctgctgctgcttgatttggctcggttagtttctgctgtatggatcgggcgatcgatacagcagaaaaccatctacaaatagctaggaagaaactccttttgacgcattatcctctcacatgagttactgatatgttggccaccagtagtgggttcacatatcagtaactcaaaatcagataatagtaagttagaggatttgtttctcttacccttcctctattttattgttgctgctatttccatcaagttaattggggctattagaccactgcaaactgatatgag

SEQ ID NO: 10942 - DNA, 869 bp, Oryza sativa
  ref <308>: DATABASE ACCESSION NUMBER: AK108290
  ref <309>: DATABASE ENTRY DATE: 2002-08-28
cagagcagaaagcaaacaacctttggaaaccaaaatgagtggtgataggagaactagctaactaggatcatcttcttcattatacagttccaaagatgatcaccacctacatggcgatctagagtctagacacaccatttcatgtacaaacaaagctgggatccatggctgaactagtagggtacgcctccagcgcgaggggactgatcaagatgatcatggccaccgtgcagacggcgaagcggaacaagaagcagtgccgggagctggaggagcgcgtcaggatggtctccgccgtgctgagccgccaccgccgccatgagctgcagccgagcacgacggagacgacgatggcggcgcggctgccgccgggggcgagggaggcggcggacgggctcgacggcgtgctccgggaggcgcacgagctcgccgtcgcgttcagccagagcggcggcggcggcggcaagaagacggtgcggcggcgcctcgtctgctgggcgcggcgggtggtcggcgcccggcgggacgccgagaggctcgccagcgtcctgagcaggatcgacttctacctctcgctctaccccgccattgcccacgcagacacggcgtgtcgcgtggaccggctgctgtggacgaccaccgtgaatgtcgtcgtctccgccgccgtcgccttcgccgggtttgttgttgtctccatctccatggtttcacgcaagaaataatctgatcgacggacagtagtgcaaaccctggctgatgtgtattgatacgtatgtgtgtgcaaaagaactctcagtgtagtcgctttaccgcgagttgcatgtgcagttatgggaatatctatacatatttcccttttttattaggat

SEQ ID NO: 10943 - DNA, 668 bp, Oryza sativa
  ref <308>: DATABASE ACCESSION NUMBER: AK108291
  ref <309>: DATABASE ENTRY DATE: 2002-08-28
agcaccctccacccgacgactccgattctcgacaaataccgccaacatgcccggtgtctctgttcgtgatgtccaggcggacaagttcatcaacgcctacgctgctttcttgaagcgtcagggaaagctccccattcccggttggagcgacaccgtcaagaccggtcaccttaaggagcttcctcctcagagcatcgactggtactacatccgtgccgccgctgtcgcccgccacatctacatgcgcaagactgtcggtatcggccgtctccgcaaggtccacggtggcaccaagaaccgtggctcccgcccctctcaccacgttgacgcctccggctccgtcgaccgcaagatctgccagtctcttgccaagatcggtgtcctcgagaacgacgacgacaagggtggccgccgcatcacccagtccggccagcgtgacttggaccgtattgcccagaccaccgtcgaggccgaggaggaggaggatgaggacgacgagtaaatgtcctctctgacttcgggttcttaattgctgcaaaggcgcctggcgcaggaggattgcgggtctgaatggacgggtcgagggaactcgaacttcataggtgtctcaagcgctgagcactggaaacaggctgctatcttgatcaatcaaaagttttcctgcgccg

SEQ ID NO: 10944 - DNA, 874 bp, Oryza sativa
  ref <308>: DATABASE ACCESSION NUMBER: AK108292
  ref <309>: DATABASE ENTRY DATE: 2002-08-28
aacccacgcttcaacgcccatcgccaatctatacctccctgcaccggtgaaagtacgtcaatcgtaaccttcaccaacagcaaacatgggtatctctcgtgactcccgtcacaagcgcagcgcctctggtgctaagcgcgcatactaccgcaagaagagagctttcgagaagggccgtcagcccgccaacaccagaattggccccaagcgcatccacctcgtccgcacccgtggtggtaaccgcaagttccgtggtctccgtctcgaatccggcaacttctcctggggcagcgagggtatctcccgcaaggtccgcatcgtcggtgtcgccttccacccctccaacaacgagctcgtccgcaccaacaccttgacccgctccgccgtcgtccaggtcgatgccacccccttccgtcagtggtacgaggcccactacggtcagccccttggccgcagacgccaggccaagaccgaggaggaggtcaggctcagcaagtccgttgagagcaagcagcacgagcgtttcgtcgcttccggcaaggccgccgccgcgctcgagaggcagttcgaggccggtcgtctctacgccgtcatttcttcccgccccggtcagtccggtcgctgcgacggttacatcctcgagggcgaggagctcgccttctaccagcgtgccatcaggaagtagagaactactttggattggcgttccggtacggaaaaagctgtgctacgcgggcgttcagcttgcggaagagggaaagttcaacatgggtagctccttataccatacgacaggaatgcctatatgagagttcaagcctaagtctacttgtgtagcatagcgtcacaaattagaaaagatgatgccctcccc

SEQ ID NO: 10945 - DNA, 600 bp, Oryza sativa
  ref <308>: DATABASE ACCESSION NUMBER: AK108293
  ref <309>: DATABASE ENTRY DATE: 2002-08-28
cgatcagcaagatcaagaccaagtcgcccaagattctggtcgaagcgttggtgccggacttttcgggcgatcaggcgtgtatcgagcaggtcgccacatctgggttggatgtgtttgcgcacaatgtggagacggtggaacgtacgacgccgtcggtgcgcgatcgacgcgccaaataccgtcagtcgctcgctgttctgcgacacgcaaagacggtcaagccggatttgatcaccaagacctcgatcatgcttgggtgcggcgaacaagatgccgaagttgaacagacgctgcgcgacttgcgcgaggccgaggtggacgtggtgacgtttggacagtacatgcgtccgaccaagaggcatatgaaggtgcacgagtatgtcaagcccgacatgtttgcgcactggcagaagcgcgcccaagggctcgggttcctgtatgtcgcaagtggcccgctggtgaggagcagctacaaggcgggcgagttctttatcgagaacgtgctcaagcagcgcaaagctcagcaggccacagcacccgtagacaaggagaacgaggttagggcgacggtttagatagcaaaattgcaggtttttttgg

SEQ ID NO: 10946 - DNA, 903 bp, Oryza sativa
  ref <308>: DATABASE ACCESSION NUMBER: AK108294
  ref <309>: DATABASE ENTRY DATE: 2002-08-28
gttttagtagaaggggcgaggaagggatggaatggccgccgtttgcagttaccgtcaagagagtttggtgaggtagcgcgagtcctcgtcgagcgccaccatcgcctgctctaatcggaccaatcggcagtgaccggtggccgggagagctagcacggccagcgagcaggctggctgcttgcgagagagcagcgggaggacgagcacgcggagaagaagtgacgacgctcatgccgtgcacctgatccattgctggatccgccgtcgccgagcaccccgccacccgctgccgtcgccgatcccgccgccgcttccctcgccctccccaccactggagcccgccatcgtcgccgtcgcccaagctgagcccgtcgccgttgctgtcacacgagctgtcttccaccatcacgccgagcacgcggacaataagcggcgagcagggcggcgagcacgcgagaagccgttgtgacgccgtttgctaatcccaagttggtccgtcatattttcccggatcagttggtcccggatctaagaagaatattcctctccaggaccaatccatcccactcacccctcaaccaaacacctctaaaaatgggttcatcctgttccattccatcccatcccagcaaccaaactcaaactctaccgtagagtttggttaactttggaggagaatttaggcgcaggagaaggcctcatctttccgcttatgctaatacttatccgtaaaaatttaaaattttcaaccttaaatttagagctgattttgattttttttattaaaatttattttttagtctttgcttctagatcactagaaacacatataaaagtttttattcactcttacttttcatttacggttcgcgaataaaaataatagtagtaaaaaatataagt

SEQ ID NO: 10947 - DNA, 546 bp, Oryza sativa
  ref <308>: DATABASE ACCESSION NUMBER: AK108295
  ref <309>: DATABASE ENTRY DATE: 2002-08-28
atcaagactatccaaaatgacgaagaagagacgatccggcggccgcaacaagtccggccgaggccacgttacgtttgtgcgatgctcgaactgtgctcgcgccgtccccaaggacaaggcgatcaagcgcttcactgttcgcaacattgtcgaggctgctgccatccgtgatctgtcggaggcgtcggtgtaccaggagtacgctctgcccaagctgtacatcaaggtggtctactgcgtctcgtgcgcgatccacgcccacattgtgcgtgtgcgctcgcgcgagggtcgccgcaaccgtctgccccctccccgtgtccgctacaacaaggacggaaagaagatcaaccccgccgtcgcccagatccaggcccagcgcgcttaaatcttcctttcacccatccccagcctcctgcaggcgtccaatgccgatcggaggctgtaaaatctcgattgcgtaggaggactttccttcgatgcgagagagtcgcacctgctcaccgcacacacacacacacccaaaatatcatccttctcctaaaagcc

SEQ ID NO: 10948 - DNA, 787 bp, Oryza sativa
  ref <308>: DATABASE ACCESSION NUMBER: AK108296
  ref <309>: DATABASE ENTRY DATE: 2002-08-28
ccccttctcccacggcacgacgcggcgcatgaactcgttgcggaacctctcccgtctggtgaggaacggcgactcccgccgcttgcaatcagtgaggaacctctcgccgctcagccactcctgctggtccctctccccgagcttcgcgtgctcctgctcgctgcatcgcccgctgctcccctccgccgccgcggcgctcctcgcctcggcgctgcccacgccgcccttcgaggagccgtagaaccggcacagccgccgccccgcgccccacggccgcggcgccacggcggcgccgaatctcctggcgaagcatccctcgccgccgcctgcgctggccgagatggcgagggagaccggcggccgcgtgaggaggcagcgcagccgcatcgcgtagtacatctcgggcggcctcgggagggggaatgggatggaatccgcagggttaggaggccgtggagccgggcatgtggtgaggaggaggaggaggagcggatggcgcgatggggagattggaatccggcgtgcgacgaagacggtggcgcaaggctgcgctgtgacggcgaggagggagacggagacgccacggcaatcttcttcggttcttcccccggctctcggcctcggctaatccgcttctcacgccgggccgctcttgccttggggagttgggagcttctggtgttgggtctctacaattttgggccgaatttgaaatgggcttctggtaagtatcagcagttcagcctgtatcatctgtatttgataaaagtctattttaattccctcc

SEQ ID NO: 10949 - DNA, 617 bp, Oryza sativa
  ref <308>: DATABASE ACCESSION NUMBER: AK108297
  ref <309>: DATABASE ENTRY DATE: 2002-08-28
ataccgcgccatcgagcgacagctccccggccgtgaaccgggacgagctgctacgcctgctgctgcacacaagctcaagtggccggccgagtcgtccgttcaccgcggcctactgcatctgccggcaaggagctgaaagatgagggctgcggggaagccgacgagcggcggcagcggcacgtcgaggtcgagcaacatccgtggcctactgcaggacttcctggagcagcagcaccggctggacgtgcgacggcaggaggcgctggagaggcacgcgcaggagcgggcggccatcgagcagcaatggagacagtcgatgcaggcgctggagcgggagaggctgatgctcgagcaggcgtggatggagcgagaggagcagaggagggtcagggaagaggcaagggctgagcggagggacgagctcctgaccaccttgctgaacaggctcttgcaggatgatgatttgtagggatgatgtgagatgtctaactcaaacagagaatttaccatgtcttaggatcatagctagatgggaatactttttttctagatttgtgtatgtgaatcttatgttgttccctgttgaattctttctgctaaatattcttttacccgct

SEQ ID NO: 10950 - DNA, 1190 bp, Oryza sativa
  ref <308>: DATABASE ACCESSION NUMBER: AK108298
  ref <309>: DATABASE ENTRY DATE: 2002-08-28
ccgatccagccatggcggaggccgccgccgccgcgtccaactccacccccgcctcgcctcctcctccgcccgccgccgccgccgcgctcggcctccccgacctctccgtgccctacgaactggcgacgcgcgggcagtggaagtcgctgctctcccacctcgacgacgcgtcgcacccgcggcaccgcctcctcctctccgcgctctccgccctctcgctcgccaagctccgccgctacgcggacgccgcggcgctcatcgcctcgctccgcccggacccgggctgcccgccgccgcccttcctcctccgcctcctccacgccctgctcccgctcttcctccccgccgaccgccccctcgccctcgaccgcctctacaccctcctctcctccgtccgcgcccgccccgacgcctcccacccggagtggcgccgccgcgagtccctcgtcacgtccctcctcgccgccgaccacctcgcccaccgcgagttcgacgtcgccctcgcgctcctcgcgtccgtcgcggcgctggacccgggcaacccggcggtcctctcccgcctcggctacgcccacctccagatcggcaacctcgccgctgccgcggccgcgttccgccacgtggagtcggtggccggcggcgacccggcccacgccagcctcctcgcccgcaaccgcgcgctggagtgcgtggtggccaaggactacgcggcggcggtgcgggagtacgagcggtgcatcgaggcggacgccgcggacgcggtggccgtgaacaacaaggcgctgtgcctcatgtactcgcgcgacctcggcgacgcgatcaaggtgctcgaggcggcgctggagggccacccgacggcggcgttgaacgagacggtggtggtgaacctgtgcagcatgtacgagctcgccttcgtcaaccacgccgacgtcaagcgcagcctcaccgactggatcgccagggtcgcccccgacgacttcgacccctcctgcactcgcatgtagggggaattgttggaattctgttcttcaaattcgcttgaatttgtgtgaaagatttgctgaaattgggatgtacaatttgggggttagcaaacaatgggtttcagttgattgtcctacctgggatcaatagctttctgttgttgctcaattaatatcgatatattactcttgtgaatttcattactt

SEQ ID NO: 10951 - DNA, 949 bp, Oryza sativa
  ref <308>: DATABASE ACCESSION NUMBER: AK108299
  ref <309>: DATABASE ENTRY DATE: 2002-08-28
aaccaacgcctacacgacaacgaaggttcgcatatctgaacgctcgtcccgccgttcagactactaatccacagcccgacacaatggccaccgctcagggtcagatctccaagcgcaggaagttcgttgctgacggtgttttctacgccgagctcaacgagttcttccagcgcgagcttgctgaggagggttactccggcgtcgaggtccgcgtcacgcccaccgtcaccgacatcatcatccgcgccacccacacacaagacgtcctcggcgagcagggccgccgcatccgtgagctcacctcgctcatccagaagcgcttcaagttccccgagaactctgtctcgctctacgccgccaaggtccagaaccgtggtctctccgccgtcgctcagtgcgagtccctccgctacaagctcctcaacggtctcgccgtgcgaagggcgtgctatggtgtcctgcggttcatcatggagtctggcgccaagggctgcgaagtcgttgtctccggaaagctccgtgctgcccgtgcgaagagcatgaagttcactgacggtttcatgatccactccggtcagcccgccaaggacttcatcgacgaggccacccgccacgtcctcctccgccaaggtgtgctcggtatcaaggtcaagatcatgcgtggcgccgaccccgagggcaaggccggccccgccaagtcgctccccgactcggtcaccatcatcgagcccaaggaggagcagcccgtcgtccagcccatgtcgcaggactacggcgcaaaggcgatcgccgcccagcaggccgccgagcagcagcggcaggccgagcagggccaggctgagggcgaggccgcgcccgccgagggctactcggaggagtagacccgccgcatgtacaagcagggctgcactacgttaacggattaaacgagattattttcttcttcttc

SEQ ID NO: 10952 - DNA, 1250 bp, Oryza sativa
  ref <308>: DATABASE ACCESSION NUMBER: AK108300
  ref <309>: DATABASE ENTRY DATE: 2002-08-28
actcttcttcctcctcccctctcctggtcaggtcactggccagtggtcacagctcgccggagaggaagacaagcttgtggtggtcgccggccgattggcaatcattcggcaacgacgaccgatgctggttcagccgccgaacgccgtggcggtccgggcgacggcggcgggcaaggagcccctcttctcgttcggcgtcatcgccgacgtgcagtacgccgacatccccgacggccgctccttcctcggcgtcccccgctactaccgccacagcctcaccatcctgcagagagccgtccgctcctggaacgcccacaaccacaagcatcccgtcgccggcggcggcgtccgcttctgtgtcaacttcggcgacatcgtcgacggcttctgccccaaggacaggtcgctggctgccgtccaggccgtcgtcgccgagttcgaccgcttccatggcccggcctaccacatgctcggcaaccactgcctctacaaccttccccggagcaagctcgtgtcgctgctcaggatgccgtcggggcgcgcctactacgacttctcgccgttcccgggctacaggttcgtcgtcctcgacgcgtacgacttcagcgccgtgggatggccgcgcggccacccggtggcggcggcggcgaggaggttcttggacgagaggaacccgaacgcggacaagaacagcccgagcggcctcgccggcgtggaccggcggttcgtgatgttcaacggcgccgtcggcgaggcgcagctgcggtggctggacggcgtgctgcgcggggcggcgcggcggcgggaggcggcggtggtgtgcagccacctgccgctgcaccccggcgcggcgtcgccgtcggggctgatgtggaactacgaggaggtgatgcgcgtggtgcaccggcacggctgcgtcgcggcgtgcctcgccggccacgaccacaggggcggctacggcgtcgacgcccgcggcgtccaccaccgcaccctggaggcggcgctggagtgcccgcccggcaccgacgccttcggccgcgtcgacgtgtaccccgacggcctgacgctcgtcggcgccggcaggatgggcagcacagacatgcggctccagctccactccccagtgactgagctcagctagctaagctaaatcccctctgctgccgccattgtgctaatgcaactgttgtaatagtggcaatgtgattgacagcacgtttcatgcatccctaaaaaaaaataatctagtg

SEQ ID NO: 10953 - DNA, 638 bp, Oryza sativa
  ref <308>: DATABASE ACCESSION NUMBER: AK108301
  ref <309>: DATABASE ENTRY DATE: 2002-08-28
gaccaacgcgcgcgagagacggacagacaccagctgctgcaaccgcgcggagcatagcgagagctttagccgagtcgacgccgccgacgatccgcttccactccacctgccaccaccgcccgtcgaccgcgccccgcaagagacctcttcgccgtcgcctcgcgcccacgacgtgcgcgcgccgcgcggtccggtcatcgccgccgcctcttcaccgatcgatacggcggcagccgcgatcgattcccgcgcgagcgcgtactacaacgtggtacgttacgtcccgtccgcgctcctccccgcgtgtgctccgcgcggcaaaacgccgggacgcccgcttcgcccaaccaccacccacaaaatccccaagcatcggagagttttgacggacactggactggatccgaccaaacaacgggagcaaccaatccaatccagcaagtaataatccgtactagtttggtaggagtacttgagtactgacatgacgccacagattcacagctgcattcattgtccacagtgtcaatcaacccccaaatccttcacaactccaccggtaatggtaaagaagcagcacagctactggccgaggctgactctactgttccatcatttttcctactctctccgtcatc

SEQ ID NO: 10954 - DNA, 546 bp, Oryza sativa
  ref <308>: DATABASE ACCESSION NUMBER: AK108302
  ref <309>: DATABASE ENTRY DATE: 2002-08-28
cagcacggttgtctcccccgcgttcaacctcaagctgcgcgccgagaacccgcgcgccttccggccatggtgtctcgaccgcggggacgtggtggtgtcctactccggcgtggcactcgcgtgggggcgcgtcccgggcttctgcgtgaggaggagggcgatggccgagctcacggtggtgccctggggcaaggacgtccggttgtcggaggatctacgcgaccttcttgtctcagagttgcagcagggcacagcgaaggtttccgtcgagatgaagctgcactactacgctaatttcggcatggctgccttcgcgcccagctctgggacgacgtcgatttcacaggagcttctcctggactcctgggaggacaacatgaatagcagtttgctcaagacgaaggctggtctcccgggaagacaagatgaataatatagtttattcaagatgaatcctgacgagttattctttttctttgttgcgttttcttttgtgaactcagcataattttgcttcttctaattaatataataacatttcgtatt

SEQ ID NO: 10955 - DNA, 878 bp, Oryza sativa
  ref <308>: DATABASE ACCESSION NUMBER: AK108303
  ref <309>: DATABASE ENTRY DATE: 2002-08-28
aaagcgcacgcacgcacgcacccgtcggtctccaactccaagaagcggaggcgggagcgagcagagcaaaggtgcgatggcgccggcggtgaaggtgtacgggtgggcgatgtcgccgttcgtggcgcgcgcgctgctgtgcctggaggaggccggcgtggagtacgagctcgtccccatgagccgcgaggccggcgaccaccgccagccggacttcctcgcccgcaaccccttcggccaggttcccgtcctcgaggacggcgacctcaccatcttcgagtcccgcgccgtcgcgaggcacgtgctgcggaagcacaagccggagctgctgggctccggctcgccggagtcggcggcgatggtggacgtgtggctggaggtggaggcccaccagcaccagaccccggcgggcaccatcgtgatgcagtgcatcctcacccccttcctcggctgcgagcgcgaccaggccgccgtcgatgagaacgtgggcaagctgacgaagctgttcgacgtgtacgaggcgcggctgtcggcgtcgaggtacctcgccggggactccctcagcctcgccgacctcagccacttcccgctcatgcgctacttcatggacaccgagcacgcgtcgctggtcgatgagcgcccgcatgtcaaggcgtggtgggaggagctcaaggccaggccggcggcgaagagggtgacggagttcatgccgccaaacttcgggttcggaaagaagccagaggagtgatgacaaagaacgagcaccgagcgagcatgtgacgcaccggcatacgtgttctgtggtcggtgcgaccatggctcaatgttttgcgttgtttgtgttccacgcatgaataaaacaaaatgctttcggtttc

SEQ ID NO: 10956 - DNA, 859 bp, Oryza sativa
  ref <308>: DATABASE ACCESSION NUMBER: AK108304
  ref <309>: DATABASE ENTRY DATE: 2002-08-28
aaaaatcgcaaatccacccacccaaactcacgaattcgatggacaccgacctcggcggcggcggcggcgcgtcggggatggacgaagcggaggcggccttcttcgcgcggcgcgggcggcggtgctgctgcttcccctggccctcgtcggcgtcgtcccaccagcgggtcggcggggcggaggaggagagctggtggcagcgcgccgtggacgcggtgctcaaggtgcgggagtggtcggagctggtggccgggccgcggtggaagaccttcatccggcggttcggccgcggcggcggcggcggcggcggcggcggcgggccgcggccgcacaactacggccggaagctcaactacgacgcgctcagctacgcgctcaacttcgacgagggccacggcgccagccccgagggcgactacaccggctaccgcgacttctccgcccgcttcgccgccccgccggcctccgccaagtcgtccatggacctcggcggccgcgacgccccgccgctcttcaacccgccgccgccccacgacggcgccggccgggcttgacctctcgttcctctcccccacaatcacttcaccggatcaaacgagaacacggcgtcctgtcctcgatttgcttcgggttgcaatgtcgtgatttggtgagaagcgagatcgatcgttgtttcggttcggttcccctctcatcttctgtttccttcaattgagttcgttcgttactgtacaaaaaagaacatagatttgtttaattcgttctctgtcatcgaattgtcgccgtgaattcgtcgatcgtgtcgtgccacagttttgtcccgattgaagcaaacacgtttgaagttttttgatcgatc

SEQ ID NO: 10957 - DNA, 788 bp, Oryza sativa
  ref <308>: DATABASE ACCESSION NUMBER: AK108305
  ref <309>: DATABASE ENTRY DATE: 2002-08-28
ccatgagggcgttcatgcccacgtacaagaacctcaccgccgacggcaaggcgtcgctgctgctcttccacgccgtcccggtctactactcgctgcggagcctcaagtccaacaacggcgtcatgaacaccctcgccaccgacggctccgccaagaacttcaacttcacggtgcagaacgagggcgacaaggtgaccatcaagacggacgcctccgacggcgtcgcgcggatcaaggacacggtgtacgacaaggaccccatcgccatctacgcggtggacacggtgctcgagccggtggagctcttcgagcccgccgagtccccggcgccggcgcccgccccggtcgccgacgcgcccaaggcctccaagtccaagaaggcgtcccaccggcacgtggcggacgcgcccgggccggccggcgacgacgcgccgcccgccgaccagaggaagagctccaagaagaacgacgccgccgccggcgcctcgtgcctgcggtggctcgccgccctgcccgtcgccgtcgccgtggccgccgccttggcttagcggcgctcacatttcgaggtggatctgcaggagagggtggcggcggcgcgcggagtgtcggtgggcggtgtcagtgcgtgttctagtggcgtgtgcgtgtgagacttgtgtttttttttcttggatggaaactgcataaaaatttgtttgtttttcttctttgttctttcttactgctccattgatgttgttagcatgaaaaagaaaaatcaaatattgatgtggcatggatattcgaac

SEQ ID NO: 10958 - DNA, 671 bp, Oryza sativa
  ref <308>: DATABASE ACCESSION NUMBER: AK108306
  ref <309>: DATABASE ENTRY DATE: 2002-08-28
aaggagcgaccaaaaatgggcttcgtcacggcggcggccgacgcggtggtggcgctgctctccttgaccatggcggtggcggcgccgctgttcgacgcccaggtcgtcctccctcgcggcctctacccggcgccgctcgtcggcatccaccggtggttcgccgccgagttcggccactacctcgtcgccgacccgccgcccttcttccgcggcctcgtttggctcgacctcgccttcctctggccggtctgcgtcgccaacctctacggcatcctcgcgcgccgcccctggtccgccgccacctccatcatggcgggcgtctacgtgctcacctacatgtctgcaatcttcggagagatgctgggctcaggaagaacaacaccgaagctgattcagctgtacgttccattcgctctggctgctgtaactgcagttctgcgtggtttctgctcatgctcagcacaggctactgctgttgcatctcatgccccaactgctcggaagaaaaggctctagatcagatgtaagtttacaacatatgtcctaaaagagatcagatgtaagtatcactagatgcaagatgcacacccaaaagagaattgatgcacacacttgtacagtttaccagtaccattcactatattccgattcactcggatgtattccgatcc

SEQ ID NO: 10959 - DNA, 1652 bp, Oryza sativa
  ref <308>: DATABASE ACCESSION NUMBER: AK108307
  ref <309>: DATABASE ENTRY DATE: 2002-08-28
ttatcaaccagcccatcctgctcgagctcgaggcgcccatcaagatctgtggcgacatccacggtcaatactacgacttgttacgcctcttcgaatacggcggcttcccgcccgaggccaactacctcttcctcggcgactacgtcgaccgtggcaagcagtcgctcgagaccatctgcctgctgctggcgtataagatcaagtatccggagaactttttcatcctgcgcggcaaccacgagtgtgcgagcatcaaccgcatctacggcttctacgacgagtgcaagcgccgcttcaacatcaagctgtggaagacgtttaccgactgcttcaactgcctacccatcgccgccatcattgacgagaagatcttcaccatgcacggcggcctctcgcccgacctgcagagcatggagcagatccgccgcgtcatgcgacccaccgacgtgccggacacgggtctgctgtgcgatctgctgtggtcggatccggacaaggacatctcgggctggtcggaaaacgaccgcggcgtgtcgttcacctttgggccggacgtcgtgtctcggttcttgcaaaaacacgacatggacctcatctgccgagcgcatcaggtggtggaggacggctacgagtttttcgccaagcgccagctcgtcacgctgttctcggcgcccaactactgcggcgagtttgacaatgcgggcgccatgatgagcgtcgacgagacgctgctgtgctcgttccagatcctcaagcctgcggagaagaagcagaagtacgcgtatggcggcatcaacatgggtaggcccgtgacgccgcccaggaagcagaagaagaagtcggatggcaagtgagcgcgcatgtcgctgcgggggccggcgctgggtggggagggggttgggtaggggcagaaaagctcaagcggggacgcagcgaggaacaccagtcggccggcaggcgggcagtcgcgcaggcaggcgggcgggcaggcagtcagtcgggcacaagtcggcgcaagtcggcacacgagcagatgcgccgtctttgctgtctaacgtcatctgcgcgcgatggagtgagcaggtgacgggcgttccatcggatgcgccgatcagcacaatcgatgccaatcattcgtctttgcgcgttttctctacagtcactgtgccgacagtcactgtgccgctctgagccgcctttgtcggcccccaacgggactcgcgcaaagcccagttgcgggcgggaggaagagcagcgcgttgaaccccgcgccgcatcgcgcacgttcgcctgggtctcggatctgccgtggtcacaatactggctgggcaacatctccgaggtagcgggttttcattcggacccgcacccgacggcctgcatcgcatcgcccatgcctgctctccctcgcctcgaaccactctgccccttccgtctggcctcacctctttcgcctactcgtctctccctcctctctctctctttctcttttctcttttgtttctggcttgcttgcttcactcgttcggcgcgtctctcccccctctctctctctctctctctctctctcgccactcaaccctcttcccccctttttcttttcttgttcaagtgtgcctgtctcttttccaaatttcagtcttgttggttcg

SEQ ID NO: 10960 - DNA, 746 bp, Oryza sativa
  ref <308>: DATABASE ACCESSION NUMBER: AK108308
  ref <309>: DATABASE ENTRY DATE: 2002-08-28
cgacaaccagctgaacagctcgcgcaacgggctgacggtgttcgcgccgacggacaacgcgttcacgtcgctcccctccggcacgctcaactcgctgtccgaccagcagaagaactcgctggtgcagtaccacgtgctgtccacgctgatccccatgtcgcagttcgacaccgtcagcaacccgctccggacgcaggccggcagcaactcgccggggcagtacccgctcaacgtgacggcggaggggcagcaggtgaacatctccaccggcgtcgtcaacgccaccgtcggcaacgcgctctacaccggcgacaacctcgtcgtgtaccaggtggacaaggtgctgctcccgatggccatctacagcacgccggcgcccgcgcccgcgccgctgtcgccggcgacgaagaagaaggggaagacgccggccacgtcggtcgccgacgcgcccgaggccgccgacgcgacgccggacgcgacgaccccgtctctcgcggcggcgagggtgacggccggtgctggtgtcggggtggttcttgccttggcgagcgtctggttggggctgtgacgatgaggttgatgacaagtttgagcgagatctctgtattgtacgcgccttccataattttttctgttgttttttttctctcttaattttttttgttgttgaaaaggtgttcttttcttaatgttctgtccatttttggttgaattattgctcgtcatatcattaccattattattgt

SEQ ID NO: 10961 - DNA, 1845 bp, Oryza sativa
  ref <308>: DATABASE ACCESSION NUMBER: AK108309
  ref <309>: DATABASE ENTRY DATE: 2002-08-28
tggtcttcaacgaggaatgcctagtaagcgcgagtcatcagctcgcgttgactacgtccctgccctttgtacacaccgcccgtcgctcctaccgattgaatggtccggtgaagtgttcggatcgcggcgacgggggcggttcgccgcccccgacgtcgcgagaagtccattgaaccttatcatttagaggaaggagaagtcgtaacaaggcttccgtaggtgaacctgcggaaggatcattgctcacatcaacgtcgtggtcatcggccacgtcgactccagcaagtctaccactaccggtcacttgatctacaagtgcggtggtattgacaagcgtaccatcgagaagttcgagaaggaagccgccgaactcggcaagggttccttcaagtacgcatgggtcctcgacaagctgaagtccgagcgtgagcgtggtatcactatcgatatcgccctctggaagttcgaaacccccaagtacaacgtcactgtcatcgacgcccccggtcaccgtgatttcatcaagaacatgatcactggtacctcccaggctgactgcgccattctcatcattgccgccggtactggtgagttcgaggccggtatctccaaggacggtcagacccgtgagcacgctcttctcgcctacacccttggtgtcaagcagctcatcgttgccatcaacaagatggacaccaccaagtggtctgaggcccgttaccaggagatcatcaaggagacctccggtttcatcaagaaggtcggcttcaaccccaagcacgttcccttcgtgcccatctccggcttcaacggtgacaacatgatcgacgtctccaccaactgcccctggtacaagggttgggagaaggagaccaaggccaaggccactggcaagacccttctcgaggccattgacgccatcgactcccccacccgtcccaccgacaagcccctccgtcttcctctccaggatgtctacaagatcggtggtattggcacggttcccgtcggtcgtgtcgagaccggtgttatcaaggccggcatggtcgtcaccttcgcccccgctggtgtcaccactgaggtcaagtccgtcgagatgcaccacgagcagcttcccgagggtcttcccggtgacaacgtcggcttcaacgtcaagaacgtctccgtcaaggagattcgtcgtggcaacgttgccggtgactccaagaccgacccccccaagggctgcgacagcttcaacgcccaggtcatcgtcctcaaccaccccggtcaggtcggcgccggctacgcgcccgtcctcgactgccacactgctcacattgcttgcaagttctctgagctcctcgagaagattgaccgtcgttccggcaagtccatcgagtctggccccaagttcatcaagtctggtgacgccgccatcgtcaagatggttccctccaagcccatgtgcgttgaggccttcaccgactaccctcctctcggacgtttcgccgtccgtgacatgcgccagaccgtcgccgtcggcgttatcaagtccgtcgagaagtccgacaaggccggtgccggcaaggtcaccaaggctgcccagaaggctggcaagaaatagattagttcatgaccatgctccggcgttcatgacttctcttttcttcacgtagcttatgcaaccactcatgtgctgtcttggtcaagggaacagtgcatgtttacaatgaaaaaattcctcgaccaaaaacttttcctttgtcacttggcacgaaaatcatgaagcgatgtcgttggcagactaaggtctgctcagtttagattagcttccagcaaaatcaaaccagcgtgaaagtctcc

SEQ ID NO: 10962 - DNA, 858 bp, Oryza sativa
  ref <308>: DATABASE ACCESSION NUMBER: AK108310
  ref <309>: DATABASE ENTRY DATE: 2002-08-28
gagactcctcgaatcctcgactcgagcaggagctcccaacccccggagagatctccggctgcgaggcgcgcagcggcggcggccgcggctcgtcgccgccatgcgccgcttcgtcggggccctccgcccgctccgcaccctaaccctcagccccatcccgacggcgctccgcgtcctctccaccgcctcggcctcctcttcctccgcctccgccgccgcctcctcatcggactccgactccgccgccgccccggacgccgacttcgacagctcggagttcgcgctgccgccctcggggccgacgccgccgccgccgccgcagcaggcgcgcaacccggtctccgcgctccggaagctccggttcgacccctccctccgcgcgcgcgccgacgaggcgctgttcgggaaggagaggggtggggtggacgatgcggtggaggaggagcggtcgcgggaggttgcgctggccctgctcgaggccgcgctcgagccgcccgccgacgacttgggccctggcgaggtcagggaggaggaccagatgtcgctgtccgtcggcatcgtcggcgcccccaacgccggcaagtcctcgctcacaaacaccatggttggaacaaaagtggctgcagtgtcccgcaagacaaatactacaactcatgaaattttgggcgtgctgacaaaagggataactcaaatagtatgttctgttaccaatatctgcttgtgctagtatgaagtgaattcatattttcaatttttgatggtaccgttatggatttctaaaaatcctgtctaacgatgcttgtctgtatttcatttgcaaatactgaattctggacaatgatgaatatattacatatc

SEQ ID NO: 10963 - DNA, 1044 bp, Oryza sativa
  ref <308>: DATABASE ACCESSION NUMBER: AK108311
  ref <309>: DATABASE ENTRY DATE: 2002-08-28
agcaaacgcgaaccaaaacacaaagcaaacgtccatctccgcagcttgctccggccgccaattacaagcgccccacacccagctgcttcgccttcacgtccacttcaccggagttgccatttccaatcccaaaccaaaggacttcattggattgcgaggggagtggagttgctgtgctgctgctgccgctgccgtcttcgacggtgagaagccaagaaagaggcggaccatgaacacgcccaactcgtggctgttcgcagacaactccaagtacagcacgcgggcgcggctgctgttcatggggctctccttctccatcggcatcctctccttcctcgtctacctcgccatctggtacacctgcacccgccgccgccggagccgtcagctccgcggcggcggctcggcgtccgcggatcaggaggcgcccgaggcgaacagccacggcatgagcgccgccgcgatcgccgcgctcccgacgttcgggtacgaggcctcggcggcggcggcggcggcgctggattgcgccgtgtgcctcgggcaggtggacgccggcgagaaggtgcggcagctgcccaagtgcgggcacctgttccacgccgagtgcgtcgacgcctggctgcgcgcgcactccacgtgccccatgtgccgcgccgccgtcgaaggccccgccacggccgccatcgccaagaaggccagctccggcggcggcgccaccgacacgccccccgtcgtggcaccagccccaccggcggcggcagaggcactgccactgccacctgtctagcttgctgcctaccagtcgccgccgtacgtgcctccggatggaccgccgcgcccgcctcgggaagcgtcagcgcatgattgaggaagtagctaaagctacatgctacagtgacgagactagagtgaaacctagctaggatcgacgtcgtagatcgagaggcagcctaatcaaccaagattttattcgttcgtgctcaagtagctttgtacgtagtacgtgtacataccgttttccttattatagtgatgggtactact

SEQ ID NO: 10964 - DNA, 737 bp, Oryza sativa
  ref <308>: DATABASE ACCESSION NUMBER: AK108312
  ref <309>: DATABASE ENTRY DATE: 2002-08-28
caccacgctgaccatgctcgtcagcctcgcgctctacgaccgcgtcctcgtccccgtggcgcgccgctacaccggccggcggtcgggcatcacctacttccagcgcatgggcgccggcttcgcggtcgccgcgctgggcgtcctcgccggcgcgctcgtcgaggccaagcggcgcgccgcggcggccgagcacggcctgctcgacgcccccggcgccgtcgtgccggtcagcgtgttctggcttgtcccgcagtacgcgctccacggcgtgggcgacgcgctcgccacggtggggcacatggagttcctctacgaccagtcgccggagagcatgcggagctcggcggcggcgctgttctgggtcgccggctccctcggcaactacctgggcacggtgctggtcacggtggtgcagagcgccagcagaggggagtggctccaggacaacatcaacagggggaggctggactactactactggctcgtcaccttcctcttggtgctcaacctcgcctactacttcgtttgcttccatttttacaccttgaagtcgttcgaggtggacgccggagacgaggcgcaacggcggcgagatgttgccgggagtgcagaaggagagactgagctctctgctggttgtgttgttgcgtcaagaaatggggtgttgtaagctagcataattagggagtgacttattgacatcagtgaagtaatttggtcagagctatctttctttt

SEQ ID NO: 10965 - DNA, 1107 bp, Oryza sativa
  ref <308>: DATABASE ACCESSION NUMBER: AK108313
  ref <309>: DATABASE ENTRY DATE: 2002-08-28
attgcgcatcgctcacactccgctcatcacttcacatctctcgccatgttgtccacagctgctcgtcccgccttcagggctggcgctgccgccatgcgctcggcgcccgtctccgcccctctcgtcgctcagtccgccaactatgccactctccgtgagatcgagggccgtctcaagtccatccgcaacatcgagaagatcaccaagaccatgaagattgtcgcctccaccaagctcacccgcgcccagagggccatgaacgagtccatcacctacggaaagacctcgcagaagaccttcgaggaggccggcaccgtccctgcggagggcgagggcaagaagtccctgctcgtcatctgctcttccgacaagggtctctgtggtggtatccactctggtctgtcgcgttacgtccgcaagcagctcaccaccgacggcctgcccagcgacatcgacattgccgtcatcggcgagaagtgcaaggcccagatgagcaggagcaaccccaagaacatggttctcagcttctctggtgtcggcaaggccgtcccgactttcgccgacgcgacctccatcgccgaccagctctgcctcttgaacacccagtacgacagcatcaagatcctgtacaacaagttcatcaacgctaccagctacgagcccaccatcattgaggctttctccgaggaggccatcaaggagtctgccaacttctcttccttcgagatcgacgaggctgtcctccccagcctccgcgagtacgctcttgccaactccctcttctgggctcttgccgagggccacgcctgcgagcagtccgcccgccgcaacgccatggacaacgcctcgaagaacgccggtgagatgatcaccaagttccagattctcttcaaccgtactcgccaggccgtcattaccggtgagctcgtcgagattatcactggtgccgccgcctccgaggagtagacgtaatccacgaacaacggaagatgtcggagcatatgatgtgcagttgtattgaggaagagaggagcgagaaatgtatgtatatagagctgggattgagaagtgctcctgcaatcaatgctacagtagttttcttttgtg

SEQ ID NO: 10966 - DNA, 821 bp, Oryza sativa
  ref <308>: DATABASE ACCESSION NUMBER: AK108314
  ref <309>: DATABASE ENTRY DATE: 2002-08-28
actgtgcacacatatgtaagaatcctactattatcctttccccgtttccgaccaggctttccacagaaagcagagtagcgaagcacatgtcgccggtgaaggtgttcggctcggcgccgttcacgaacgtggcgcgggtgctgctctgcctggaggaggtcggcgccgactacgagatcgtcgacgtcgacttcggtgacagggagcacaagggccccgaccacctcgccagaaacccgtttgggcaagttccggcgttccaggatggagacctgatgctcttcgagtcccgtgcgatttgccggtacatactgcggaagcacagggcgacggacgaggccaacctgctgcgggaaggcgacccctccgagtcggcggtggtggacgcgtggctggacgtggaggcgctccggtacgagccctcggtgcacgccgtgttcgtccagcggcgcgtcgtcccggcgctgggcggggagcccgacgagcgggtcatcgccgagagcgtcgcgcggctgagggagacgctcgccgtgtacgaggcacggctggaggccacgcgcgggtacctcgccggcggcgaggtgagcctcgccgacctgagccacttcccgtacacgcgctacttcatggagatgccgtacgaggtgccggtgttcggcgcgtaccctcgcgtgacggcgtggtgggagcgcctgctgacgaggccgtcggtcaggaaggtggccgccatgatgagcggcggcgagggttgatacgtgtgctgatgcttgctactgttttctttttcttaaaaaaagagaatcatactctctcattcccat

SEQ ID NO: 10967 - DNA, 1226 bp, Oryza sativa
  ref <308>: DATABASE ACCESSION NUMBER: AK108315
  ref <309>: DATABASE ENTRY DATE: 2002-08-28
tcttcttcttcttcttcttcttcttcttcttcttcttcttcttcttcttcttcttcttcttcttcttcttcaaagcacattgcaaacacaggcttagcttgcatatatacatttttttgtggccatggctatgcatcatatgcatgatgtttttgcacagacgacgagcatcatcggccatgaagaagaagaagtaaccattgacccgaccaagtggggcgcatgggctcatcgtggccaccgtctctgggcatccatgtcggaggatttctggatacacgtctacaaggtgcagcggtgcccgcggtcgtccagccacgactggacgtcgtgcccctacgcgcacaagggcgagcgcgcgcggcggcgcgacacgcggcgcttcgcgtacgccgccgtgtcgtgcccggactaccgcccgcgcgaggcggcgccgggcgccgtgcccagctgcgcccacggcctccgttgccgctacgcccatggtgtcttcgagctatggctgcacccgtcccgcttccgcacgcgcatgtgctccgccggcacgcggtgccctcgccggatctgcttctttgcccactccgccgccgagcttagggacgatcccaactccattgcgtcagccatcctcacaccgatgccaatgccgatgccgatgtcgataccgatgcggactcctgatgctgatcatcatcccagggtttctgctatgcgtgatcagcttgatctaatcgaagaggccatgagaaataggcttcgcttgtattctaatgctaatgctaatgctaatgttggttcttcttctgctaccgctgttgctaccaccaccataccggtgtcaacattggcaaatggtgagggttcaactggaaaaaggtgtggttgccgccgttgtgtggaggaggaagacgctttgctcaatggctacccacattatgatctcatcatggacttggtggatggatagatgggtgtgttacatactcttttgcgatgcatttgaaggagatgacacaagctcgcaaattgccaaaatggagaaacttgagcgatttgggatgctttaaaagttgacaccctatacatatggtgctggatcatgtatcatatttatgccaatttttactagaaaagtgtatgcgtgtgcatgcatatataaaaatatttatgatattgtcgtcgggctagctccgagcctatatatcaagtggtatcattttctttac

SEQ ID NO: 10968 - DNA, 944 bp, Oryza sativa
  ref <308>: DATABASE ACCESSION NUMBER: AK108316
  ref <309>: DATABASE ENTRY DATE: 2002-08-28
gtatccactgtgtacaaatccgaccaccatgcccaccccaacaccccaatccatcgtcgttactggcgccaacaagggcatcggctacgaagccgtcaagcacctcgcacagaagctgcccgacgccacaatctacctcacggctcgctcgcagtccaatggcaaagatgcggtggacaagatgaagaaggaggcgcccgaggccgacttctccaacgttcgcatcatcctcctcgagattaccgacacctcatctatccgcgaggcggttgcaaccgtgcagaagcaatccggaacgctcgacgtgctgctgcacaacagcggcatcctgcaggtgcccggggagaagggttccaagggtgtgtttgacgtcaacgtccgaggagccaaggcctgcatcgaagcattcgctcagatcctcaccaaagacacgggcaaggtcatcgtcgtctcgtccgaggttggctcgtggtccacggctgcgcaggagaaggcacttcaagacaagctgctgaatggcagcaagaccgactggaagcaggtcgaggcgtggatgaacgactggcttctccacgagcaaggtggtcagggagtgcaggagccatggaagccactcgaccagctggaaaactcgggctatgcggtcagcaagctcttcctaaacgcctatctgcgaaactacgttctgcagagccagcacccgcgacttgcagttgtctgcccgggttactgtgccaccgatcttaatggcttctcgggtcatcgcccggcttcgcagggaggcgagagtgtttgctggcccgtcttcaacgaatttgagaatggccacttctaccaggatggaaaggacctgccattcttgtaccccaagcccgaagggttcaatgtctaggatcggtcttgcttgcctttccccttccaattttagtcgtttcaacactatc

SEQ ID NO: 10969 - DNA, 1161 bp, Oryza sativa
  ref <308>: DATABASE ACCESSION NUMBER: AK108317
  ref <309>: DATABASE ENTRY DATE: 2002-08-28
agctgagaccgacgcaactggccatcctcatcctcctcatcctcgcgcttgtgtttcgcccatcaccggctcctcgatcgttgatcttgcgaccatccgtagaagcaagacgacggcgcccctacccaccacgacctcccgctctcgactctgccggcgagcagcggctgataggcacgtccgatacgcacgtcggcctctcccgccttccgacaccaatcctacagctcgtctctactcttgcttgcgcttcgactagatctgaatcgttgcatcggctgggcttccgacgctctcctccgctgcttcagcctgcctctgccgcacattgatcagccagcatgtcaccggcacccatccgcagaaaactcgtcatcgtcggcgacggcgcatgtggaaagaccagtctactctgcgtctttgccatcggcgagttcccgcaggagtacgagcccaccatctttgaaaactacgtcgcagagatccgactcgacggcaaacccgtgcagcttgcgctgtgggataccgcaggccaggaggagtacgaacggctgcgtccgctctcgtactcgcaagcacacgtcatcctcatcgcattcgccatcgacacgccagactcgctcgaaaacgtacaggtgaaatggatggaggaggtgcgtcaaatatgcggtccctcggtgcccgtgctgctcgtcggctgcaagaaggacctgcgcgaagatgccatcgccaagggcaagcccgtcgagggccactacgtcgaccgcaaccacgccaagcaggtggccgcccagatcggcgcacgctcgtatcacgagtgcagctcgctcaagaaccacggcgtcgacgccgtgtttgaagccgccacgcgcgccgccatgctcgtccgcaacgcaggcgcctcctccggcggcgccatctcccagagcaagaccaaagaggcattacacaacgacgctggctcgtgcaggtgtgtcgtcctctagacccttttggctctttcgcctcctcgtccgcttccagccccccttctctctcttcgcactgtctccatccatctgcatatcggccgctcacccacttctgtacacttttgcacgccatcgcacgctttcgtcgctcgcctttcccgctcaatggtacgccatctgaccgttgtcc

SEQ ID NO: 10970 - DNA, 1455 bp, Oryza sativa
  ref <308>: DATABASE ACCESSION NUMBER: AK108318
  ref <309>: DATABASE ENTRY DATE: 2002-08-28
gacgccttggtttccaacgaattttatcatccgcttaaatacatccaaagctctccatcgccatcggcggccaacggcgaccgctccgctctacccaatccacccatccactcgccgccgccccctgatccaaagcctccgccgcgccgccgtcgagaggaggaggaggaggaggaggaggaggaggaggcgtgagcccctatggggaccctcctccggccgcgtccgctcgcccacgccgccggcgccggcgacgccacgccgtcgaccgcgcacgcggtggtggtgagcggtggccgcggccgtggcgtggagtgtcagccgcatcgggtgcgccgccgcccgggtccgcaggttgcggtggcgacggcgagctggaggaggcggagggagaccgtggtgagatcggatttcgccgctggtggtgccgctaccatgggggattcgccgcaggcgctctcagacatcgatgtggtttcaagggtcagaggggtttgcttctacgcggtgactgcagttgcagcaatctttttgtttgtcgccatggttgtggttcatccacttgtgctcctatttgaccgataccggaggagagctcagcactacattgcaaagatttgggcaactctgacaatttccatgttctacaagcttgacgtcgagggaatggagaacctgccaccgaatagtagccctgctgtctatgttgcgaaccatcagagtttcttggatatctatacccttctaactctaggaaggtgtttcaagtttataagcaagacaagtatatttatgttcccaattattggatgggcaatgtatctcttaggagtaattcctttgcggcgtatggacagcaggagccagctggactgtcttaaacggtgtgtggattaggtgaaaaaaggagcatctgtatttttctttccagaggggactagaagcaaagatggaaagctaggtgcatttaagagaggtgcattcagtgtggctacaaagaccggtgctcctgtgatacctattactcttctcgggacagggaaactgatgccttctggaatggaaggcatccttaattcaggttcagtaaagctcattattcaccatccaattgaagggaatgatgctgagaaattatgttctgaagcaaggaaggtgatagctgacactcttattctaaacggttatggagtgcactaaagaaagatggtgtttttttttattatatggaacctattcaaaggcacagacaggctttcaaggctaagcttgttacagactgaagagagaagaaatacaagactgtccattgttagtcagatttgtaaaaatagactctgatgtagtttacttttgcccctattttatttttaacaatacaaatatataacagatcctaagaacttatcttaatttaggagaagttgctcgtttcattaaattaaattgtgaagt

SEQ ID NO: 10971 - DNA, 837 bp, Oryza sativa
  ref <308>: DATABASE ACCESSION NUMBER: AK108319
  ref <309>: DATABASE ENTRY DATE: 2002-08-28
cgctcagagagagcaaattcttcagtaagcagaatcaaagcagattaaccctcatctacttctggccctctaagagttctccactaagcaagcgaaaacagccatgctgcaccaccattaccatggcgaggtggccagcctgcactgcctctcacctccaagcctaccattcagttcccactaccacagcaacatgatcaccatggcaccctcgcccttccacttcccagcagctacctgtgaacctatccaggaattgctccctgtggtagcgggcaatcgcccagccggctctggcagcacagatgacgcctaccagatggcagcggaggaggagcggaggcggcggaggatgatctccaaccgggagtcggcacggcggtcgcgcatgcgcaagcagcggcagctcagcgagctgagggggcaggttgtccacctccgtgacgccaaccgccgcctccttgatgagctcaaccaagcaatgaggggctgcagtgatgtccactgcgagaacgcccggctcaggaaggagagggccgagctccagaccaagctcgagcacctcatgcaagcacagaagaataacacctcgccgagctcctcacagccatgcgagaatatttgattactgaataataaatcattcttaattatctcctcattttaactacgaggattattattagtatatcaaaataagacatgttttgagatgcttccttcggcttctgtttttttgttttatcttttatgtacgggaatattctaactgcccattattgacatctttttgtcaaggtggctaagataaatatggattgagcctattggcgagtt

SEQ ID NO: 10972 - DNA, 922 bp, Oryza sativa
  ref <308>: DATABASE ACCESSION NUMBER: AK108320
  ref <309>: DATABASE ENTRY DATE: 2002-08-28
acctcgcccacgcacaccaccaccactctccccctgctacttgtccaccccaatctcatcgctcttagtcaactccgccgagagagactgatcgttctcgttcagctctgctctgcccatggcgctcgacgggaagccaccggtgccgccgccgtccacgccgccgatggactcgtgggcctgcggtggtcgccgctccaagcgtcgcggcggcggcggcgggagcagcgggggtagtggcagctccggcggcggcggcggcggcgagtccgaggaggagtacctcgcggcctgcctcttgatgctcgcgcatggcgtccgcgacgaggccgaggtcgtcggcgtcgcggcggcgacggcgaagccacagcatgggtacgagtgctcggtgtgcggcaaggtgtacgggtcctaccaggcgctgggcgggcacaagacgagccaccgcaagccgccgtcgccggcggccgaaccggcggccggcgaagagccgtcctccggcggggtggccggcgaggcgaaggtgcaccgttgctccatctgcctccgcacgttcccgtccgggcaggcgctgggcgggcacaagcggctgcactacgagggcggcgccgtcggagacgccgtcaaggagaagaactccctgaagaccaaggcggcggtggcgacagcggtgctgaaggacttcgacctgaacctgccggccgcggcgacgacggcgggggacgaggccgagagctcaccaccggaggccaagagagcacgtctgctgcttctcgtctaacccgcggcggtggcggcggcggcggcggcggcttgtggttttgatggtttaggtgcttagccgttccggtttaggtttcagattgataccgggttgttaatttcattgattgatttattttagttcacttctggttgggcg

SEQ ID NO: 10973 - DNA, 769 bp, Oryza sativa
  ref <308>: DATABASE ACCESSION NUMBER: AK108321
  ref <309>: DATABASE ENTRY DATE: 2002-08-28
accaccctcgtcatcctcggatccagcacaatggccaagccaaagaacagcgatcgcatcgtcgtggacaactcaaacctctcggagctcaagtccacatgcgatgaggcggtggagcgcatcctctcgcgccaggtcgacgacggctcgcacgccaagcagctcggatatgcgccattcaagccgagccatcgccacgccgatctgcgtctggcgctcggattcaccgcctcggccgtgatgatcggtacctcgatatggtcctactttgtcgaaaaggagtggagccgcaacaagtacgcgtgcggcgtggcggtcgtcgtctatgccgtgctctcggccatccagatgctcgactcgtacatccagggcaacaccatcttcaccggcacacgcaagatgctctccaaccgcatcgaaacagagcgtatcgtcctccaatcgccacctctacccaaggcgaccaagaagccgccgcagtcgcccgacgcaaagccgctcctcactccacccgcctacactctccacctgcactacacgcgcaagtccaacaagggcaaatcgttgctcggcagcaagaacgcttccttgccgctaggccatctcggcgaatgtttcaccgaacaaggagagtttgtcgaggacatttttgagcaccgattgctctcggcgcttctgaaggccatcgggcagtaaatcttagagagatgcaacaccatccatcgccttcacgtccttcttcaactactaatttgagctgaaaatcgtg

SEQ ID NO: 10974 - DNA, 909 bp, Oryza sativa
  ref <308>: DATABASE ACCESSION NUMBER: AK108322
  ref <309>: DATABASE ENTRY DATE: 2002-08-28
gtctcctcattcctcagatctggttcgagcgatgtcgcatgggggccccttccagccgcggtcgccgccggcgggggatgacctgtcgccgtgggcggccttcgaggggtcgtcgtgggcggccttccaggaggggtcgtcgtcatcgccagcgtggcacgccttccagccgcggtcgacggtaggcccgagccaggcgccgttctacttgtcaccgggggggcacatactgtcgacgcctgcaggggatgaccggtcgccgggggggtcgtcgcagccgcggcgctctctggccgaccggtcgccggggaaccgctccgagctgcggtcgacgccggcagggtacccgtcgccggggagggcctcgcagccgcggcgcactctggagaacaggcaaggtcccccgcctgtacggtgccacaagcatccattggaccacgaaaacgaagtggagtgcaaatgcaaaacgaaggccggactattcgtatcgtggaagacaatgtactgcctttgaccctagtcacatcacaattgttcctggctgctaatgcacccaccaatcctgtatacatggcgactcggcggcaaccggagaggcgggctcgcaaaaccagattgtactctgagtgccagaccaagaaacgcaaggttttttctccctctccctcactctgcttttgtggctggaggcgacggcgagcaagggccgccggtgccccgccgttataccttgcaacagctgctcccgtcggtgcagtcgcctccgccgccgcatctcgctgcagtactcaccgtgtgccagtttgttgtagtttgttgtagccacatcatgagtacattttttttagggtggggtggagtactaccaaattttacatcggtattgccagtgccaaaaaccggatttgg

SEQ ID NO: 10975 - DNA, 891 bp, Oryza sativa
  ref <308>: DATABASE ACCESSION NUMBER: AK108323
  ref <309>: DATABASE ENTRY DATE: 2002-08-28
gatgagcactatcacgtatgaggtggagccgtcgcacctcgcgccgtcggcggcggcgcagctccggctaagcagcgccgcctcggcttcggcttcgtcggcgccagcaagggcaagccgcttgggtttggggccggggatgtcgtcgtccggggtaacacgctcgctcagctcttcaccgaccacgtcgtcccccacctccgccgccgcggcgccggcgacggcgccgggatgcagatcttcgtcaggacggtgacggccggaccgctcgccgtcgaggtgaacccgtgggacaccgtcgggaaggtgaaggccaagatccaggctaaggggggcatcccggcggcgcagcagcggctcatgttcgccggccggcacctcgaggacggccgcaccctcgccgagtacggcatcaagaaggaggccaacctgcacctcgccctccgcctccgcggcggaggcgctgccggcggcggcggcgacgcgcgtgcggctgactccggcggctggggtcactgggcgaccaccgtcggcctcttcgtcaccatggtttccctcgccgtggcggtgaacgccggcgacgctggcgacctccaactcttctttctttgggcacttgctgttgccggagttaacctgatcaccgccggcgtctacctctccagcagagacgacgtgagccggagctgcaccgtagtgctcgccatggcggctgcgttcgctcgtcggaatttggccgtgttgggtaccatcgccgcgtcgtcggcagcgaccggagtcatgttcagcgccacgcaaccggtgctctgcttctttttcttcgctctgtttgtttcctctctttctcttgtcacaaaccactgttgctgatggacacaactactcccccgt

SEQ ID NO: 10976 - DNA, 1476 bp, Oryza sativa
  ref <308>: DATABASE ACCESSION NUMBER: AK108324
  ref <309>: DATABASE ENTRY DATE: 2002-08-28
cggacacagattcatcaccactagaatcttccacacaaaactcagtacaagatcggcaatggcgcagcagctgaggacaccggcggcggaggaggcgctgctgcgcggccacgccgccggtgacaaggacgacgccgtcgccggcgagagcaaggacgcgaagcgcgcgcgggcggggctctgcggcgtgctccgggagcggaaggtggtggagctggcgcgcgccaagcggcggctggtggaggtcccctacacggcgacgctcgcgcacacggcgaacgcgctcctcgccgcccgcgtctccgctgtcgcagtcgccgcgccgccggggcactggatcggcgccggcgggtccatgatcctcgagtccgacccggccaccggcgccgtccgcaagcactacatcggcatggtcaacatgctcgacatcctcgcccacatcgccgaggccggcgatgacaacgacgccgccgccgatgctgctcccagcgaggccgtcgacctcgaccgccgcatggccgtgccggtctcctccgtcatcggccactccctcgaaggcctcaccctgtggactctccatccaaacaccagtgtgctggattgcatggagacgttcagcaagggggagcaccgcgcgctggtgccgctggagagcgcggcggagaatgtggtggcggcggagctcgtcgaggcggcgccggggtacaggatggtgacgcagatggacgtggcgcgcttcctgcgcgcgcgcgccgccgagctgggggacgccatcctgtcgcgctccgtgcgcggcgtcggcgtcggcggcgtcgtgctcgccgtggcgagcggcaccaaggtgatcgaggccgtccgggcgatgcgcgccgcgtcgctcgccgccgtccccgtcgtggacgccgcccccgccgacgacgccgacgcgcggcggatcctcctccagctccaggacgggagggggaagcgcgtcgtcgagacgttctcggcgacggacctccgcgactgccccgtggcggagctccaggcgtggctgggcgtcgccgtggcggagttcaagaagaaggtggccatgtaccgcgccggcgttctcgccgccgacgccgacgaggacgaagagcggcggcgggagatggtgacgtgctcgccggagagcacgctgggggaggcgatcgagaaggcggtggcgcaccacgtgcaccggctgtgggtggtcgacgaggaggggttgctcgccggggtggtgtcgctgaccgacgtgctccgcgtcgtcagggaggccgccatcggcgaggaccgggagctccacgacatcctaagctagacaacttttttttttttttgtcgtaaagacaagaaaagtatgtatctgcactgcaaactgccatggtcggcacaatgtggttgttttcgtgttgtgaattttgctttgtttccatcaacatcaatggatcggtttgggctggtttagttctc

SEQ ID NO: 10977 - DNA, 649 bp, Oryza sativa
  ref <308>: DATABASE ACCESSION NUMBER: AK108325
  ref <309>: DATABASE ENTRY DATE: 2002-08-28
aactttgaaggctgcattcgaacttctctagacgacccggcgacaacgacgaaaccgacccatcaacccccgacgtccacaataccggcacgatgaccaagatcaactcccaccttcacagctcgcgccgcaagtcgcgcaaggagcacttcaatgccccctccagcgtgcgccgcgttatcatgagcgctcctctctccaaggagctccgtgagaagtacaacgtccgttccatccctctccgcaaggacgacgaggctgtcatcaagcgcggcagcaacaagggccgtgagggcaagatcaccgcctgctaccgtctcaagtacgtgattcacatcgagcgtgtcacccgcgagaagaccaacggccagagcgtccccatcggcatcgccgcctccaaggtcgaggtcaccaagctccacatggacaaggaccgcgaggccatcctcgagcgcatcgccaagggccgtgaggccgccaaggagaagcgcaccaaggcttaaatgctttgctgttctgtggcatcaaggtcaacaacggggttatggagggattacggccggctcccagtcggagctcgagcattgctttcttcggcgctctgaacggaaaatagcagcgttgagaatgaaaagttttcgacaccccc

SEQ ID NO: 10978 - DNA, 885 bp, Oryza sativa
  ref <308>: DATABASE ACCESSION NUMBER: AK108326
  ref <309>: DATABASE ENTRY DATE: 2002-08-28
gctgcaccaaccgggcctcgcttgcccaagaaccaccaccaccacctcctcctcctcatccatggacgagccacctctcctcctcgccgccggcgaatagcaccggcggtatatccgatccgatcatctggtggtgtgttctacgggttgcagcttctttcgctggatatagggatcgatcggaagtttttttgggatatgtcggcggcggcggcggcggcggctgggcaggaggttaatccgggcgttgtggtggcggcggtggtggaggtggaatgggcggagtgcgcgtgctgcgggctgagggaggagtgcacgccgacgtacgcggcgggcgtgcgggcgcggtacggcgggcggtggctgtgcggcctgtgcggcgaggcggtgggggaggagctcgccgctgccgggggcggcgccggggacgacgggtcggtggtggtggaggtggaggcggcgatcgcgaggcacgccgctttctgccgcgcgctcggctgcaggtcccccgccgcggcggagcggctcatcgcggcggtgcggcggctgctccgcggcgccggcgagggcggcaggaaggagaaggccaaggccgtggtggtgctggagttccatgacgcctgagacgacagatcgaagatctgttgctctcccatggcgctagctatagctagtcctagcctctttctcttttaatttgaatctctctaccttaattgctgcttaattttcctagcttgattatatttagctcgcaataattacgtgctcaatttgtacgcaaaatcctgcaagttctccagctttgtgtaactgtgaaggaatgggaaacaacattctggaggacaatgagagattgagagctaaggtggaaaaaagaattcc

SEQ ID NO: 10979 - DNA, 888 bp, Oryza sativa
  ref <308>: DATABASE ACCESSION NUMBER: AK108327
  ref <309>: DATABASE ENTRY DATE: 2002-08-28
actccacgacgacgacatccatccacagccagagcgcggcggatgcgatggccaccgaagaagaaaacttcgtcgatgatgatgccgacgtgaagtcgatgtcgtcctcgtcgtcgttgtcgtcgctctttgacctcgacctcactgcgttcggcgaccggtgggtggtgtcgggaggaaaggaggaggttgattttgctggtgccgatgatggtggtggcggggcggtgaacgtggcgtccgacgaggacgaagatggtcgcggcggcggcgtggcggcggcgctcgggccggctgctaggctccgcgagcttcttcttcgcaagctgaggaagccgaaggcggccggcggcggtggcgcggtgtcgccggagggacggagcggccgattcttggcgaaggtccgggcggactcgatgccgcggctggaggcgcgcgcgatcgccggcggcgaggaggagcggcgcgccgccactactactaacccgaaggaggccgcacggaagtacctgaacaagatcgcgacgagcctcgcgcgccgccgcggaggtccagacccagcagcaatggtggtcgctgccccgacgacgaccggcaagacgaagacgagccgctcctccatggcggcgccgccgccgccgcgccgcggtatagacggctcggcccagcacttgcaggacggcatcgagagcgccattgcgcactgcaagctctcgctgcgcacggcgacggcagagccgagctaaggaggagtgcaaatgttgagtcgttgatgcatgcatgaagcatgatgatgtgttcctcgcagtgagatttgataaaggctttgttcttggcatagacgagttgccaaataatcgcattcgtttttcattaaatccctttgag

SEQ ID NO: 10980 - DNA, 992 bp, Oryza sativa
  ref <308>: DATABASE ACCESSION NUMBER: AK108328
  ref <309>: DATABASE ENTRY DATE: 2002-08-28
atgcgcatatcatgcccttgcgttctcgcgcctttgcgcggcaaaagctgtgtctagacttcgccagtttgaagcatgccagtcccaagggtctttacgtagcgccggtgcccgaggagcctctgctgtggacaggagtgttgttcgtacgctaaggcccgtataccaatgccatcctccgcttccaaatcgctttccctgacgactaccccgatcgcccgcctgtcatcacgttcctgcaggatgtcttccacccgctcgtcaccccgttgacaacatacacacactctacaagagaaagggggggcacaatcagcgctgcggacgtggagaagctaccacctggaggcctggtgctaaaagagggattcccagaatggttctccaatggagcctcagaggctatcaagaaggatgaagacgggcaggcggcaggcgagggtgcagaagctgctgcagacacacacaatgctccgccgcacatcgctcaagtgttgcaatacctccgtcttgtcttctccgcaccagagatcacagacgctgtaccactgtcctccgccgccaaccccagcgcctggcacgcatggcgcagccaccgagcaaaggtcctgggagagaatcgtgcgcagtctccggctaaatccctgaatggagatgccagtagcgatggcagtctttcgccgcgagcagcacaacctggaggagccagaagacctggggagtggaactggtcaggcgtttgggaggaccgcgtgaggaaggtgattgcggcaagtcgggcagagggcacactgttcggtggtggcggtatgggagacgtcgtaagtgattgcgtgccactgctgcgcatctcttttgccaaaattgacgacgaggctctagctagtattatgccacagattcaggcgcaggttgtgggatgatgcaatcattctgccagtatgaggccctactacattagtctgacagttgtggtagatccaaccagcaag

SEQ ID NO: 10981 - DNA, 865 bp, Oryza sativa
  ref <308>: DATABASE ACCESSION NUMBER: AK108329
  ref <309>: DATABASE ENTRY DATE: 2002-08-28
aacttcgtaccttgtctctgaccgcgccccttccgactcctcgacgaacgacgtattcgcaaactctcaacatgtctgcccaggctcttaacaagatcgctcccaactctccctccagggctaagcccagcgaggttgagcagcagatcgcaactgctctctacgatcttgagaccagcgtgcctgagatgaaggctgctcttcgtcccttgcaattcgtgtctgctcgtgagatcgagactggccacggcaagaaggctatcgtcatcttcgtcccggtcccccttcctcagggctggcaccgttcccagcagcgtctcacccgtgagctcgagaagaagttctccgaccgccacgtgctgatcatcgcttcccgccgcatcttgccccgccccaagcgcagcaaccgcagccgcaccacccagacccagaagcgtcccatttccaggaccctcaccgccgtccacgacgccatcctcgccgacctcgtctaccccgtcgagatcgtcggcaagcgcatccgcaccaaggaggacaacaccaaggtcctcaaggtcgtcctcgacgagaaggagcgtggcggtgtcgactaccgtcttgacacctactccgaggtctacaagcgcctgaccggcaagggtgtcaacttcgagttcccccagcacaccgagcactagattcgtgcaagatcatccagcattgcacggtttcggtaggtgacataaagtcaccatcggggcaatcggttgggccatgaggcaaaagggcgtgcaaaaaaagggtctttgtgggacagcgtatggcgttaaaggtagcttttgtcaagtcaaattttcaatgctactgttccgagggccctgcccac

SEQ ID NO: 10982 - DNA, 621 bp, Oryza sativa
  ref <308>: DATABASE ACCESSION NUMBER: AK108330
  ref <309>: DATABASE ENTRY DATE: 2002-08-28
acgctcgcacacaaaacacactagacggggctaagcatctggcgatgaggagaaagggcagtgagtgcacaagaattaccccggagaccaccggcggaggcaagcccacgatctcgctgcaggcgtccagctggtccagccggatggaaccgtcggacccggaccggcggtcgaggctagcgcgcggcgcctgcggctctcgtctgctgaggagcgcgcggtggacggctacgaggttctaccggcgcgcgagggcaagcgtcgcccgggcgttccggccggcgtcgaccaagaaaggccctgccagctgtgccgcgtcgcgttcgccggactgtacgccggcgaggaatagcagtaggcggcattccttggcgccggtggtcgccgatgactcccacaagagcgaagctgtggaggagtgcatcaggttcatgaactcctcgtcaaggaagtaccggtagatttgttttttctttcttttttgtggttctacaacctacactcgtgcgcggatgctagtgtctttccactgtattttccccatttggcctttcatctatgtgcgcatttgctctaatcttgtactagagtggaaaaatcatacggctggctgttcgtttc

SEQ ID NO: 10983 - DNA, 1090 bp, Oryza sativa
  ref <308>: DATABASE ACCESSION NUMBER: AK108331
  ref <309>: DATABASE ENTRY DATE: 2002-08-28
ctcacacaccacaccacaccaacatcgagcgcgtcgagtcgaatccaatccactccactccaccccgcgatctcctctcctctcgtctccggcgaagacgacgtgatgccacccagcgccgccgccgcagccgcgatggcgcagtcgccgcgcagcctccacacgctgatcagcttcggccgcggcgccgacggcgtcgacgacgatgaggccacgcccgcgtcggtcgacgttggtaacgcggagggcgccgggctcgacctcgacttcgcgtccgcgccgccggtgtcggcggccgagctggcgccggccgacgacatcttcgcgcacggccgcatcgtgccggcgtacccggtgttcgaccgcagcctcctcgacctctcacccggcgacgcctccacggcggcgccctccgccgacacctactgcgcgtggacgccgcgctcggcgccgggctcgcccggccgcgacaggttccccaagagcgcgtccaccggcggagagtcgtcgtcgtcatcgcggcgctggcgcctgcgcgacctcgtcggcgccggcggccgctcccgcagcgacggcaaggacaagttcgccttcctgcaccaccacgccgccgcgacgccatcatccaaactgaagactcctcctccccctcaacaaccacagcagaagaagcagagcgccgtgaagacgaagccggcggcgaagaagggcgtggtcaccgagatggacatggccaccgcgcacaggctcttctacagcaaggccagcgccggcggcgaccggcggccgcagcaagcctcgtacctgacgtaccgaccggcgttcagcggcctcttcgcgctcggccggtcgcaacaccacaccgcctattagtttaatcacttggtcaataaccaaaccaactgattactagtggtagttgttgttaaattaattgttttgttgtaaaagtgttcaaaattttcggcgaaattcgagtcgagatttctcgtttgtactagaaccttatcatgtacataaatggaaaaagagaggaatgaaatttgagagatgattttgtctaaaaaaaaaaaaaaaaaaaaaaaaaaag

SEQ ID NO: 10984 - DNA, 969 bp, Oryza sativa
  ref <308>: DATABASE ACCESSION NUMBER: AK108332
  ref <309>: DATABASE ENTRY DATE: 2002-08-28
atcatccactcactcactcattccaacaatcgcttccacactctttttgcccaacccaaggacactccttcgcacacttccgattgacttccattacaaacaaccaataccgccaccatggtcatgaacgccttcgtcttcgcaagcctcatggctttcgtcgcagcttcgccagtcccagtccctaacccgaccttcggggagctgggtgctggccttgagctcgccaacagcatcaccaaactggtcggtgccggcgtccaagtcggagcaccagtcgttgccaaactcgcaaacggcatcgtcgagggtgttgcctcgactcacatatcggcttcacctggcgtatccgcaggtgtcgatatcggagtgaaccctcacgtcggcgccaacgtcggtgttggagccaatgtcggagccaatgctggggtcggagcaaacgctggggtcggagcaaacactggggctgaaggtggcgctggagccgatgcagatgttggcgcaaacactgaagccgataccgaagtctccaacggatcaggtggtgctcaagatccacccatctacactcccacatcgacctgcacctcatcttcagttccgagccccacgtcctccattcctcaatacagcaacgaggacaacaaatatggcgcacctgccagctactaatggtctggattgtcgacagttaactacgaatacgaccaggcagatcgcagcctcgatttgcaagagggcataatccagcccatcacgatccttgaactttgcccttgataggcacgacgctctctactatctttgcaactcttttggaacattgggctttctctaacaatattctttatatatggttctccatgtgtaactcttgcgatgtttattcttcgagagaatcaacatacaagtttttagatagcacttattctgttggtataatatcaatatatggtttttgtgttcgag

SEQ ID NO: 10985 - DNA, 909 bp, Oryza sativa
  ref <308>: DATABASE ACCESSION NUMBER: AK108333
  ref <309>: DATABASE ENTRY DATE: 2002-08-28
acaggcgagagaccgatagcgaacaagtaccgcgagggaaagatgaaaaggactttgaaaagagagtcaaagagaaaaagctcgaatcgagcttcgcaacacagcctggcccgtcacatgcagcgcgcggcacccgcgagtgcaaggcgctgcacccgcacatgcaccggcctcgctggggtcaccgccccacccgagtatttgccctgctctcacccggctcctgatctcctcgtcctcctacaagccgcggtttccgtccccaccgaccgccggagacgagcaagcagggaagaacaaccggcgagaagacggcagagacgaggggcttggtggagctcggccggctacgttggagatgagggctggaggcggctgcagggtcacaactcacaacaactgaatttgtgagcaggcggcgacgagcggctggagctcagtcagcccctgtggagatgagggctggatctggagtaggcggagccaagtgccttggcggagctcgcgtggacctcgtggagaagccacagccactatctacttctgtatctatcactccctccgcctacctcgccatcgtcggtgctgcaccacttcctacgtcgtcgccaccaacgtctcccttccccgactgcctgcccgtccgaattccggccgccacaggggtcacagctagccgtcggatctggtcatctggacaccacagctgctgtgatgggctgggagcggggagcggcgagcggcggacggtaagctgggagcagcgaattgaacggcaagctgaacacctgaccggctttgatttttgttttttgttttctcttttactttttctattttgtgttaccgattcatcatatatcaacatcttgtgcacagcgatatctagcaatatttttcttttgcttt

SEQ ID NO: 10986 - DNA, 933 bp, Oryza sativa
  ref <308>: DATABASE ACCESSION NUMBER: AK108334
  ref <309>: DATABASE ENTRY DATE: 2002-08-28
tcgtctccctccacccaaaaccctagccgctcggctcgcgcgtccaaaccctagctagctatcgaggaggaggaggaggagcatggggggatcgcgccgcaagctcaagcgctcccgcgcccaggtgaaggtgggcctgccgcgcaagaagccgcgggagttcaagccggccttcgacctgcccgaggcgctcgccgccgccgccgcggccgagggcggcggccacgcgccgagctgggacgcggagggaagcgtggtgaagaactacgccgcgttcggggtcgtcgcgaacccgaacctcctcggcgcgcacgcccgcggcacgccgcgcctcgtccagagcgcgccgctccaggcgcccgacatcgacgcggcgcgcgcccccgttgacgagttcgagcccgtcgactccggcagcgacctcgagtccgacgatctgaaatctgcacttggaaagcagaggcgggatgggaaatctgcacctttggaaccactgacaaaagttcaacggatttatattggcagattaatagagaagcatggtgatgactacaaggccatgttcatggatatcaagctgaacacgatgcaacactcggttggtaccctgaaaaagctatgtgaaagataccatgttgttggcaagagcatcatccatcctctgaagtagtatcatacgagtgtttaggattctctttcactgtgtaccgtattcctcttgctcccactaatgggaagaaaattttgcctatgaaaattggtgtatgcattactgtactactgtggtttgagattactatcagagaagatggcgtgcgctctgtacctcgaggaaaatcatgaaagtcgtaactaattcagaattgttctgtactcttttgcttggggtcgtgtgaattcagctgatatgattgccatgattactagcaactt

SEQ ID NO: 10987 - DNA, 720 bp, Oryza sativa
  ref <308>: DATABASE ACCESSION NUMBER: AK108335
  ref <309>: DATABASE ENTRY DATE: 2002-08-28
atcccatccatctctccgagataaaaatcgaacaaagaagcgtgcgcgagcgagagagaagaaaaaggggggaagcagccgccgacgacgagagcacatggcggacggatcggacggccccgacgtgtctccggcggcggcggcggcggcgggaggaggaggtggaggtgagatctgggggacgttggaggagctgctcttggcctgcgccgtgagcaggcacggcacggggagctgggactccgtcgccatggaggtgcagacgcggagccccctcgccgcgcgcccgggcctcacgcccaccagctgccgcctccggttccgccacctccaccgccgcttctccgtcggcggggcggcggaggaggacgacgacgacgaggaggcggaggagggtggccccgacgcctccgccgcggacgggtggatggacgagctccgccgcctccgcgtcgccgagctccgccgcgaggtcgagcgatgcgatctctccatcggaacgctacagacgaaagtgaagcggctgagagaggagagagaacaaagcatccacggcggcggcggcggcgaggggaagccggagacggcgaacggcgacgagcggctgtcgagcgaggagcccggccggtcgtgcagggagtccaattccacagatctgaaacccgcggcgcgcgccggtgaccatagcgtcaaggcggaggaggaagacgaggacgcggc

SEQ ID NO: 10988 - DNA, 644 bp, Oryza sativa
  ref <308>: DATABASE ACCESSION NUMBER: AK108336
  ref <309>: DATABASE ENTRY DATE: 2002-08-28
aaaacaaaaactcgccgcggttttacagccaacgaaggcgcagcaaagcaaacgcggcggcgcagcgctcgccgtcgccggacttcctcccccccccgctccgattccgtccagatactgagtgaaaacctgctgctaagatgggtagcacagaacacccaattcctgcgcagtcacctgcttgcccaactgtgagcgaaggggggtcggctgctccagctcctgctactgattcaaagccaaagaagaagatatgctgtgcgtgccctgatacgaagaggctgagagacgagtgcatcgtcgagcatggggaatctgcgtgcaccaagtggatcgaagctcacaagcggtgcctccgagctgagggttttaatgtctgaattttctctagtcatctaaaggtattacatttacttttatagaagaagtgatagaatatccggtttgagacttgagatgcaaattggatccaagagattagctgccctgtttttgcatgttatcgaagtgatagaatatccggtttgtgaattgagatgcaaattgaatccagagattagctgccctgtttttgcatgttatccctgtatgtcagggaacttattttcatgataaataaaggtacttccgttactggtgacact

SEQ ID NO: 10989 - DNA, 790 bp, Oryza sativa
  ref <308>: DATABASE ACCESSION NUMBER: AK108337
  ref <309>: DATABASE ENTRY DATE: 2002-08-28
accacatcttccagatccagacgcagaccgctccgccacaccggccaccaggcgcgcgcgccgccgcctcctctcgcgcgggcgctgtaccgccccagccgtcgacacgggcgcggcgctccggagcctgcagccgtcgtcgcgccgccaggcgcctccaaccgtccgccggccggcgctagcgccctccgtcgccagcacgccgtccgccgccaccgattcccctgccggctgccgactacagaccatggcttcgttctcctccccggtaagctccgacagcgacgacgcaaggtgagcacatgctacaatccctagtcccttctctgctggtgtgcgtcgcggcggtgtggatctggatcacgctggccgtggagggggttctctctttgcaggaggtggcgctaaaccctatatctcactgtgcgttgtagttgctagagtgagggatggagaacggggagatcgagggggcagcggacgacggggtgccggtgcccgcgccgcccaacggcaggaggtatcgccccgtcggctccagcgatcgcgccgtcatccagatgacctccatggagcccggctcctcctcctctaccgctgtggcagccgtcagtggcatcacgccccagccaccaaggtatatggaagcttcgcttcaaattttggagatcgaattttagcaatattctcttctagggggagtagactaaaacacttgtactgcttgaattagtataccattgcttgtgcaaatccgatcgtgcattgtcttgctcgtgcgttattaagc

SEQ ID NO: 10990 - DNA, 1079 bp, Oryza sativa
  ref <308>: DATABASE ACCESSION NUMBER: AK108338
  ref <309>: DATABASE ENTRY DATE: 2002-08-28
atattttacttattccgtgagtcggaagcggggcctggcccctccttttggctctaaggcccgagtccctcgggccgatccgggcggaagacattgtcaggtggggagtttggctggggcggcacatctgttaaaagataacgcaggtgtcctaagatgagctcaacgagaacagaaatctcgtgtggaacaaaagggtaaaagctcgtttgattctgatttccagtacgaatacgaaccgtgaaagcgtggcctatcgatcctttagaccttcggagtttgaagctagaggtgtcagaaaacttaatagtactcatttggctccagaggggcaggagcgaccaaaaatgggcttcgtcacggcggcggccgacgcggtggtggcgctgctctccttgaccatggcggtggcggcgccgctgttcgacgcccaggtcgtcctccctcgcggcctctacccggcgccgctcgtcggcatccaccggtggttcgccgccgagttcggccactacctcgtcgccgacccgccgcccttcttccgcggcctcgtttggctcgacctcgccttcctctggccggtctgcgtcgccaacctctacggcatcctcgcgcgccgcccctggtccgccgccacctccatcatggcgggcgtctacgtgctcacctacatgtctgcaatcttcggagagatgctgggctcaggaagaacaacaccgaagctgattcagctgtacgttccattcgctctggctgctgtaactgcagttctgcgtggtttctgctcatgctcagcacaggctactgctgttgcatctcatgccccaactgctcggaagaaaaggctctagatcagatgccatccgacgggagcggcagccatcagttatggtgttggcacccaattgcctattggtgaccttaaagatagttggaccatacatgagggcaaacaaagtaatctctcgttttaagttgtcattttatttgtttttttttcaaatcgatgtattatgattcaatgttaaagagttactacatttgcctcaagcagcttacaaagtaatctcttgttttaagtt

SEQ ID NO: 10991 - DNA, 897 bp, Oryza sativa
  ref <308>: DATABASE ACCESSION NUMBER: AK108339
  ref <309>: DATABASE ENTRY DATE: 2002-08-28
ctccacgagtgcagcccgcggcggttcgtccacggcgaggtcaagccatccaacgtcctcctcgacgccgactacaacgccgtcctcgccgacttcggcctcgcccgcctcctcaccatcgccggctgcgccgacccttcctccgcctcgggcggcggcctcatgggctgcgcgctcccaccctacgccgtcaagcccgcctccgccgccgcggaccaccaccaccgccccagcgcgtaccgcgccccggaggcccgcgccgtgggcgcgcgccccagccagaagtccgacgtctactccttcggcgtcgtgctgctggagctgctcaccgggcgcccgccggagcaccacgcctcgccgtccgcgtcgacctcctcgtccgcgtcgttctcggggaccaccaccacggtctgcggcggcggcggcggcggcgaccaggcgcaggcggtgccggaggtggtgaggtgggtgcggcaggggttcgaggacgcgcggccgctgtcggagctggccgacgcgggggtgctgcgcgacggcggcgcgcggaaggaggtggtggcggcgttccacgtggctctcgggtgcgtggaggcggacccggagcggcggccgcggatgaaggccgtcgccgagagcctcgacaagattgggtcgtgaggaaagtcgctcagagctgggggggatgatgtgcatggttggtttctctgtttttcttttttttttcttttaattttaattttttatgttttatttttttgccctattattttttttgtcttccttttgcaccattgtaattcctgataaaaatgcaattgttgtagtataatataatatagaatgagaacaagtttatcttctttgtgaaataggaatctgcttgtgaaatctaccacc

SEQ ID NO: 10992 - DNA, 819 bp, Oryza sativa
  ref <308>: DATABASE ACCESSION NUMBER: AK108340
  ref <309>: DATABASE ENTRY DATE: 2002-08-28
aaaagacgccagcaacagtggacagatcgcagccgcaacacccacacatacccccaaacataccatgtggccctcgttaatagccggtctggcactgctggccagccggcacaagccctgtacttctacattgacgggccctcccagaagtgcttcttcgaggagctgccaaaggacacgcttgtcgttggccacttcacagcaacacaatggaacgagcaagcaaaggcatatatgcctaaccccgacatgggcgtctttataaccgtggacgaggtcttcgacaacgaccaccgcgtcgtctcccagcgctccaagggcagcggcaaattcatcttcaccgccgccgacgccggcgaccaccgcctctgcttcacaccgaccaacgtgcccgcgacctccggcttcctcttccacggcggctcggccggcggcatcaagttcgagctcgacatggccattggcgacacctcgaagatcgaaagctcggacaaggacaagatcgaggacgtggtcaagaaggtgcgcgacctgaacgcgcgcttgcaggacgtcaagcgcgagcaggtcttccagcgcgagcgcgaggcggagttcagggatatcagcgagagcgtgaatgccagggttgtgaggtggactttgctgcagcttgcggttttgggcattacttgcacgtggcagttgagctacctcagggctttcttcatcaagcagaagcttacgtagggcgattttggaatcaagagcactatgaagaatggagacgaagatctgaggacaggcatgtatatcgtgtgtttggatcttgtttggtct

SEQ ID NO: 10993 - DNA, 889 bp, Oryza sativa
  ref <308>: DATABASE ACCESSION NUMBER: AK108341
  ref <309>: DATABASE ENTRY DATE: 2002-08-28
gactccaccgcccgccaacccagtcttggaccgagctgagccgccatggcgacgacgcggccggcgcgcagcgacccgcacctgccgccggaggaggcggcgcgggtggaggccgaggtgcggggctacttcgacagcatggcccccaggcgcccttccaagccgccgcggagcgacccgtcggacgccggggagggtggggcggaggccgacgccgacgccgacctgccggagcttcggaggctccgcgacctcgaggccaaaccccagaagttggtgctggacggtggggatgtgaacggggaggagtatgtggagacgcaatactacaacgggctcaattgcatcgacaagcaacaccacacgactggtacagggtttatcaaagtggaaagacccaatggtagctccttcaacgtgacaaccgttgcctactcatctgacagcattatccgctgcatgagcaaccctgcaacaaatgattggataccatcctcagagacggttattccagtttcaaacaagcctagcaggagtgactcctgagtcctgaccgggttcccttctgctgtatgaatctttttataaatcatctgaagagaataaagagcacatagagcagccacttctgtatatcggaggaactcagagaaaggtagagaaatgaaagcgctgcaactgcaaggtttataaggcatgaatctgtcctgctcttcatcgtgttttatgtgaacttgtcgtatgcaacttcactgttcatactcaaaactcagtatcatgaatgattggtgtaaccgtgtaagtggatagagtaccagttctgtcagttttttctctttgctgtaaggatattttccgtgtgtctatggaaaatgggtcattgccagat

SEQ ID NO: 10994 - DNA, 651 bp, Oryza sativa
  ref <308>: DATABASE ACCESSION NUMBER: AK108342
  ref <309>: DATABASE ENTRY DATE: 2002-08-28
atcttcttcgcactctccgccgcccgccccctgtcatcgtcctcccgcgcgccaacgatggctgctcccatcaccgccgccacatcgcctctctcccctgcgtctcgggttcaggtgatgtgctcaatgctcaatccaacctcagcttctttctccaggcaaacagcaagcttcccgtccattcggttgcgcccggtcccaagtcgcttccaggccttgtcttgttcggccaaacaagacactattgataaggtttgcgaaatagttaagaatcagttagcagtagatgaaggcactgccgtttctggagaaacaaaattcgtggaccttggtgctgattcacttgacacggttgaaattgtgatgggccttgaggaggcatttcagattaccgtggacgaatcgagtgcgcaagtgattcagacagtggaggatgctgctgtgcttatcgacaagcttgtggcagagaaggacgcctaattagctgttgccaaagctcagtttgttgtactactacaaaatacaaattgtagtttacaggctatgaatgccgatgaatctcttgttgaatctagtgagtctctgcagggatttgtgcgtgttttgtttgtttcacagattttgaataaaggctgggaatgagtaagtgtt

SEQ ID NO: 10995 - DNA, 834 bp, Oryza sativa
  ref <308>: DATABASE ACCESSION NUMBER: AK108343
  ref <309>: DATABASE ENTRY DATE: 2002-08-28
atgccgtgtcgctccgctccagggcaacacgggaggcgacccgaagccgccccgccgccggccttctctccctcgcctcccccacctcgccgccgcctgagcagccgccggcaaagccggacggcggcaaggacggcggcggcggggccttctaccccctccaacaccctgcggttggggccccgacgggagaggcatgggcctggctacgcacagcgcctccggctatggctccccctatttcgacaccggctcccccagtccggatttggcctctctggcgagggaggccggatcccctccggtggctcctcagctgtggacgacgcgacaagggcagcggtcagagggcagcaggaggcgtgggtggccgcggcaggagggcgagtgctgcggctggtctggcgatctgccagagctgtgggtgatggcctaggactgattgctaaagggacgatgcagccgaccggcgacgatcattcttgcgcgaattgggtgtgtgggtttggacgggaaatcgctggcgaaagcctcgccgtgccattggccggctgacgacggcggcgcctttggcgtcgttcccctccttggaggcgtcgttctggcgttgatccctctcctttccctaccgttctccgagtgaaaacctggctccggcttccggacgagcggtgacggagatccacgtcgtgtcctccttggaggcaccgctttggagaaacattttcgtgcaaggatgtagttaatggtctatgcattggcttcgaagcttttcagtacttggttttgatgaggccttcgctgtctagtcccactttttgttttgcggcgggc

SEQ ID NO: 10996 - DNA, 977 bp, Oryza sativa
  ref <308>: DATABASE ACCESSION NUMBER: AK108344
  ref <309>: DATABASE ENTRY DATE: 2002-08-28
gttgcgctggtcaccccgctcgccgccggctcgccgcctcccaccactggatcggccaaatccgacgccagcgccgccgcctagccactccatggaccgctctcgccacaagaactcgcctagttccgagcgcttcctcggctccttcctcccctccgcggccgccggcgaccagcccggatcggcggccttcgagctcgacgaggacgacctgttcgcctctggggctggatcccccgagcggccgcagccgtctcgccgccctctcatcctctccgcagtccgcgccgcaaaccctagccccctcccccgcctccgccgcccgccggagggcatcctcgatgctctccccgagcgccgctcccctttctcaccgcctccatcgtcttcgtcgaactcgtcgaccaccgcctccccagcggcggcggcggctgctcctccacgcctgatccccaccatcccccgcccggcggcggctctggcaccacatatcccgcagtctgcgccggtgaatgtgccggtagcgcagtttaggcggttatcggtggaggcactgatggataaagctgaggatgacgacgacgacgacgaggagatgctgccgccgcacgagatggtggcgcgagcgcgggcgcgggattcaccgatgaccaccttctcggtgctggagggcgccggccgcacgctcaaggggagggacctccgccaggtacgcaatgccgtgtggcggaagacaggattcctcgattgatccgtgccttctgcattcagctgtagcttaagttagatttgagtgattggttatgcactatgcatgtttgaatttgtctgtgtacaacatggatgatcgggtgttaattttggttgcacctgtaaaatatgtctgtcatattatcaatcattattacttgtaaacccttgattggagctgtcaattgttcagcattgaactattggataaggtgaattgtgacctc

SEQ ID NO: 10997 - DNA, 1175 bp, Oryza sativa
  ref <308>: DATABASE ACCESSION NUMBER: AK108345
  ref <309>: DATABASE ENTRY DATE: 2002-08-28
ggttccgggaggggcgcatttattagataaaaggctgacgcgggctccgcccgctgatccgatgattagggttcgattccggagagggagcctgagaaacggctaccacatccaaggaaggcagcaggcgcgcaaattacccaatcctgacacggggaggtagtgacaataaataacaataccgggcgccatgattagatcggttagctagctagcttgccgcgacggcgcctccggtctcctgatcctcgccggccagctcgacctccggcgaggaggtcgacgggttgacgacgttgcagttgaccctgatctggccgcaccgcccggtctgcacctcgatgtggcccatcttcaccatggcgtcggcgaaccgctgcttccactccgcctcgtccgccgcgaaccgggtcaccagcgcgttcatggtggcgttcacccgcagctggttgtcggagaagaagagccccttcccctgcggcagcagcttgtagtagttgttgtccagcgtcgccggcgtgtccgggtccatcggcgtcgtcgccagcgtgtcccttgtggggcacagcgcccgcagctgcgccgcgtacgccgggtccagcccggcgtccacctgcacacacacgcgcacgcaccgtcacaccgcgtaactgcgaaaaagcatggggggcgccatggacgacggcggcgcggcgaggcgacgtactatgggggtgttgccgttccagacgcggttgaagaaggaggcgcagaaggagcggccgacggtgtgggcgccggagaggacgaccatgtcttcgagggtgaggaacttgttggcgaagaacgtgtcggcgagctgctgcgccgtggcgttgggcgggggcaggttgtggagggcctcggtgccgttggacacgctgccgtcgcggcggccggcggggacctggtagtcgacgttgccggttagcttgacgctgtcgcgggcggcgaacgcgatgatgtcggcgcaggagacggtgcgcgggcacgccgcctcgacggcggccttggcggcgtcgatcacctcgaagccccggaggctcgggttgttcggcgtcgcgtcgcgctccgtctggccaccggcggggttcttggtcaggaggacggatgcatcacacccctgcattgcagtaacaggaaggaatttctttcag

SEQ ID NO: 10998 - DNA, 793 bp, Oryza sativa
  ref <308>: DATABASE ACCESSION NUMBER: AK108346
  ref <309>: DATABASE ENTRY DATE: 2002-08-28
gttttggcagtcgtcggccgaccaaggggacctctcggatgtggtgagggccagccttcagctgcagacggcgcctcgccatcaggctgcatcgccgccgtatgtgcacctcttaggaggaggaggcgaaggaagagccagacgaagaaggtggtgtgcatcccggcgggggcgagtggcggcggcggcggcgaggtggtgccgtcggacctgtgggcgtggaggaggtacgggcagaagcccatcaaggggtcgccctaccctcgcgggtactaccgctgcagcagctccaaaggttgctccgcccggaagcaggtggagcgcagccgcgccgaccccacaatgctcgtcgtcacctacacctccgaccacaaccatccatggccaacccaccgcaacgccctcgccggctccacccgcccctcctcctccaactcatccaacatacgcctccaagacagtactccagttcatcatcagagtcagactggccacgatcgtcttacgaccactcacctcaagcaggaggacgtgatcatctccccctccctgctgcagcccgaccaccatcagctgtgtaccattattgacaccaagcaccacctcttgtttcatcaagactatcctcacagcttcggcttgttcgactagccacactttcttgtaagctactagtagctagctagctactttaccatctatatatagcctaatgtaagctagcgtacgtgcttaattacttgttacagagcacgccacaattgttagttaaaatgttactccctcccgtcac

SEQ ID NO: 10999 - DNA, 1096 bp, Oryza sativa
  ref <308>: DATABASE ACCESSION NUMBER: AK108347
  ref <309>: DATABASE ENTRY DATE: 2002-08-28
caatcgctcacccaccagtcagtcagtgctagtagctggcaaggatgccgcaaatcaatctggagtccctcttctgcggcggcggcgaggcggggtcgagggtggcgtgcgagaccatcgcgctccccggctgctccgacgccccagcggagtcgcgctgcgtgcggataggggacggcgccatctgggcggagttggccggcggcgcggtgctggagagggatggctccaccaagggcagctctaatcccaaggcggccgctgcgtccgggaaggggaagaagggcgggccacggccgtcgtcggctgagtcgaggaggctgccggtgaccggcaaggcggccgtcgtgatctgcggtctgccggcgggaaagatggtcgcgcagaagaagcggctgtccccatgccttggccgcggatggcgccgggcacccgcggcggcgggggccagggtcttcgcgagcgaggcggtggagacggatcccgggtccccgaaggtttcgtgctttggggccgtgcggtcggagaggtcgccggcgacggcggcggcggcgcctgcgcctcccgtggaggacgaggagaggaacggcgggtgctgggcgagcgtggctgccacgctgcgtcacctatgtcgttcttccagcaatccgctcgaaggtgagctggagacgaacgagtggaacgcaacggcgacttcgtcaccgacggtcgccgctctttcgccgccgcggccggtggcggttgggctgggagagatgaagcgccttgcttcacggcggtggccggagaccatggcagtggctgggcagggaccagtctcggcggcctgaatctggtatatcgacggatcacggtccccgaggcaaacaaccatccgttcttagtacttggaacagcatctcccgtgctaatatccagttgttaactctgaaaaaagtcatctttatcttcttctgcttgtgcatgtgtgacacttttctttattgagcaagctgctccttgtaccttgtgttgtcgtcgatgttagactagattaatcactcactggactttctacactgtagaaccattgcaatgcatcaaccaaattctcttg

SEQ ID NO: 11000 - DNA, 1202 bp, Oryza sativa
  ref <308>: DATABASE ACCESSION NUMBER: AK108348
  ref <309>: DATABASE ENTRY DATE: 2002-08-28
ttttttctcccaaatttttttccctctcttctcccaacaacacaccatcgagcaaagcaaaggcgagaggaggagaagacgaggagttttctcccaatcctgagggcttgcaagcaaaaatggcccccctcccaaccccaccaccaccatccgccccttcctccgcgccccctttcaaatccaacgcctcgagctctcgccccaaccgcgcgccgcccgagggcgcgcccacctcgccggcggcggccaccaggccgccaccgttcgccatggtcccggcggtgtccgaggccgtcctcgcggtgttcgacgtctccaccacgctccgctcgcaggggtacctcgccgggcaggagctgcccagcatcaccctccccgaggaccgcgccccggaggtgttcgagcggctgctcgggtccttcctcgcgcagtcgcatgggcccggcgtgctcccgccgcgccccatgcctcccctgctcggggacggcacccccgtggggctgctccgcctgtacctcgccgtcagggcgtgcggcgggttcgaggccgtgcgttcgtgggcggccgccgccgagatggccggcctcaaccccgccatggacgtccccatcatgctggtgtaccacaagtacctctgccccctggaggcgagcttcctcagggcccagaagctgagggaggaggccgggagcagcggcgggagcgccaagaagggcaagttcctcgcgccggcggccagggacgccgagggcgtcgaggaggtgctggacctgaagcgcaagagggagaacctcgtggggatgctcaactgggtgcgccaggtggcgaagaagccagatcggcgtcgctccggcaggaacgccgccgacaaccacctctccatggcgttgatgttccgccgccagatgttcgtcgacgacggcttcagcgacaagccccatggctgcgcatcgcctgagcccgaggcaacagagcctgaggtgatgtgacaatcaagcagaaagaggtaaacaagaaactacattacaaaacttggaatcgcaattgtgatcttgacatgagaacaaggatgcgattttatttctgatgcaagaactttagtcaatgtctattttatgagactcggtctattgcacttgattccatggatgttttaccgaatcttgttgtttgaaattttggaatgaactgtttatggccgt

SEQ ID NO: 11001 - DNA, 626 bp, Oryza sativa
  ref <308>: DATABASE ACCESSION NUMBER: AK108349
  ref <309>: DATABASE ENTRY DATE: 2002-08-28
ggcacgccactacgccacgcgacctcacctaaccgcgcgcgcgcctgcccacccacgcgacgcgacgcgcgcgcggcgtcagatcgcggcggcgaggcgaggcgagtccgcgccgccagcaacctggtcgtgccgtgcgagccatggagaggatcatcgccatgtccgtggtgggcgcggggcccgggaacgtgttcggcccggggatgagcgccggcgcgctcgagagcttcgtcccgcggcggcaagcgggcgccaccgacaacgcggcggcctcggcggcggcggcggcggagggaacagggcgcggcgcgacaaggccggcggaacaggcgacggcggcggcggaaggcaggagggccggtggcgacggcgtcgcgcggttcgatccagcgcgggatgggctcctctactgcttcgagaccatctcgccgcattgaccctgctctgttcttccgatcccctcttgttttgggggggattttctttgtttctttctttcttaggttgcgtgtgattcgagcgatttggaaacatgtctggatttgttaattgcacaaggatgtcgagcaattctgaaatcaatcgaattttttgttttttttctgcaaaaaagaaaagaaaag

SEQ ID NO: 11002 - DNA, 1008 bp, Oryza sativa
  ref <308>: DATABASE ACCESSION NUMBER: AK108350
  ref <309>: DATABASE ENTRY DATE: 2002-08-28
accaacaagctagctgacaatcaagtcatcagtccatcaatggcgatggcgtcgtcgtgttcaccactagtagccgtgctggtggcgctgctgctcgtggcggcgactgtgccggcgccgtgcgccgccgtggacccggtgaacacgtactgcgccaggaacctgagcggcgcgccggcgcaggcgagcgtggcgcaggtgctctccgagctggtgccgcgcgcctccgccggctactacgccacggccaccgccggccgcggcggcgacggctccgccatctggggcctcgcgcagtgccgcggcgacatcccggcccccgactgcgcgctctgcgcctccgccgccgccaggcagctcgccggggcctgccgcggcagggccgacgcgcgcgtctggtacgactactgcttcgcgcgctacgacgacgccgacttcgtcggcctcccggacaccggctacgcgctcatcctcctcaacacgcagaacgccaccgacccggaggcgttcgagaaggcgcagaggaaggtgatggcgcgcgtggcggcggacgccggcgacgcggggggcggcgggctggcgagggagaccgcgaggttcaaggacggggtgaccatctacgggctcgggtggtgcacgcgcgacatcacggcggcggactgcgggctgtgcgtggcgcaggcggtggcggagatgcccaactactgccgattccggcgaggatgccgcgtgctgtacagcagctgcatggcgcgctacgagacctacccattcttcttcccgctcgacggcggccagagcgccgacgcctccgcctccgccgccggcgactacgacagggtcgtcttgaatccgtagattatttcaactctctataatggccatatatataataagggtatcaaaaaatcccatatattactactaggagacgcattgcaggtttatatgtttacggttgtaatccaatttatctcataattaactaaataaataattcgccagatg

SEQ ID NO: 11003 - DNA, 887 bp, Oryza sativa
  ref <308>: DATABASE ACCESSION NUMBER: AK108351
  ref <309>: DATABASE ENTRY DATE: 2002-08-28
caagttcaccgcccccagcggcaaggagctgcctccccgcggctacgaccccggcaacaacacctaccaagacccccccaaggaccgctcgtcggttcaggtcgccatcgaccccaagtcggaccgtctgcagaagctcgagcccttcaagccctggaacggcaagaaccccaccgactgccccgtcctcatcaaggcgcagggcaagtgcaccaccgaccacatctcggccggtggcccgtggctcaagtaccgcggtcacctcgagaacatctcgaacaactgcctgatcggcgccatcaacgccgccaacggcaaggccaacgaggtgcagaacgtcttctcgggcgagtggggaccggtgcccgccaccgccatccagtaccgcgagtcgggcaagccctgggtcgtgatcggtgacgagaactacggtgagggctcgtcgcgagagcacgccgctctcgagccccgtttcctcggtggctgtgccgtcattgcgcgctcgtttgctcgtatccaccagaccaacctgcgcaagcagggcatgctcgcctttgagttcgccaaccccgccgactacgacaaggtccgctcggacgacctcgtcgacatcatcggcgttactgagctcgccgagggctccaaggtctcgctcgtctgcaagcacaaggacggctccaaggacgagttgccctcacccacaccatgaacgacaaccagatctcgtggttcaagcacggctcggccctcaacaagatggctgccgccgccaagtcggcctaagcgggcttgcggcaggctatgccgttgccatggcagatgtgatacggctcgttcctgtacccgtcttgctctgctccttgtccaatctgtacttgttcaaaaac

SEQ ID NO: 11004 - DNA, 1620 bp, Oryza sativa
  ref <308>: DATABASE ACCESSION NUMBER: AK108352
  ref <309>: DATABASE ENTRY DATE: 2002-08-28
aacgccattccccagcaccacctgtcgacggcgtacgactactatctcggtgctttgttgctagcttcttccagctagccatgggtgtgaagtggaaaggtggtggcgcgctcctcctgctcgccgccgggctgctcctggtggccgtggcggcggcggcggcggaggaggagggtcggcgggacccgaaggaggagctccggtggtgcaagaagcagtgccggtgggaggccgggcaggaccagcggcagctgagggagtgcgaggagcagtgtctccagcggcagcaggaggacgacgacgacgacgagaacacgcacggcggcggcggcaaggagtgccgccgcgagtgccgtggctaccgcgacgagccgtggcggaagcaggagtgcatgaggcagtgcgagtggcgccgccacgagcagcaccaccacggcggcggccatggcggatccaggccggactgccgtgagcagtgcgagcaccagcaggactggtgggagaagcagcgctgcctcatggactgccgccaccggcgacaggaggtcgacgccgacgacgacaaccaccatggcagagacccctgctacaagcagtgccgccaccaccacgaccagtggaagaagcaacaatgcatggaggagtgcagataccaccagcgccaacaagacgccgccgtcgacgtcgacgaggaagacgacaaccacggcggcgatcgctgccgcaagcagtgccagcaccaccatgaccagtggaagaagcagcagtgcatccaagattgcaggtaccatcaccgccaagaagacgacgtcgtcgaggaagaagacggccatggcgatcagcaatgccgcaagcagtgccaacaccaccatgaccaatggaagaagcaacaatgcatgcaagactgcaggcagtggcggcgccaggaggaggaagaggccgccgtcgacgaggaagaagaccacaactacggcggcgagagagagcaacactgccgcaagcgatgccagcaccaccacgaccaatggaagaggcagcaatgcatgcaggactgcaggtacaggcgccaggaggaagacgacgtcgtcgacgatgacaaccaccacggcggcggcggcggccatggcggcgaccactgccggaggcaatgccagcaccaccgcgagtggcacgagaggcagcggtgcatgcgagactgccacgagcgccgccatggatgggccacggtggccgccgaagccatcctccaggcagtgtaattaaaggtaacgtaattaagatactgcttcgccgggtgtagggtatagctagctagggtttccatggtcgatcgacctagagctagtgctgtgctgctcgcgcgcgtgcacacacgaatgtgtacgcgagggaggggagaggaataaattgagcaggagatagatggccatggctctctccgataggagagcttctatatatctgggggagacttggaagctatatatactagctagtgtctactatgtctatgtatccggttgttgcagtacacttgtgcttggaagaggtgtatgtatgagataaataaagtggcgttcgcgaaaaagaagagataaataaagtgagagccctttgagt

SEQ ID NO: 11005 - DNA, 625 bp, Oryza sativa
  ref <308>: DATABASE ACCESSION NUMBER: AK108353
  ref <309>: DATABASE ENTRY DATE: 2002-08-28
atctcattctcctctattcggaactccggcgtcgggcatggccatcggccgtcgccaagaacggcgcgccactcctcggccccggcggcggaccttcctccagctcgtctccgcgggctcatctaccgctgccacgcgcgcgcgcgcgcgcggggtgtcacaccgcgacgtcaagccacagcggagcaggaggccggccgcctccacgccagcttcgaggagaacgtacggcggccgcccccaagtccatcccattcgccgcgcgcggccttctccgacctcgacctcattgtcgtgtaccccgcgccggcggccgggtagaacgcggtggtgcgcgctgccttgccctcgtttctcgcccccctccttcgccttgccgtgtcgtgctgcatctgtttggcaggcaacgcgtcggccgcggccgttgaacttggtagtgtggccatcagcaagcaggcaacagcatccaattttgattttggtttgacgacggtttcagaatgggtttaaatccatttcttagcttgtttggataattggattagctttaattttgcacttggggctgttgagattataggcatataataatttaatatattccataaataaatcatggcattgc

SEQ ID NO: 11006 - DNA, 1410 bp, Oryza sativa
  ref <308>: DATABASE ACCESSION NUMBER: AK108354
  ref <309>: DATABASE ENTRY DATE: 2002-08-28
ctcgacctcgcttgaaagccaccacacaaccgagagtcctgtccctcagtccgcagggcaagctctcccctcaactctttctctccgcagattgcgcatctagacgggaaaagcgcgaaaggcgcttcaaaccaccaagatgtcagttgcttccaagaacatttatgagctgctgggcaatgaccccgagctcgaccccgacaggccggcggacccgccaacaaaggccatcgagaagcctgtcatgaggcacggcaagcgcgacggcaccgatgcgccccgacctgcgcctgagcggttgggcaaccagaatcgcgtcaagcagaccgccagtgccaacgagaacgccttccgggatcgcggcgtcggtgcggataagaaccgtggccgtggatcaggcgaggcccccgcaagcggagagcgtggcaactaccgcggccgtggccgtggtggacgtggaggtcgcggaggcgccgctcgtggtgagggtgatcgtcgcagcaggaccggcatcggcgagcaggagaagcaggctgctcacggctggggcggcaacgacggcaacgctgagctcgaggacgagcaggccggcgaagccattgccaaggctgaggagaaggacgccgtagctgatgccgctgagggcgagaaccaggccgagcccgagcctgaagacaagagcaagtcctacaccgcctacctcgctgagttggctgagaagaagctctctctcggctcccagaacgtccgcaaggccaacgagggcagcagcaagaagttccccgagggcaaggctctctcccgcgatgaggaagaggacttcatggccggccagggcggcaagaccaagcgtgagcgccagcgcaaggagaaggtccacgtcgagctcgatggtgaccgcatgctcgcccctcctccccgtgagggtggcggccgtggacgtggccgtggtgacggtgctcgtggtcgtggtgagggacgccgtggcggtggtgaattccgtggcggagagggccgtggccgtggcgagggtcgtggcgagttccgcggcggacgcggtcgcggagagggtggtcgtggacgcggcgagggccgtggacgcggtggccgtggcggaaaccaggccaacatcaacctcaccgactccagcgctttccctagcctgggcgcataagtcgactcactctcgacttccacatacacgactcgcgagcagccgtgttttctagcatactccagtatgcctagacggaccgaaacgaattgaaccaaaggatctggcaatgagtcaacgacaagctgagctgagatggacgatatagagatcacaaaaaaggatggggccagcggggctttctcaaaaataactctcatctacccaggtatccgaatgtcatatcagtgaacttc

SEQ ID NO: 11007 - DNA, 873 bp, Oryza sativa
  ref <308>: DATABASE ACCESSION NUMBER: AK108355
  ref <309>: DATABASE ENTRY DATE: 2002-08-28
actgatcacctcgacctcacttcctcctcaacctcgagctcactcctcgctctcccgccgcgagcgcgcgctctctctcgccgcgaccacgcgcaatccgtcgccgagctcgaggacgtcggcaatggcgcggccgcagcagcggtatcgcggcgtgcggcagcgccactggggctcatgggtctccgagatccgccaccctctcctgaagacgaggatctggctgggcacgttcgagacggcggaggacgcggcacgcgcgtacgacgaggcggcgcggatcatgtgcggcccgcgcgtgcgcaccaacttcccccacgacgtcgccgacgaggccgcgccgccgccgccgccgcacagcgccgccgcagcctcctcgtcgttcctctccgcggcgctcgtcgccaagctccaccgcttcaacctcgcctccgtccaggctgcgcagcgcggcaacagcaacgacgacgactccaccacctcctcctccgccgccgcgtcgtcgcgcgccgtgattccgtcccttcccgccgccgccggcgcattgggcaatgcggcggcgacggcggagtggagcggcgggttcctcgaggagcagtacgtggaccagatgatcgaggagctcctcgactccaacttctccatggagatctcctgctgatgtgccctgttcatctacctgttcttctctgctccatctcctgtttctttctctctctcttttttttctttctttttttttgtttttttagtttagtaagctatgtgaggaagaactctgatcgaggttagtttggtcacagtgagttctggagcagcttgtgtatacggtagcatcatttagagcataatagggttgcagttgagaccttc

SEQ ID NO: 11008 - DNA, 1410 bp, Oryza sativa
  ref <308>: DATABASE ACCESSION NUMBER: AK108356
  ref <309>: DATABASE ENTRY DATE: 2002-08-28
aactgttgctaaccaggtagcaagtagtttgagtcgtgcaggcaatgccatgatgccttcgggatttgcttcaggaattgctggagctcctgcgcacctttctcctggaaacgttcctgctcatatgaaaggagagttgaacacagcttttattgggcttggtgatgatggtggctatggtggtggctgggttcctcttgctgctcttaagaaggttttgcgaggcatccttaagtaccttggagttctatggttgtttgcgcagttgcctgatctcctgaaggaaatactgggttcagttttgaaagataatgaaggcgcacttctaaatttagatcatgagcaaccggcattgcgcttcttcgtgggtggttatgtatttgctgttagtgttcatagagttcaactgctgcttcaagttctcaatgtgaaacggtttcaccatcagcaacaacagcaacagcaaactcctcagaacaatggccaggaagagctaacagttcctgaaataagcgagatctgtgactatttcagcagacgtgttgcctctgaaccctatgatgcttctagggttgcatcttttatcactttgcttactttgcctatttcagttcttcgagaatttataaaactaattgcatggaagaaaagtttgccccaagctcatgcggacaatgctactacacacagggcacggattgagatctatttggaaaagcaccctagattggtttcagatgattacactgcaagctcttcatcatcaaagagcaatattcatcatgatagagccaacaattcagtagattttgccctaacttttgtacttgatcaggcccttgtaccccacatgagcatatctggtggagctgcttggttgccatattgtgtttctgtgagagtaaggtacacctttggagaagatagtcacattgcattccttgcaatggatgggagccatagcggcagggcttgttggttacaacatgaggattgggagaggtgtaaacagagggtttccagagcagtggagactatgaatgggtccgcagcagttggagatatgagccagggaagactgaggatggttgctgagatggttcaaaagcaactgcaactcagcctattgcagcttagagatagcccagtctctactggctctgccgcatcatgaaatgaatatttagatctcaacggcgtttatactttggataacatggccatgccgaacgtggtgttcagtactgaacggatgcaaagatgtctatatttcaaggcaatgtctgatagtgaattttttcagccaatattcataattctagtgccataattttattgccaggcgaacatctcataattttgtacagtaatattggtaactagtgtggtgctgacctcagttcaccctgc

SEQ ID NO: 11009 - DNA, 916 bp, Oryza sativa
  ref <308>: DATABASE ACCESSION NUMBER: AK108357
  ref <309>: DATABASE ENTRY DATE: 2002-08-28
ctcacttagcagaaatcctccgcctccatccctcatcgaagttggctccctcttccccgcctccatgactgccgccaccacgacgactaccgcgaccacgacgcgaggacaacgacgacgactgtcgcgaggatgacaacgacacgacgacggtgccgatgcctgtgggggtggcggcggacggaggagagctgtcatcggcatgagagagaggccggcggcagcggtgtggaacttggcacctgacacagggctgcatctgtttagttcgattttcggcgaagaggtaagtcctacgtttcgccggccctggtgaatctatcggctacgttggcgttgttcaaggctacatctgtatattcgacctcttggattgctctggttcggttgatatttttgcctaccaatttatcatgtctctgttaatctagtcttagcatatcgatttagctctatccgctgcttctcgctttagggtttctgccagtatcggctaaatcgtcttgctagattagattatcttggacatctaccaccctaaaaatcagtcaatggcttgattgtatagatattatgtttcttttcatacttagtgctgcatcagttaagtttgatatactaagccgtgcttagagccatgatccctagcctgcttcttgattacctagtgctgcatcagttaagtttgatctactaagccgtgcttagagtcatgatccctagcctgcttctttgattgcaaataagggtttcattggggtttcagccgataaggtatctggatgttgtatcagcttacaaggattacatatagattagatttagccgatgacaataaagattttattatttatctaatattgtggattttatgacatcggatcttcatcttcagccgatgaatactttaaccttc

SEQ ID NO: 11010 - DNA, 1035 bp, Oryza sativa
  ref <308>: DATABASE ACCESSION NUMBER: AK108358
  ref <309>: DATABASE ENTRY DATE: 2002-08-28
atgacgtccgctgtgggcccgccgtccatgtggcactaccgttcgcggccggaccgcacgaccagagccgtgaatatctacacgggcgagcatcgcggctttgactatctttcgcccaagatccggctcgagccgagcgatctgctggcgtgctcaccctgcgcgccaccagcgttaccgcagtggattcacctcatctgctcgcccgagcgcgcactggagacgatcgctcagatcaatgccgtcctcaatgccgagaagagtccaggtgcaaggtcagcgtcgagctttcctaaactcgtctacgagccaataccggactcgtgcgtctttgacaacctcgacgagtgtctgcgcgttctgccttcgctggccgtgttcagtcccaaccacgaggaagcagccgcattactcgggctcagcacggaatgggaacacatttgccagcaggccgcggcagatccgacgggcggtactcagtcgatcatcgactttgtcacatcgaaactggcgggcggattcgttgcgcatctgcagcgaacgcacgcaccaccagacggcacggctggcgaagcatttggacccatcatgtgcattcgcagcggagcctggggctctgtcgtcggaagagctgggctgggcttccaacacgtgcccgcatggcattcggcgtcggctcgtaaggctgaggctgaaggaggattggactgcagcccggaacgcatccgagatgtgacgggcgcaggcaactcgttcctcggcggcttcagcgcttacctcgtgcagaccgagtcgcagtctcagctggatcccggtacaaggatgcgagaggcggcaatgtacggtgctgtgtccgcctcgctcgtcatcgaacagctcggcctgccgcacttcgacgtcgtcgatggcaagaagctctggaacgggcacacagctgctcagagactagagctgctcagagatagacaaacgcctgcgagctagcaagcaagccgtgcggacacatgcaatagaggctcgcagatcattcgcgtg

SEQ ID NO: 11011 - DNA, 1059 bp, Oryza sativa
  ref <308>: DATABASE ACCESSION NUMBER: AK108359
  ref <309>: DATABASE ENTRY DATE: 2002-08-28
aagcttgtgagttgtgatagccatggaacccgacgccgacgagttggtgttcgacagctcatacctccgcatctacaagaacggcaaggtagaccgcctccaccggccccctctcctcgccgcgggcgtcgacgatgccaccggcgtcgtctccaaggacgtcgtcctcgacgccgggacaggactgttcgtgcgcgtcttcctgcccaaggtgcaagaccaagaactcggcaaaaagcttcctgtcctcgtgtacttccacggcggcggcttcatcattgagtccgcggactcagccacgtaccacaactacctcaactccgccgccgccgccgccggcgtccttgtggtgtccgtcgactaccgcttagccccggagaacccgctccctgcaggatatgatgattcttgggcggcgctccagtgggcggtgtccgcccatgcggacgactggatcaccgagcacggcgacacggcgcgcgtcttcgtcgccggcgacagcgccggcggcaacatcgtgcacgacgtgctcctgagggcatcctcgaacaaaggaccgaggatagagggcgcgatcatgctgcacccgttcttcggcgggagcacggccatcgacggcgagtccgacgaggcggtctacatagcctcgaaggtgtggccgttcgcgtgcccgggcgcagtgaacggcgtggacgacccgaggatgaacccgacggcgcctggcgcgccggcgctggagaagctcgggtgcgagcggctgctcgtgtgcacggcgcaggaggactggctggtggcgaggggccgcgcgtactacggcgccgtggccgcgagcgcgtggcgcgggagcgcggcgtggcacgagacggagggagaggggcacgtcttcttccttcgcgatccggggtgcgacaaggccaagcagctcatggaccgcgtcgtggcgttcatagccagcgcatgaacttctcttcttcatctgtgtatgcttgcggacttgcagctgtatcttgcttgcctgagattaataaatcaataaaatgttatatattgtggcagtgg

SEQ ID NO: 11012 - DNA, 682 bp, Oryza sativa
  ref <308>: DATABASE ACCESSION NUMBER: AK108360
  ref <309>: DATABASE ENTRY DATE: 2002-08-28
aatctcgacgtttcgatcgcccgtcagctacaagacttagatatgatgaagcaaaccgcaatggatgaaactacaacaatctacgaaccagagcaggttttcaaacaaaataagccccaaaaacagagcacacagatatgctctattcatgccctttatgacctcatcgcaaccttcagtatttctcaatgagaagctgtacacaaatgtggcttcggaggattgctgaagatgcataggataaatgtacaccgtattttgtgcatgtggattacaaaccaatttgatacaaaggctgaagcattcaacatccaaggcagctatctgagtctatccagtagggacgctgagcatttgcttgacctgccatcacaaggagaagaaatatttgaaccaccaaagaccaagaatatggacttgtttgatgaattcaagacagcatctaagcaaggggcacatataaaattatcttctttgcaatagtattttcaaacaaacaaaggtatatatgacgacaatttcattcgccgttttgtgctctttgtgatcaatcggtgttttcctgtgcccaactactcaaaggtatgtaagcttggcatacctaaattttgtagaggatgtcaatgcaatcagtgcaattaactggacaagcttgactttaaaccacctaatgaaaagcatt

SEQ ID NO: 11013 - DNA, 931 bp, Oryza sativa
  ref <308>: DATABASE ACCESSION NUMBER: AK108361
  ref <309>: DATABASE ENTRY DATE: 2002-08-28
attgccttctccatttttcaccatttttaggtcagtgtattgcttaactggcccctcgtcggcacagtggttggcagtgctctcagtctcaccttcacctaccatgcgtcacttgctgcagtcgtcggagcacctgaccgccgcgacggcgacggcggcggcgtcgggcggccggggcgtccacacggacacgttcctcatcctcgccgccgtgctctgcttcctgctctgcgtcgtcgggctggcgctggtggcgcggtgctcgcggctgtgcaacccgtcgtcgttcgccgtcgaggcggaggaggcaatgcccccggcgccatgcaaggggctcaagaggaaggcgctgctgtcgctgccgaccgtgtcgttcgccgaggcggcggcggcggaggaggaggaggagcggccggagtgcgccatctgcctcgccgagttcgcgcgcggcgacgaggtccgcgtgctcccgccgtgcggccacggcttccacgccgcctgcgtcgacgtctggctcgtgtccacctccacctgcccctcctgccgccgcgccatcgtcgtcctcgcggcgccgtcgcctgcagtcaccgccgccgccaccgaccccccgccgccgtgctgcgccgccgacgcggcacaggcgtcgtcacagccaccgcaacccaccggcgccagcgaccgcggcggctgccggacatcggtgccgtagagctccagctctctctcgctcgcgtacgtgcatcattcgattgtacatacacacacacctagcaaaaacgtgaatagtagatacgtgttccgagagattttttcttgtactacgcagcaatgcaactgtagtagatacatgtgttctgtaaatacatgcatgtacacatctctgttaattaaccatcattttcccttctttttcgaacgataattaaccgtc

SEQ ID NO: 11014 - DNA, 1020 bp, Oryza sativa
  ref <308>: DATABASE ACCESSION NUMBER: AK108362
  ref <309>: DATABASE ENTRY DATE: 2002-08-28
cgccattgacaaccccgccgacatctgtgtcatctctgctcgtccttatggccagcgtgctgtcctcaagttcgccgctcacaccggcgctgtcgccattgccggtcgcttcacccccggtaacttcaccaactacatcacccgctctttcaaggagccccgtttgatcgttgtcaccgaccctcgcaccgatgctcaggccatcaaggaggcttcctacgtcaacatccccgtcattgctctctgcgacggtgactctcccaccgagtacgtcgatgttgccatccccaccaacaacaagggtcgccacgccatcggtctcgtctggtggatgcttgcccgtgaggtcctccgcctccgcggcaccctcgcctcccgtgaggccgagtgggacgtcatgactgacttgtacttctaccgcgatcccgaggcagaggagaacaaggacagcgctggtgttgaggaggccaaggttcctggcgccgacgaggtcggtgccgcccccgtcgaggctggcttcaccagcgagtgggaggtctctggcgccagcgccggtgctttcaccagccaggctgctcagcccggagccagctgggacgccgatggcactgactgggctgcctctggcgatgctcagaccggcaacgagggctggggtgccgagaccactgctcagcccaccacttcgcagtggtagattctgccgtgagcagttgatctttatctcttcttccataccctgtcattgacaaccaccctctcagcaaggcattcggagttggagctaggatcggacaaaaggaaagacaaaaatgaatgaatgcaagaatagttcaaatgcatgtctcgattgtgcgtggaggcgtgtgtcaatgggtcaagatcaatgccatgcgctaatgagggaaagatatccatgttctgtcttctgacagacatgggggaaagccctgtgctggcgatcgggttgtacttagttggcagtccagtcccttgatacactcttcgccatgacttcac

SEQ ID NO: 11015 - DNA, 1043 bp, Oryza sativa
  ref <308>: DATABASE ACCESSION NUMBER: AK108363
  ref <309>: DATABASE ENTRY DATE: 2002-08-28
agcaagcaaacctgctcctgctacagcagcgagcgagcgctagatctgaccaaatggaggccaaggacgtctcgccgctcgtcaccgtcccgcccgcgggcggcgccgcgccgccgccgcagggcggcaatgtgatgggcatgggcgagctgatgcgcaagaagcgcggccgcccgcgcaagtacgcgcccgacgggagcatggcgctcgcgctcgcccccatctcctccgcctccggcggcgccgcgccgccgcctccgccgccagggcaccagccgcacggcttctccatcagcagcccggcgtcggatccgaacgccaagcgccgcggccggccacccggctccggcaagaagaagcagttcgaagccctaggctcatggggcatcgccttcactcctcacatcctcaccgtcaaggccggcgaggtaaacccagatctcaaaacaaaacgattatcttttcttccttccttcctcctcgatccatccgtgcagccagccattgcagagtctgctgctgctgtacagcaagtggtgatggatctatgtctgcttttcctgcggagtggatttggtgcacgtactaactccactccactccactccagccatgaccatgaccatcactggttaggttggaaaggaaccaaccaaggttgcgagacgaggacgagctgcggtgtccgtcagattcccagcatggctgtcggttgaccggccccggccccacggtcagcggcacagatagtgggcgatgcacctacgttgtcgtggactacgtgtagtagtactcctatcatcaagtacaacaagccttctctggctggctgtgtagtagtacgctgtccaacagcaagtagtagtagtagccacacctgtggactgtgactgtccacaactccacacctgcactgtcttgttcatagtcggatacaattgcctctactgataggaactaggagcactcgcctgcaggagtctcctgttgtggtgtgcttagagttccatgtttactgcgcatctgaaaaaaatgtcatcttc

SEQ ID NO: 11016 - DNA, 854 bp, Oryza sativa
  ref <308>: DATABASE ACCESSION NUMBER: AK108364
  ref <309>: DATABASE ENTRY DATE: 2002-08-28
gctgctgcgtcttccgtgcgcgcgcggccccgcgccggcggccgccgcccggtggagacccccggggcgggcggcgcggacggcaccacgtctcggccgagggcacgccgccgcttcgtccgccgacggcagcggcgctccgagctctccgtccctccactacgactacgatcctttggccgacctccttggaccagacgtcgacccgacctcatcccagtacgtgtttactcttccatactgttcgatcgtgtgttagctgatcgtcagacagttcagatagaagatgaagcgttgttgtgaggttgtaagctactgcacaattctatgcgtgaatagtggagtaccatctgattttcaccactatggagtggtgaattaggtttaggtgaggtaagtagagtactagtcagtctcagaaagggttccacctttgatcacttccgagaatgcatttgttggattaatttgtggcaaacataaaacatcacacctaaaattagctgcttacttggcatgttttcgtacaagttctgcaacagagaggcgtgttgaatttctttcctctcaaataggatttgtaactgcagaagatctttcaatgccggcgtcatcttggtgacttggctaatttggaaagagcacaatgagtctttgaggggcgtgcagtctctccggtgaatctttgtgcgtcaattgaagatgagtggaaatcgtggctggaagcgggcttgccgtagtgtaaatagagggtttctttctgggttgctgttgtagcacgccttttctcttggcgtgccatgaaatctgtaacttctttcttccttcttaatatactccagtcggtctttgcc

SEQ ID NO: 11017 - DNA, 778 bp, Oryza sativa
  ref <308>: DATABASE ACCESSION NUMBER: AK108365
  ref <309>: DATABASE ENTRY DATE: 2002-08-28
aatcagatgctctctcctgccaccaccttctcctcctcctcctcctcctcgtcgccgtcgcgcgcccacgctcgcgctcccacccgcttcgcggtcgcagcacccgcgcgcgccgcacggttccgccccgcgcgcgccatggccgcctccgacgacccccgcggcgggaggtccgtcgccgtcgtcggcgccggcgtcagtgggctcgcggcggcgtacaggctgaggaagcgcggcgtgcaggtgacggtgttcgaggcggccgacagggcgggtgggaagatacggaccaactccgagggcgggttcatctgggacgaaggggccaacaccatggtgagcgcgctttggtgtgcctcgctgcttctgtttgatcacaatctcgggctgtgttggtctgcattgctgcaaatgctgcttctgtatattttggattgtggcgcactggcgctgctgcggctatttgagggctggagcacactagcgagtagtgctccttggtgcgcaggctgaggaaacttgtgtttgtgaacgaaatgcaagctgctcactaatgcagacagttgttcctgcaaatggagaagtgttttcttctgcattcgtatcccacaacagacgtgaaccctttctgctatgagcatcattgaacaccgttatgtaacttatcatagcctgattcgatttcattcaccatgatctataactattatacttaccacattagttactttgtactactcttagtaaaataaataaattattttaatactccactgac

SEQ ID NO: 11018 - DNA, 800 bp, Oryza sativa
  ref <308>: DATABASE ACCESSION NUMBER: AK108366
  ref <309>: DATABASE ENTRY DATE: 2002-08-28
ccatcgcccgccccgccagcggcggcggcgtcgacatcgaccagctcctccacagctcgtcgggcggcgccggcggacccaagatggagcaccacggcggcggcggcaatgtgcaggcggcgtccgtcgacacggccagcttcggcaacctgctctgcggcgtcgacgagccgccgccgttctggccatggcccgatcaccagcacttccactgatcgatcgatccatggatccaaccaaccaaccaaacaaccattggcaacaacaaactatcttgcagtgatgaagcgatcgacagtatgtacggggtgatgaattaacgatgatcacacaccaacgcaagcgcatgcacgtgtgtggaagattcagacgcatgcatttggattaattcttggagagatcgagcaagcttaattgggaagaacaatgagaaggttgtgtatgatgatgatgctagctacgagtattgaggtgatgaatgcattgaatttttctcttgggtttgaagaggatatcgaatcgaaggaacttgtagatgaataagcgagtgagatggaacgacgtacgtagggttagattttggagttcagtagtagtatattctgtcactttttatttattttttttatttattgggttcttattttttcccctttttctttacatacataaatttgtgaactttgtgaggcagtgtttgttgtgtataggtgcatggtgattcttctttcttcccctaatctgtgtggatcatgtccctgtgttgagaaaaatgttcattaaatttcgctctagcaatc

SEQ ID NO: 11019 - DNA, 1834 bp, Oryza sativa
  ref <308>: DATABASE ACCESSION NUMBER: AK108367
  ref <309>: DATABASE ENTRY DATE: 2002-08-28
tgcgaaagcctctgcacgaatgggaagggcgatgatatgtgggaattttttagggtgctcttagataaggggtattgtacagatgtgagggattaccatttggtagtatcattcttaggcaaggctgggaaggtgcgagaggcatatgatgtactaaaggaggtgaaaagaaagagacctgagcctgacatttcatcatacaattctctcatggagtcactctgcagaaaaaacctccttaggccagccaagaagctgtgggatgaaatgtttaccagtggctgtagtccaaatctgcagacttacaatatactcataacaaaatttgcagaaatcaatgaaagtgaacaagcccaacaactgtttgatcgcatgttccagaaaggagtgtcccctgatgtcacaacatacacttcagtcatcaatatgctgtgccaagaaaagaaatatgaacaggctgtggagatctttaccaaatgtgtggtgcaggatactgaagtggctagttcagtattaactgtgtttatccttgcactctgtaaacaaggtaatttcaaaggagcactgagtgttttatcttgtattccatctaatgttgagagtgtgaattcacacgtcattttgttgaagtgtctaatagatgttggggaagtagatttggccattgagcacataaaatcgatcaggagtaacttcagctcaagtttccagaatataatcaatgagctcatggcctctctttccacttctgctagtcttcaacctgtcacaaggttgatttcttatttgaattctcaggggattgttcacgatgttggcccatggatggggttgatggagcacaattatgcttgaaacaaagttttcaatgttgtgctgtcgtaagttgtaacatgatggagtatttgacactattatgaggtcaggccgcagcttatttcagaaagggtgatagtgatatttcttttggacacaaagggtcagaatgttactagagggagcagcaagtggagagaaattgcacaggcaattcagaagaacgagtcaggagttatctggaatcagaaaaggagcaaccagtgctctcagttctcagtattcaccaagtacagatggctggatatttttatgaaaatcgcgttggtgatcattttcttccaagaaccagaaattggttaggtgatgtgctgcgcagcagttctatctctatgttcctgttgcaagattttgcacagtgtttgctggtcactaacaactgatccatgtgtcagttatgcttatgcctgtgagcactcagcaaggcagcaaacaagttactctatccaagaaagcagatcgtgactattattctgcttagttctcacaaaaagaaaaaagactatgattctgcttctatactgggatttggcactggcagtgatggtgaatcagaatgattttttttatcagttttgcggaatgttagtccattctgtactgatcagtgatcagagtgttgtgttatagagggccatcgaagcaattccctccgtccctgcagaaagatgaaaaatgaaagctctctgagggatgcatcactgtgaacaggtagtcggcatcaccccgccatgcccatgcacatgcacggacgctcataagtttggattaggacgccattcgcaggtgtttttttcttcttcttttttttcctttttttgcgagggcacagattctttggtattctggttcaggtactacagatgtgtatgatttcataagtaaaagtttgtattacagcttaaccttgttgtatcgtctcgaatgaatgaagctcctgctaaagacatttttcttg

SEQ ID NO: 11020 - DNA, 941 bp, Oryza sativa
  ref <308>: DATABASE ACCESSION NUMBER: AK108368
  ref <309>: DATABASE ENTRY DATE: 2002-08-28
ggcgcttgtcgatcccaaggccggggagtcctcctcctccaccgtcacagctcaccacctgttcgtcgttgtgatcgacggcgtggagacgtccatccacgagggcagcctccaggccagtctcggcggcacggtcaccatcaccagcgcggggaacctctccgccagcggcgtccgcagcgtcgtcgtgcgcggcgggggcgggggcagcgtcagcttcaccctgtgcggagacgcggtcgccgacggcgtcgaccccgcgtcgttcgtccggtgcggcgcagcgcgggcggagggcgcgcgggcggtgtcggtcacgcggtgccgcgccgcggacttggagcaggccggcagggtgtccctcgagcggtgcagggaggcacgggtccggggcggcggcgcgctgcgagcagccaggtgcaggcgcgccgacgtggagagcttcggcgaggtgcacctggcacggtgcaagggcgcgcgcgtcgactggtgcggcagcgtggaggtcgagatgtgcagggcggtggatgtcagccggtgcggggctgtgaccggcggacggtgcagggtggtgagcgccgtcggctgcggcagcgtcgaggtggcccatgccgtggtgaacattcttgaagaagaacagccacaagcagcacaacatcccgtctctccatcacactccagtcgatccagtgacagtgaatgaaggttagcaccagtaagactcggtgaatctggtgtttagtatattcgaaattgcaatctcatactgaatttgctccgtaggttttttcttcttagtttcattcacggtggatttgttttaattaaactgaatttgatttgtcgactacgggtaaaaggtgtaatatataaatagtcttgacaagctgcatcttaatctgaactcgagtaatacgaatggagataggattttcattttt

SEQ ID NO: 11021 - DNA, 1161 bp, Oryza sativa
  ref <308>: DATABASE ACCESSION NUMBER: AK108369
  ref <309>: DATABASE ENTRY DATE: 2002-08-28
gcaaaccactcgactccgaagctcccactcccagggttttagctagggttctgtgtcccccgcatcgccgccgccgccgccgcgagccatggccgacgccgccgcccccggagaggacgacgccgcgtgggagcgcgccatcgcggcggccgtcaagaacgcccccttctccgcccccaagaccctaaccctcgacggcgccgtcaagtccaccaccggccgcctcccttcgccgtcgctcctcggccgctacccgtccctcgaggagctctccgtcgccggcgcccgcctctcctcgctcgcgggcctcccgcgcctcccggcgctccgccgcctctccctccccgacaaccgcctctcgggggccgcctccctcgccgccgtcgccgagtcctgcggcgccacgctccgccacctcgacctcgggaacaaccgcttcgccgacgtcgccgagctggcgccgctcgcgccgcacggggtcgagtcgctcgacctgtaccagtgccccgtcaccaaggccaaggggtacagggacaaggtgttcgcgctgatccccagcctcaagttcttggacggcatggacgccgagggcaacgactgcttggattccgacgacgaggaggatgaagaggaggatgagggagaggagggtgaaggggaaggtgatgaagaagaagaagaggagggtggagaggaaggggaaggtgatgaggatgacgaagaggaaggagatgaagaagaggatgaggaagaaggtgaagaggaggctgaagatgaagaggatgaagctggtgccgatgaagaagatgaaagcaaagtggcgaatggaagcaaagggtcttcaggatcagctcagccaaacaaaaggaagagggacagtgaagatgatgctaacggagacaactgatctggttgggtctggaaatggttgcggctggtcgttggaggcttttcctccaatgttctttggagggctttgagccttttgaggcgtttccttctgttgatgtagaagatttagctgttctttttagatgccaagttgccaaaggttttctaattataattcaggacttggacatatcctgatgtactactgcacatttctgtgactttccgatgctgctaattgaaatactggttctgggcctggtcatgcgg

SEQ ID NO: 11022 - DNA, 848 bp, Oryza sativa
  ref <308>: DATABASE ACCESSION NUMBER: AK108370
  ref <309>: DATABASE ENTRY DATE: 2002-08-28
cagccttgggaccaagcctttgcagatatgggataaggaagttgtagatgggcacatcaaaaggcctcaggatgaggatatccagtctaatgtacttgaaattattagaacaaatgtgcaatcgacttacattacctgcccggctgatcctgctgctactcttggaattaaacttccatttcttgctttaatcgtgaagaatcctaagaagtacttcacatttgagatccaagttttggacgataagaatgtccgccgccgatttagagcatcaaattttcaatctgtcactagagtgaagccatatatatgcacaatgccattgaagctagaagacggctggaacaacattcagttgaatctctctgatctgacaaaaagagcctatggcacaaattatgttgagacactccgagtgcaagttcacgcgaattgcagacttcgtagaatttactttgctgaccgcctctactcagaggaggagctgccacctgagttcaagctctaccttcctattcagaaggcatagaccttggagcaatcatggagacgggttcttgatcacgaaagtagccagccccaggagataccactgcgcgccctcgtgatgactcgtttaacgcgaagctattcacgcgcaagcctgcacgaaacctcagggatcttcctggttgtttgataattgtaggagagtagttagtcgtagcctgaatgagttgccggggtacccactgaccctcatctaatgcactgttactcggtgttgcatcctcccctacaactgtaccggatggtccaactcccatgtttgcaaacccagtagcacctaccgttgtgtttggccattc

SEQ ID NO: 11023 - DNA, 865 bp, Oryza sativa
  ref <308>: DATABASE ACCESSION NUMBER: AK108371
  ref <309>: DATABASE ENTRY DATE: 2002-08-28
acacgtccaaagcttgtccactctctcacacgctccttcccttccgcggaaagcttctcggagtctagggtttcgcgctccctccctccctcccctcccatggcggacaccggagcggcacagcctccgccgccgcccctgcgggcgcccgccgccgtgccggagaccctgcgccggctcctcgcgctggtcactgacgtcctggtgtgctgcttcctcgccgcgatgtgggtgacccccgccgccagcgccgccgccgtcttctcccgctgggcctgcggcgagggctcccctgccgcggacgtcgcggcgaaggtctccgtcgcctccttcctggccacggcggcgctcgcgccgttcgcctcgccggttgtggcgtggcgcctccttgggcgtccccgcaggggcggcagggcccgtgagcgcggtcgtggagacgtcaccggtgaacgccgccgccgtcaggaaggaggccttggacgcgtcgttctgttcgcgctcttctctgtctgcttcgcagtcgtcggtttgctgctgcaagagctcgcgccggaggagaaggggtctatacaggagaaggttggctccgtgcttgctgacatcgggctctttgctaactccgtgatggtatgcttcgtcgttgctcccaacttgctgatcttcctggcgagggatcggtggagatgaagggcggaatgggcagggtaccgttgcacaatcgattttcgagtcaggaatacatgtgttttgtggtacacgagatttgggtttgtcttctatgggaaatttgatgtgcgaccgcaagctgtccgagtaactatgtgatccgacttttatgctactacatgttgcagtttcccttctg

SEQ ID NO: 11024 - DNA, 825 bp, Oryza sativa
  ref <308>: DATABASE ACCESSION NUMBER: AK108372
  ref <309>: DATABASE ENTRY DATE: 2002-08-28
cctgcatttcaagttgcatataccgatgtagaacttgagaagttattttttcgaaggaataaatctttagaagtaagaacaaggaaaatgccagagtaaatcaacgaaaaggaaaatgtaccacaaaacagtggtatagtggtctttcttctccttctccaactgcatcaaatgtggccattactggagcgagaaaaccatacaccacaccaattaggacacttcccacgatcccgacaatgagccataagactaaaatcacagatgcggcaagaagaagaagcagctttacaacaggcccgacaagcttggatctgctttccgaaaaaaagatgacaagcatatataagtacagttttcataattatgtggtaattctctttggaacggatctgtactgagttgtgaatcctaaacctgatgatgcagtagtatgtccagatcacatgcataggccataagccaagaacgagtgcagagattccgatcatcatgataagccatgcccatgggaagagcaaagcacctgcataggcaaaattaacacgtagggaggaattgcaagtcagaatctgaggttcaaaaatgggaacatgggacggcaaaaattactaagtagtatttgatcatatgctgaaaaggcatttaagttcgtacaacgattttgcattctggaatttacagatacctagtaccgcttcaattccccttttgcaatggacagttgcaatcagtctaaatgaagtgcaagtgacgaactccagctgaaccagaacaaaaaaaaaaaagagaggctaaaatccaaaaaactttaactaatcagcc

SEQ ID NO: 11025 - DNA, 898 bp, Oryza sativa
  ref <308>: DATABASE ACCESSION NUMBER: AK108373
  ref <309>: DATABASE ENTRY DATE: 2002-08-28
gtgtactggctaggattgattcaagtagcgacgagggagcgataatggaaaacgtcactggcagcattgatttcaataatgtcagtttcaagtacccatcacgccctgatgttcaaatattcagtgactttaccttgcacattccttcccaaaagaccatagcacttgttggagaaagcggtagtgggaagtccacgataattgctttattagagcgtttctatgatcctgattctggtaatatctcactagatggagttgaaattagaagcttaaaagtcagctggttgagggatcagatggggcttgtaggccaggagccagtgcttttcaacgacacaatccgtgccaacataacatacgggaaacacagtgaggtaacagaggaagagatcactgctgtggccaaggcagcaaacgcccatgagttcgtatcaagcctgccacaaggatacgacacagtggtaggtgagaaaggggtgcaactatctggtgggcaaaaacagagggtagcaattgcaagggccatcctaaaggaccctaagatactgctacttgatgaggcaaccagtgctctagatgcagaatcagaacgtgttgttcaagatgcattggatcgagtcatggtcaacaggactaccattgtagtggcacaccgcctctccacaatcaaaggggctgatatgattgcagtcctcaaggaaggaaaaattgcagaaaaaggaaagcatgaagcactattgcggatcaaggatggtgcatatgcttcacttgtacaactccgctctaattccgagtaaaatgatgtatattttgatggtgtataacttatttagccataaattctagctacttgtgatttgagaagttgatgctaaactagagggtgttctttggt

SEQ ID NO: 11026 - DNA, 886 bp, Oryza sativa
  ref <308>: DATABASE ACCESSION NUMBER: AK108374
  ref <309>: DATABASE ENTRY DATE: 2002-08-28
aaaagaagtccaaaacttcgttaaaaagattggttacaatccagccaacgtcccattcgtccctatctctggatggaacggagacaacatgttggagaaatccgacaaaatgccatggtggaaaggaccaaccttgatcgatgctcttgatgctatgccaccaccagtcagacctgttgagaagccacttcgtattccactccaagatgtctacaaaattggaggtattggtactgtcccagtcggtcgtgttgaaaccggagtcctcaaaccaggtatggttgttacctttgctccagttaacctcactactgaagttaaatccgtcgaaatgcaccacgaacaactccaatctgctgtacctggtgacaacgttggtttcaatgttaaaaacgtctccatcaaagatattcgtcgtggaaacgtcgcttctgactccaccaatgacccagctttcgaatgcgaattcttcaatgctcaagtcattattcttaaccaccctggacaaatccacgctggatactctcctgtcgtcgattgccacactgctcacattgcttgcagatggaaggaaatcgtctccaaaatcgatcgtcgtactggtaaagtcattgaagaaactcctaaattcgtcaaatctggagaagccgctatggtcaacatgtacccacaaaaaccattgtgcgttgaaactttcgccaactatgctccattaggtcgtttcgctgtccgtgatatgagacaaaccgttgctgtcggagtcatcaaggctgtcaccaagaaagaaaaggctgaaggaaaagtaaccaaagctgctgctaaaaagaagtaaattttgctgataaatagtagtaaagtagagatataaaataaataacgttaaact

SEQ ID NO: 11027 - DNA, 884 bp, Oryza sativa
  ref <308>: DATABASE ACCESSION NUMBER: AK108375
  ref <309>: DATABASE ENTRY DATE: 2002-08-28
ttaacgagattcccactgtccctgtctactatccagcgaaaccacagccaagggaacgggcttggcggaatcagcggggaaagaagaccctgttgagcttgactctagtccgactttgtgaaatgacttgagaggtgtaggataagtgggagccctcgggcgcaagtgaaataccactacttttaacgtctagtccccaatctgaagcccccctcgatggcatcgccgctccaatggacggctccgatccacccgccgccgcctccccatccgccgcagctgccgccggcgacgacgacgacgagcgagccgccgcgcccgcggcccagccggagcggtgcgaggctctggccggggccatcgcgggggtgctgggcggcgcgctgcaggaacacgaggcgtgcgcggcggccaccgctcggagccagggcgagctcgccgccgccgtcgaccggctcaacggagaactagacaagctattagagaatgcaccctccccgatcataatgcaacaagccacaaggatttgttctattcgcaagagagttttagctctgaacatgctcctgcgctccatacaaagacgtatagataacattgatagaattgtttctactggtgtaacaagtgatcattcttctcatgtacagttgcacagacagaattgaagttggattgagggtttagaagatagtttccactgttaccccgtgtacacccgtttctatctgggagagttgccatttgaagttctacttgggagtaatatattggaccaatcttttttttttgttcgtactgcagactgggaaatgtacttcagatgtatcatttgcatttgtgaactttctttttgtgggtgaggaatcgtcactgcatatatc

SEQ ID NO: 11028 - DNA, 1066 bp, Oryza sativa
  ref <308>: DATABASE ACCESSION NUMBER: AK108376
  ref <309>: DATABASE ENTRY DATE: 2002-08-28
aacaccaaccagacagaacagaggacaccgctcacaagcaaatacagagtcgagagtgagacttgaggcagaggccatggccggaggaggagacgagctgaagctgctgggcatgtgggcgagcccgtacgttctgcgagtgaagttcgcgctcagtctcaagggcctcagctacgagtacgtcgaggaggatctcatgaacaagagcgacctcctcctcagctccaacccggtgaacaagaaggtgcccgtgctcatccacaacggcaagcccgtctgcgagtcgcaggtcatcctccagtacctcgacgaggcgttccccggcgccggcgccaccctcctccccgccgacccccacgaacgcgccgtcgctcgcttctgggccgccttcaacgacgacacgctggtggaggcgtcgcaggcggcgtcgtgggggaagacggaggaggagagggcggagggggagaagaaggtggtggaggcgctggagaagatggaggtcgggctgagggagtgctccaaggggaagcccttcttcggcggcgacaccgtcgggtacctcgacgtcgtgctcggcggcttcctcgcgtgggtgcgcgccaccgacgtgatgcgcggcgtcaagaggttcgacccggccaccaccccgctgctggcggcgtgggccgagcgcttcgtggagctggacgccgccaaggccgtcatgccggacatggacaagatgatcgagttcggcaaggtgctgcaggctcgcgccgccgccgccaccaactgaagtgacagttgacttgtcgtgtcatgccgaagacgaacggatgttgggattgtttccatctgtttcacagtcgagtgtcgtgtacgttacgagttcagatgtgttactacagtagtagtaacttgggttgaaaaaatatctagggaacagtttgtccaaggtaaaatgttataaaccgaaatgaatagtgttaattagagaaaagaaactagtacaagtggcgtctgggtgagaaaggtctttacaacttaataacatggcccaatgaaaataattacagatttggctgtg

SEQ ID NO: 11029 - DNA, 1308 bp, Oryza sativa
  ref <308>: DATABASE ACCESSION NUMBER: AK108377
  ref <309>: DATABASE ENTRY DATE: 2002-08-28
atcacgcgcgagcgctgccatcctctcctcctagctaggtcgatcgacgtcgagaatggcagatcggcagcagcagcacgcgcacggcgagggccggacggcggcgcagcgcctcgggtacgcgcccgcggcgtcggcggactcgccgtcgacgacgctgctccggcgggtgcagacgcacgcgccgaactccacccaggtggtcggcttcctcacgctggccgtctccggcgccgtcctcctgctcctgaccgggctcacgctcaccggcgccgtcgtggcgctcatcttcctggggccgatcgcgctgctcaccagccccatctgggtgcccgtcgccgtcgcgctcttcgtgctcgccgcggccgcgctctccgcctgcgccttcgtcgtcgtcgccgtcgccgccggcacgtggatgtaccgctacttcacggggaggcaccccgtcggcgccgaccgggtggactacgcgcgcagccggatcgccgacacggctagccacgtcaaggactacgcgcgcgagtacggcggctacctgcatagccgggccaaggatgccgcgcccggcgcgtaagccgcccgcgcgcgccacatgtgtgtcggtgtgtggcatgcagcttagatgtgatcgttcttcttcggtgtgtttgtgttgtcgatttcctcacttcttctgtaggctactttaatttggtattttgatcttcttcttctctggatcgtacgtcactcgggttgtatttagtttggatcataagacgtcgcaccgggctgaattgatcttcgtcatttggcctgattcgatctcgcaatggtcgatcgcaattcctcccagctcgaggttacgctcaatgacgactctttgcgtgtgagatgtgacctagctagaaaagtccaaaattttatcgttttcgcaaagcaaaagatgtgaagaagcaaacggcacagcattaaacaagcaagaagttaaccaaacaatctgaattggaagcggttttgatatgttttttcagttgggactggaggcgagcggcgccacaaaccaaattctgcctcaccaaatgagctgagatcagcgtgcaacggcgcaaccagttccgtgcaacagtcgaagatgcattcagagatcagtgcgcccaccagttccagtcgagcagagggcatccgccatgccggcaacaacaccgaaccatcgcatcacgaaccgccgtgaagaccgaagaagaaacagggagacagggtagagataggagaggaggggatgacacgtggggcctattcttaaaaaagatgaaattaaaaaat

SEQ ID NO: 11030 - DNA, 904 bp, Oryza sativa
  ref <308>: DATABASE ACCESSION NUMBER: AK108378
  ref <309>: DATABASE ENTRY DATE: 2002-08-28
aagtcagaaagccaccgaacagagcaaggtcacttcacgccattaccttcttctctccaagaactcgagtagattgggcaggagattaagatcctggccagcttcgtctccaagaattcgacgctctggttcaggatgtcggtggaattcctgacgaaagcgctcacggcgctgttcgggtatgctatgccggcgttggagtgcttcaaggcgatcgagcagcggcctggtcggacggaccatctccggttttggtgccaatattggatcatactagtaatcctcgtcatattcgatgatatcgctggtgtcctcacctccaagataccaatgtactctgaactcagactcgccttcctcgtctacctgtggtacccccagacaaggggaactgacatcgtgtacgacaccttcctgcggccgctggtgatgcagtaccagcccaacatcgaggagcggctgcgctacctgcgtgccaatgccggcgacattctcatcttctacctcaagaacttcaccgataggggctacgatctcttcctccgggggatggagtacatccggtcccagacgtcacgaggctcaagaacgaggcggtggttctcgttcggaggcgaccgggcagagaggtcgagctacgttgatgattatgtcgccggcggtggcgatcggaggagcacggcgaggcaccggcgaccccgcgacgattactaacgggctggaccggcgccatagggattcagtagagagaggtgcacaggattggaaactagttgattaggagtgacaaaatttaaaaggcccaaagcaaaacttctcaaaaacatgatgtgtatatatatatagacaggtgatcactgatccatactctggtatatatagctcctcacaatttggcgttgcg

SEQ ID NO: 11031 - DNA, 851 bp, Oryza sativa
  ref <308>: DATABASE ACCESSION NUMBER: AK108379
  ref <309>: DATABASE ENTRY DATE: 2002-08-28
aaagggaggcgaagggggagaaagggaggcgacaaaaactccactctctcactccggcacagcactccccccacccacctacccacgccgctccacacctctcgttttcactgcttgctgcgagagagagagagagagagagagagaggaagaggaaaaaggaaggcgacgcggctgtcatctctctcgcccccgctcccttcccttctcctgctcagaataccaagtactcggatcccgaaccctctcccccctctcgtcgtcgacggcgacacgacgactccgctgccagcgcgtcggcctgccccagcggctcggagcaggggcggagagacgggaggatggaccccgagaagcgcggctacaggctccgtatcctttttttttttttttttttgctgctactgcgtcgttgggttgcccttctgtttgcccggttcttgatccgatttggctcggaggaggaaggaatcgtggtttgccggagcaatctgggtaggcatttgctcgagcggttgagggggagtattatttcccctccctcaaattctagtcttgtgttgttgtgggtagtttcttggagcgacagtggtggtctcgagaaaattttcgccacctttttctttcttggcaatctgcgccaaggttgaagtcgtttctgatttcaagagggaactgaactaccactaaatgtttcaacaggttcagcaaatagtttcctttagtgcccagtttaggttagcaatgcgccaattccgaatcaccaagtctaatttgcttccgaagcaactataactaaattgtgaagttcatccgggaaaaaaacagctatgtattgatacggtttgatc

SEQ ID NO: 11032 - DNA, 1411 bp, Oryza sativa
  ref <308>: DATABASE ACCESSION NUMBER: AK108380
  ref <309>: DATABASE ENTRY DATE: 2002-08-28
cattttgggtactgtggtaatagcaaagatccctgtcttcatccaggggatgtccgcgtccttgaagcagttgatgtgcccgaactgcatcatctggttgattgtttggtgttcccccagaaaggtgagaggccacatgctaacgaggcatctgggagcgatcttgatggggatctctactttgtgacatgggatgagaaacttatacctccaggcaagaagagctggaaccctatggactactccccacctgaagcaaaacaacttccgcgccaagtatctcaacatgatatcattgatttcttcttaaagaacatgataagtgagaatcttggtaggatctgtaatgctcatgttgttcatgctgatcttagcgagtatggtgcaatggatgagaagtgtattcacttagctgagctagcagcaactgccgtggacttccccaagactggcaaacttgcgataatgccaccacaccttaaaccaaaagtctaccctgacttcatgggaaaggaagatggacaatcttataaatcagaaaagattcttggaaggctttatcgttcaatccaagaggcctccaatggtgatgtggtgtcacaagaggtttgcactccaaatgatctgccttatgacatagatctggaagttcctggtgcatcagatttcctcgcgagtgcttggcaatgcaagtgttcatacgacgcgcagctgagtgcgctgctcagtcagtacagggtccgcactgaagctgaacttgtgacagggcacataacgttccttgttaagaacagcagcaagaagcaaggcgacataaaggacaggctgaagactgcttactctgcactacgcaaggagttcaaaagtacctttgagagcatagcatcggatcaatgcgagattggtgatgacgagaagaatctgctgtacgagatgaaggcctctgcctggtaccaggtgacctatcaccccaaatgggtggagaagtcgaggggcattctgggcccagatggtgaggaaataccggcaagccttagctttgcatggatcccggtggattacttggcgcggataaagctaaggtgccatggtaaagtgagagttgaaggccaaaagcctgttgaaaggcttgcagcatacatctccgagaggatatgatgaaacaatgcaaaggtcgcagtaagaccactctgccattcgtaatgccggttcaaagggcatgcgtacaaaatatctgagtttttttttcttttcatttttgttcacttcactgaacttgatctcccgaatgtttcagtgtgcttttgttccttcttacatgcccctcaagcctgaaaaactgtacgtttcagttgagggctgtctatattatgaaatgcacaaatatacgctgcctgcagcttttggcaat

SEQ ID NO: 11033 - DNA, 1135 bp, Oryza sativa
  ref <308>: DATABASE ACCESSION NUMBER: AK108381
  ref <309>: DATABASE ENTRY DATE: 2002-08-28
aagtaaataaatacgcccactgacgtgtgggccataccctcctccccctgttcaaaacttcaaatcgtcgcgttttttcttcaaaccgtggctctctctctctctgcaataagaagtcgtcttccacctcgagctcctactctccccggtgatctctcgcttcgattcgattctctcgtgcaactgcaagacacaaggccaacttgattaggaggaggaggaagaagaagaagcggtgattgctagctagctagcgagctccgtcgactcttgcctgcagccatgattacggcggcggtggcagccgtggtggagtccgcgtcgccatcgccatcgccggcgaggaagcggtgccggctgggcgggccggtcgtcgcgaacggcgagggtggtgctgctagtaatactaccgccagtagcgagttccagctgcggcactggcgcccggcggccgcaggcaagcgggcggggctggggatgcggaggcggtgggcgccgccggagatagagatccccggcggcgggagcggagtcggagtcggagcgcgagggtacaccagcctccgggacatcctctcgtcgccgaagtacgccgcgtcgagcaagtccagctcccccgccgacggtggcagcggcggcggcggcggcggcggcggcggcggaggggacgtgcacatgatacgccacccgctggtgaagcacgcggcgtacgcctacctccagctgacgccgtcggcgagggacgccgccgacgccgccggcaggaggcggcggcgcagccgcggcccgctctgccgcctcctcctcggctgcctcggcttcgtcggcgcgctcttcggacggtgactgacctcgccgtctccggcgagacacgcccgcacgtctcttgaccttttgaccgatttttcttgccttttttttaatttctgtttttttacagtgtattatttagagcagaaattggatttttcctgttctaatatgggttgtaattagtttctgtaaataatagttttgtaggattttaggtgtgagacagagagatgatggcaacaattcaaaaaaagaaatgatttgcttgctaacacctgatcggttagcttgagggcaatgcatttgtgatactactattatt

SEQ ID NO: 11034 - DNA, 1847 bp, Oryza sativa
  ref <308>: DATABASE ACCESSION NUMBER: AK108382
  ref <309>: DATABASE ENTRY DATE: 2002-08-28
aaaagctgcacataccacagtagtctatctagcacgtacgtagcacagtagctagagacatgggcgacatggtgcttctcgccacgcgccaaggggtagtctgccacaggcacaggctgccggtgatttcatgtgccacaaacacaaagccgtcgaggcttaagctgccgccggggccaagcacgctgccgctgatcggcagcatccaccacttcgtgtcgtcgagcgagagcgtgcacagtgtcatgcggaggctggcccgggagcacggccccgtcatgcagctctggttcggcgaggtgcccaccgtggtcgcctcgtcgccggaggccgcgcaggagatcctcaggagcaaggacctggcgttcgccgaccgccacctgaccagcggcaccgacgcgttcagcttcggcggcagggacgtcgcgctggcgccgtacggcgagcggtggcgccacctccgccggctgctcacgcaggagctgctcaccgcggcgcgggtgcgctcgttccagcgcatccgcgaggaggaggtggcgcggctcgtgcgcgacgtgtcggccgccgccgctgcagcgcccggcacggccgtgaacctcaccgagatgatcacaaggctgatcaacgacatcgtgctccggtgctccgtcgggagccggtccaagtacagcgatgagtatctggctgcgctaaacgacatggtaggccagacgttctcgctcagcgtcgccgacctcttcccgtcgtccaagctcgcgtccatggtcgcgacggcgccacggagggcgctggagacccgcaacaagatggagcgcgtcatacagcaaatcattcaagaacggagggaccaaattgaagcggacatggcgagcggcgatcaggtgacggcggcggcggggagcaagtcatgctctctcgacgtcctgctcaggctccagaaggaaggcggcgcaccgatgccaattacaaatgatgttatagttgtgcttttgatggatatttttgcggggggcaccgatacatcgtcaacaacactgccctggaccatggcagaactcattcgttcccctagagtaatggccaaggcacaagctgaggtgcgtcaagcctttgaaggaaagaacaccatcactgaagatgaccttgcccaacttagctatctcaagatggtaataaaggagtccttgagactacattgtccagcaccactcttggctcctcgcaaatgccgtgagacatgcacgatcatgggttatgatgtacccaagggtacatctgtatttgtgaatgcatgggcaatatgcagggatagtaagtattgggaggatgcagaagagtttaagccagagaggttcgaaaacaacaatatagaatacaaagggagtaactttgagtttctaccatttggctctggtcacagaatatgtcctggcattaatcttgggctggccaacatggagtttgcattggctaacctgctctaccattttgactggaagctacccaatggaatgttgcacaaggatcttgatatgcgggaggcacctggacttattgccgctaaacacactagcctgaatgtatgtccagttactcacattgctccaagctgctcataaatgccaatgtaacaaataatgcctcttcaaaaagaacataacaaatgtgctatcagatattaggtttacgtgattccacaaaaaaacttatgtgcctaagcggaaacatatagagagcttatttatgtactcatgcttaataatatatgtattaggtgttgttgatgcgaaaaaaaaaaaaaaaaaaaaaaaaaaaaaaagaaaaaaaaaaaaaaaaaaaaaaaaaag

SEQ ID NO: 11035 - DNA, 1252 bp, Oryza sativa
  ref <308>: DATABASE ACCESSION NUMBER: AK108383
  ref <309>: DATABASE ENTRY DATE: 2002-08-28
acctgacatccccttcctccggctccaaccgcccccatggccgcccgagccaccccatgacgccgccatttccgccctcctcctccaccccgcgcgcgagcccgccggccgtgggaccccgtggccccacgtccttctcatccccacctctcccctccaaaaccgccgcccacaccccacgatgccgcccacgccaccggcggttgccgccctgtctccgcctctccttggctcggtccgacctcccctcccctataaaaacactccccagcctcccctctctcgtttcccccaactcccgagcttccccgtgccctaaatcgcgctcgcgacgcgagtccgagctccgccgctcgtcgccgtgctccggccgccccatgtggccgctcctggccacctcacgccgcgcctccgcctccaccgcgttcgccgcaccgcgtggaacccccggccgccactcctttttcccccttccaccccgaaacaccgttcccaccgtgcacccaaagccgccacctctttcaccgcctccagccgctcgccaccaccgccctagtcgtcgccgcgctgcgccactgccaccgacggcttcgccgcgaggtgctgcacaccggcctcagcttcgtttccccaaatcaccaccgcaaccgcccctccaccgtcgacccgagccaccgccaccattggccgactccagccgtgttgtccctctgctccggtcgtcgccgacccacgccgtcgcctccctcggctccgcaaggacgaggagaacctcggccacctcttcccatcgctgaaaactcacaggacgtccgctatcccgtgcgttgctgccgctcgtccgcctcttcccgagctccgctcgtcgccggagcatcgtcgtctccctctaccccgagctccaccgtcgctacctcccgttgccatcccgccgccggccgcctccttccgccgtgtggcgctcgcgtgtataatccgtcgtttcgaaaatccgcggtcgcgaggaaaagagttcagaagataaaagtgaagaagcaagcgtgtagaatccgtcgtttcggaagattgcgatcgcaaggggaacgagttcagaagatcaaagtgaagaagcaaagcaagtcacatattccccttgagcatgttgatcccaatttataaatgttttaccgtttgcaaataaatatgcatgttttgctaattacatgggatccgggtgttacctatctactcgcttgtgccatgtttacttgat

SEQ ID NO: 11036 - DNA, 1075 bp, Oryza sativa
  ref <308>: DATABASE ACCESSION NUMBER: AK108384
  ref <309>: DATABASE ENTRY DATE: 2002-08-28
gcgctttcttcttcgccgccgctcccgttcccgctcgccgtctcgcgatatcggatcgagggtggccggctgctacgactcgcgcacgcggcaggcatggcgacgaagcgcaagtgccccgccaatggcgacgacggcggcgtggccgacctcgagccggtagcaggtggttccttcgcctccccgccgccggagaagaaggccaagttgaccgtcgccgtcgccgtcgccgtcgcgccctcctcctcctcttctgctaccaccgctgccgcgggggaggcgacggccaagcgcgagcacggaggcttcttcgccttcgcgaggcccgagaacaacaccaggctgagcgtcgccgtcgcgtcctcctcctcttctgcatccgccgccgcggagaaggcgatggccaagctgaccgtcgccggcgtcgcgccctcctcttctgcatccgccgccgccgcggggaaggcgacggccaagcgcgagtacggcggcttctgcgccttcgcgaggcccgacgacaaaaccaggtggcgcgtcgctgtcgcgtcgtccgccgccgccgcggcggacgcgtcgtattcttcttcgtcgccggcgacgggggagcagccggaggcgaaccggtgcgcgacgtgccggaggaaggtggggctgacggggttcaagtgccggtgcggcggcacgttctgcggcggccaccgctacgccgacgagcacgactgcggcttcgactacaagagctccgggagggagctgatcgccaagcagaatccggtcgtcgtcgccgacaagctggccttcaggatttgatcaagaatcctcaaccactatccatgaggtcaaatcgaagtagccgatcaaagatcaatgatctgttcttcaatcttgtgggaagttgaatccttgtttgcaatgatcgattttctgtgctcagcgcacaattaatttgatgtaattttcgtcaaagaaaagttagttgtagttcgctgtaacagagtcagtttaattcagttgatgtatctatttggatcgattgatatgtgcagaagcaaagtacaagtctttatttacagct

SEQ ID NO: 11037 - DNA, 1139 bp, Oryza sativa
  ref <308>: DATABASE ACCESSION NUMBER: AK108385
  ref <309>: DATABASE ENTRY DATE: 2002-08-28
acattgcactcaagcctgaactaaatggcttcccctaaatccttcgcctgcagtgtcattgccttgttgtttgctgcacacttggtttcagctcagcttagcgcaaatttctatgataagtcatgccctaatgcactgtccaccatccgaacagcggtgagatctgccgtagcaaaggagaaccgcatgggtgcatcattgctccgcctccacttccatgactgctttgtcaatggttgtgatggatcggtgctgctagatgacaccccaaccttcactggagagaagaccgccgccccgaacaacaactctctgcgtggattcgatgttatagacaacatcaaggcacaggttgaggggatctgtccgcaggtggtgtcatgtgctgacatccttgctgtggcagcacgcgactctgtttttgcgctaggaggtcctacttgggttgtccagctgggacggcgcgactcaacaacagcaagcctggatactgcaaacaatgacattccagcaccaacccttgacctgggtgatctcaccaagtctttttcaaacaaaggactaagcgcaactgacatgattgcactctcaggggctcacaccataggccaggcaaggtgcgtcaattttcgcaaccgcatctacagtgagaccaacatcgacacttccctggcaacatctctgaaatcaaattgtccaaacacgaccggcgacaacaacatatccccccttgatgcatcgacaccctacacctttgacaatttttactacaagaacctgctgaacaagaagggtgtcctgcattctgaccagcaactattcaatggtggttcagcagattcccagacgaccacctactctcaaacatggcaacatttttcactgatttcagcgcagcaatagtgaagatgggcaacatcgacccccttactggatccagtggacagatcaggaagaactgcaggaaggtaaactaggtcataatttttacagtctaagcctgtgtgtgcctgtgtggaagagtataatcttcagagaagggagaagtgtccctttcctgatgctgtagtcgtcttgaaaggtgtctgtattgctattgaagaacacatatgtgaaagaataaaatggcataaaaaggc

SEQ ID NO: 11038 - DNA, 987 bp, Oryza sativa
  ref <308>: DATABASE ACCESSION NUMBER: AK108386
  ref <309>: DATABASE ENTRY DATE: 2002-08-28
cttttttttttatttgacggcgccgagcgggtccaccaccgagcggcgacggcttctcggcgcgccgggcgaaggaagcggcggcctatggcggcgtgcgacgggctcggcagggccatcccctgcccggacccagcggaggcagccgtccctcgcacggatccactgctggcggacggtcagatccaggaggaacgacgacgaggaggatggcttcgcggtggcggcgtgttccccactccgcctctgcctcgtcggctactcggctggtggtggcgacgtggcggtggagggtggtgctcactgctccggatcggatcgggtgtggttggcgccggtggctgtcctcttcaccaggggccttcactgctgctgtcgcccacctctgcaaatgcaaaaacgatgggcaggcggaggaccttagacgcggctcctattctgtcccttgctcggccgatggtgtaggtcctggatatggctgaatcggcagcagcgtccaatggttcctggttccatgtccatcttcaatttccacaaggcagccctgggtggtgaaatccggggcgctgaggtgcgccatatgtggtctcaacgcctccgggcagcaccggatggatctcccctaagttttgactccaattggagtggcgacgtgaggcagcgcaatcgaggtgccgttgagtctttgttcttgggtgatggattggtctccttttgcaaatgtgttcttttgacggctccaaatctgttctctcaattctggttattaattcatttgtttagttaatttgtgatgcgggaactttgtcttgttgccgttcaaacctttttcagaatcttcttcaaactgcaggaacagttctgaatttttatggctctattgccctagttataatttcttagacaaaggttattttctcctgtgttctgattttttttttttgaaaccacacatatatgatggaaacatagaaacttctttaaaag

SEQ ID NO: 11039 - DNA, 944 bp, Oryza sativa
  ref <308>: DATABASE ACCESSION NUMBER: AK108387
  ref <309>: DATABASE ENTRY DATE: 2002-08-28
catttgatgatatgctgagcaaaggtgcaaaacctgactacataagctatgtcgcagttctgtcaggctgtagccactctggacttgtgcaggaagggaaactctactttgatatgatgacaagagtccatggcatatctccagggttggagcatttctcctgcatggtggaccttcttggccgtgcagggcatttgactgaagccaaggatctcattgataaaatgcccatgaaaccaactgctgaggtttggggagctcttcttagtgcctgtaagatacatggcaacgatgaacttgcagaattggcagcgaagcacgtgttcgagctggactcacctgattctggaagctacatgcttctagccaagatatattcggatgctgggaagtcagatgattctgcacaagttaggaagctaatgagggacaaagggataaagaaaaacccgggctatagctggatggaagtcgaaaacaaggttcacgtcttcaaagcagatgatgtgagccacccacaagtgattgcaattcgtaacaagatggatgaactcatggaaaagattgcacatttcggttatgtgaggaccgagtcgccacggtctgagattcatcacagcgagaagctggctgtggcgtttgggatcatgagcttgcctgcttggatgcctattcacatcatgaagaacctgcgcatttgcggggactgccacacggtgatcaagctgatatcttctgtgactgatcgggagtttgtgatccgagatggtgttcggtttcaccacttcaaaagtggttcttgttcttgcggggactattggtggtcacggaacttttctccggaatacatttttgtagcccagaaattgattgagagaagtaacataatctgcaactctggaaatttcattttctcgtgttatttatctctacctttgattatt

SEQ ID NO: 11040 - DNA, 596 bp, Oryza sativa
  ref <308>: DATABASE ACCESSION NUMBER: AK108388
  ref <309>: DATABASE ENTRY DATE: 2002-08-28
atacgtaagtacctagcttgaccgccagttagttaattaaactctatcagactcatggctgatgctgcttgtaatgaaggcagccattgccgactagtcatcgtcgtcctcctgctcattctccttcttccattgcaaacattctgccagcagagcacaactaaaaagctctatgtagtgtacctcggtgacaagcagcatgaagatccagaacaaactacagcttcgcaccatgacatgcttactgccatccttggaagcaaggaagaagcgcacgactcgatgatatacagctacaagcatggcttctctggattttctgccatgcttactgaatctcaagcgcaggagattgcaggtaatttttgtcgaaatatgacaaatagtttccatttagaacgccgtaaaaaatatcaggagaaccaagaacagtcacgttgttaatttcggaaaatgaacaagtatcaaccatcattaccacagaaagggccttcggtgccggttggaaaacccccttaggtgccagtttttccaaccggcacaactaaggcggcactgatgagaagactcaaagacctttgaggtatacgatttgc

SEQ ID NO: 11041 - DNA, 1040 bp, Oryza sativa
  ref <308>: DATABASE ACCESSION NUMBER: AK108389
  ref <309>: DATABASE ENTRY DATE: 2002-08-28
atcctacctcacacgctctcaccaacacaagaaaccacacgcttacgagacgccacggcggcggcggcggcgatggtggagctctgcggcggcgagggggaggggcagatcatgctggcgacggagctggcccagctgcgggccatggcgagggagctggaggcgaagatggacccggacagggtggccgcgcgggagctctgcagggcgctggcgtcgtccgtcgaccggtccatccgcctcgccgcgtcctgcttcccgccgccggagcacccgccccccgccgccggcaatgccggcagggacgccgcgttcaagaagaggaaggggatggccaaggtgaggaggcaggtgagggtgacgtcggtgcaggacacggcgtcgctggacgacggcctgagctggaggaagtacggccagaaggacattcttggcgccaaatacccgagggcctacttcaggtgcactcaccggcacacgcagggatgcaacgcgaccaagcaggtgcagcgcgccgacggcgacccgctgctcttcgacgtcgtctaccttggcgaccacacctgcggccaggccgccgtcgccgccgccgcccagagcgcgccgcccgagcatgccggccaggagcagcagaggcagagctcgctgctcgctgcgggaacggaaggaattcatcagcaggtagtggcagagcctatggcggcgccgttcttgttcacctcgacggcggccggcggcgtcgacgacggctacttctccttcatctcgccggcgaactccgactgccagttcagcagcgacttctcggcgggcagcgtcggggttgacatggaccacgaggctcgtttcgaagatcttttctcgagcactcttgagtttttccaatcggagattcagaatctgtaggtggccgaatgcacgcagtaaccgtactttgttaaaggttcgcatcagtattagctactggcctactccatactactctgtacagcctctatgctttttccttatgaatgaatctactattagttgctaaaaac

SEQ ID NO: 11042 - DNA, 920 bp, Oryza sativa
  ref <308>: DATABASE ACCESSION NUMBER: AK108390
  ref <309>: DATABASE ENTRY DATE: 2002-08-28
accaccaactcgatcgattctttccacggtttccatactacacgaatggatcgccacgtcttgcagggcggcggcgccgccgccgtgccggtgccggatcagtccagctacggcggcggcggcgccggtggtcatcaggcggatgtggtcgtcgtcgacggggcgttcctgatggagctgctcgacgacacgccggcggcggctgtggcggcggagcagcagccggaaggcgacgacgccgacgaccggctgagccgcgtcatgcggtccctcgaggccgagctcggcggcgccggggctgccccggcgccgacgtcggcgccgccgttggggtcctcctccggcgacggcggctcgccggcgagcggcgacggcggcaggctggatcagctggatgacgtgctgtcgctgtccgacttcgacggtggtggcagcagccggccgggctcgtgctcggcgccgccgttcgagtactgggcgcgggcggagttgccgccggcgatggggcacgacatgggcggcggctggtgcgtcgacggcgacggcgacggcctcgccgccgccgtggcagggtacgagttcgtcagagagccgtgctactacacttacggctacggttacaacgagagctcacatgtcgagcagccgtacagcccactttgggaataattgacaaattaaataaaatttaggaaaagaggcaagaaaaaaaaaagatatgcaatcatggactaaatgagggcagatatatcttcagggtttcttcggatcgtaggaactttagaagaaaattggtggatccaattcctacaggatttaagtattgttcactcaattcggtttggaggaattgggcatgtgaaaattggaagattttttttccttcacctatgatttcataagaatttcataggaaactg

SEQ ID NO: 11043 - DNA, 1259 bp, Oryza sativa
  ref <308>: DATABASE ACCESSION NUMBER: AK108391
  ref <309>: DATABASE ENTRY DATE: 2002-08-28
ttggctggacgaatgagatagaccaaccccccactcccgcgcgctcatccatccatccatccatccatccatacacgcagcgcacgaacaagacagagtcacgggcacgaagtcactcatggacggcggcggctcaggcgccgggcgcaagaagctgaagcacaggctcgctgccatcctctcggtcttcaccaggcgggcaggtgacaggaagcgccgcggcgaggagggggcggcggcgccgccgccgccgccgccgccgctggcattcccctcttactcccgcctcggcggcgcgggcggcaagaaggcggccgcggggaagcacgagcgccggctctccctgtcggtgccgcgcccgccgccgctggtcaatatcaccatcgactgcgccggccgccgctccgtcgacgcggcggacccgtccctcctcgcgccgctcgacctcgacgccaggaagatggagaggcggctcacggggacggggctgccgtacgagaccggcgagtgggagggccgcaagtgcccgccctccacgcctttcgccgcggctccaccgctggcgcgatggaaggagcgggccagcgtctcgtcgcggaggctctcgacgcactcgtcgcgcaggctgatgagcagctcgtcctccgacgacgagtacgacgaggactcgaggaacctcttctcctccaggagcttttcctccgactcgtcggacttctacaactgcccgcgcaagaacaccagggcgcgcgcctcagtgtccggcccgtgccgcgcgccgccgccatcctcgcgccgcggcacgtcgcagagctgccggtacagcttcgagcttccgcgcggctcgacggcttcggcggcaaccgacggcgggttcgcggtggtgaagcggtcgtccgacccctacgaggacttccgcaaatcaatggaggagatgatcgccgagggggcggcgtgcggcggcggcgacggcgacggggagctcagcgcggagcggctgctggagacctacctcgtgctcaactcgccgcggcattaccccgcgatcctcgcggcgttcgccgacgtgcgggagacgcttttcccctgaatccgtcgaccgatcggcctgcaccgccgcaccggcgtggcggtgtgatgttcataggactaacttccatgtcaatgtcagtaagattagtagcacaagagttgagcggttgagcctgtgacttcctgtgtgtactttcatgaatgcatcgtttgtgtcatttcaccgc

SEQ ID NO: 11044 - DNA, 772 bp, Oryza sativa
  ref <308>: DATABASE ACCESSION NUMBER: AK108392
  ref <309>: DATABASE ENTRY DATE: 2002-08-28
cgtctccagcctcggcgaccacggctggttcctccgccccatcagcagcgcgtaatgccgcttcagctccggcgtgctgcacagctccgtcgccgtcgccgtcgccgtcgtcgacggcttccggcggcgcgcaccgccgccgttctcgtcgcagctgatcaccttctcgatgaactccgggaggactcggatgagcgtggcgccgccctcgcccttgacgtactcgaatgggcactgccccggcccagccacggacaccttcttcgacggcgccggcgacagcgacgcgagcgccgcggcggtgagcaccttgaagcaggagaagcgctcggcggggaggacgaagtacgtccgccccgccatcagctcctcgccggcggacaccaccgggatcgggaggccgacgtagaaggagtcggccgcgcagacgacgtggtcaccggggagctccgccgtgacgtcccccgccacggcgcacaccccgccatcgtcgtccagcatcctcgtctgcccgccccagtacaccagcttcacccccgccgccgccgtcgccggcaggtgcatgcacggggagaggccgttgcccatggcaactgatgtgtctagaaccttctagaacgagctcgagcttgcagatggaagaagaggagaagaggagatgcttgtgtgaattggggctcgtggttgcgagaggggaatatatataagcgagcgttgaacggggttgactttggaaaattcaaagatggaggaggtaaatactcctactact

SEQ ID NO: 11045 - DNA, 1330 bp, Oryza sativa
  ref <308>: DATABASE ACCESSION NUMBER: AK108393
  ref <309>: DATABASE ENTRY DATE: 2002-08-28
ttctacgtcggcacgccgttctaccgccacaagcctgtccgccggggcgccgccgccggccccgcgaggctcgtcgggagggtgttcagggcggcgttcgcgaaccggagacggcagctgcacggtgatcagctgcacgagcacgacgcggcgtggtacgccgccgccgggacgaagcggcggctgcaccacacgcggggctacaggttcttggacaaggcggcgctgccggcggcggcggcggaggcggaggcgtgcacggtgacggaggtggaggaggtgaagctgatcacggggatgatcgtggtgtggctgacgacgctggtgccgtgcaccatctgggcgcaggtgaacacgctgttcgtgaagcagggcaccaccctggaccgcaccgtcggcggcgtccgcatcccggcggcctccctcggcagcttcatcaccatctccatgctcctctccatcccggtctacgaccgcgtgctcgtccccctcgcccgccgccgcaccggcgaaccccgcggcatcacgctcctgcagcgcctcggcgtcgggtcggcgctccaggtggcggcggtggcgtgcgcctgcctcgtggagctccgccgcatgcgcgcgatccgcgccgcctccgccacggccgcccacgacaccgtcccgatgagcatcttctggatgctgccgcagtacatcctcatcggcgtcggcgacgtgttcagctccgtcggcatcctcgagttcttctacgagcagtcgccgcaggggatgcagagcctcggcaccaccttcttcaccagcggcctcggcgtcggaaacttcctcaacagcctgctcgtcaccgccgtcgaccgcgccaccaggggcggcggcgccggcaagagctggatcggcgacaacctcaacgactcgcacctcgactactactacgccttcctgctgctgctcgcggtgatcaacctggcggtgttcgtgtgggtggcgacgaggtacgagtacaagaaggagtacttgtcggacggcggggacgtcgtcgccgggatggcgtcgcgggagacggagatggccggcggcggcaaggggaaggtggtggagaggagcaaggtgatcgacgcgccattggtggtggtggaagaagtgcgtgccgtataatttgcggttcatactgagtaacttggtatagaactatagatcatcagcatatacgtacggaatacacgtataaaactatatatacgtatataatggaccatacatgggttgaaattcgggttaagcaatatggaaatgccacgtaccataatcccgtccggacgggatcccttttgtccccttg

SEQ ID NO: 11046 - DNA, 1104 bp, Oryza sativa
  ref <308>: DATABASE ACCESSION NUMBER: AK108394
  ref <309>: DATABASE ENTRY DATE: 2002-08-28
ctcccaatttttttctccgcatccgcagaaattctgtcccctcctcctcctcctccatttccgatgtattttattcgatttcgagatttgttttccggtgcatagagctcacgtacaaccgccgcgccgaacggtgcatgtgaactgttcggcgaaacgcgcaggtgaggagaggtcgcgaggagcggctgctgcggcggcggcggcggcttcgattcaggtgggggtgggtgccctagggtttcgctgccgggatggatggccgggagcagcagcagcagccgcgcgtgagctcgccgccgccggccggcggcggcgtgatgatgcctcagcacccctacggcgccgcgccggcgatgccgccggggtcggcgaatgttatgcacggggtgccgctctcgttcaaccccatggcgtcgccgaccgcctcgtcgcctatgaagcccgcggatatgtcggggaccatgtaccgcaccgatcccgtcgtgcagggcatgcagcagcagcccggttccggcggtggcggcacggcggtcggcggaggggagctcgtgaagaagaagagggggaggccgaggaagtatggtcctgacgggaacatcgggttgggactgaagcccgcggctgcagcagggacggaggccggcggaccttcaggtggtgcaggatcgaactcgaaccctgacgggaagcgcagagggcgacccccaggatccgggaaaaaaaaacagctagatgctttgggtaagcctgcatcatttctctgctttgggtttatatctgaactctgaaatgatatggcttaatatgactgaaaagtgcaatgttgcttggcctgtagctttggaaaaatatggtccaagcttgtggcgggtatggagtgtgattgttggaaatggaattaattcatgtgtttgcttgtgtgcattaaaaagggcatgtgtggaataatttttttaaggatccctcatcattctgaaggaataaaaatatggcagaatagtgcaggcagagatttgaataataaagaaaagtacaagcactctttatcctttcctggtgttgcactgggcacagtctaaacaggaaaagtaggaattattc

SEQ ID NO: 11047 - DNA, 779 bp, Oryza sativa
  ref <308>: DATABASE ACCESSION NUMBER: AK108395
  ref <309>: DATABASE ENTRY DATE: 2002-08-28
ctctcctctcatcgctcctccaccgtcgccgccgccgccaccgcagcggagcaaccacagcaggcgagcgacatgaaagcacttgcaggtttgagaagaatcaatttagatggattgagatggcgtgtatttgacgcaaagggccaggtccttggacggttggcatcccaaatagctgttgtgcttcagggaaaggataagccaacttatgcaccacatgtggaaaatggagacatgtgcgttgtgcttaatgcaaaagatatcagtgttacaggaagaaaaatgaccgataaaatctactactggcacacagggtatattggccatttgaaggaaagaagactcaaggaccagatggaaaaagacccaactgaagcaattcgcaaagctgtcatgcgcatgcttcctcgcaatagattgcgtgatgacagggatcgtaaactgaggatattttctggaaatgagcacccattccatgatcgccctcttgaaccttttatgatgccacgacgccaagtgcgcgagatgcgtccccgggcaagacgcgcactgttaagggcgcagaagaaagagcaggacagagcagcagcggcatcaaccaaagatgaagaaaatgctaagaatgccaaatccgagatcactgcatagatgcgcattcagattgtgttgtgtgggtggagattgctacaaatctacctgttgatgtttttttaaaggatccatgtgtcttttatttctttgacatgtagcctgctggattcagtagacggtagaatcat

SEQ ID NO: 11048 - DNA, 769 bp, Oryza sativa
  ref <308>: DATABASE ACCESSION NUMBER: AK108396
  ref <309>: DATABASE ENTRY DATE: 2002-08-28
gcaccaatccattccacctccgttaaccccgttcgttttatttgcgtttacttcgtttcttgggaaggcacttccttcctcttcctaggaaggtaataaagaagagcctcctccttcctccatggatagatagatcaatgggagctctgcatttccttttctcgtctctgttctgttgttgggtgtgtgtgttcagtgttcttgctcacctagaactgtcggtggtgctgctgcataccgaaatgccggtaatggcgatgataatatgagcgctcatgctcatccatgctgccggaaggaacacgatgacggaatttttcttggactcgcgagtgattcgatcatggggggaggtcatgccaaaatttttctccgggttcatcggattcagagggggaggtgctgcctctgaatgcaattgagtgcacctgaaacagaaaaaagaaaaagaaactctgcttcctttttttctctctcttcatgctcgttcttgcgttaggggataataataagccgagatctagtgaatatttggggggtttagcgaacatgatcatcgataacgacatggtgagatctagtggtgatgatcttgcttctggatctgggggtttagttcagcaagcctgaaattctcacctgggtttaaggtttcttttatttttcttttttcatcagattgaagtggatagaatgctagatctagtaatgtcctatgattgtttctctttcacctgaatttttaaaagcatttttgatgatttctctc

SEQ ID NO: 11049 - DNA, 817 bp, Oryza sativa
  ref <308>: DATABASE ACCESSION NUMBER: AK108397
  ref <309>: DATABASE ENTRY DATE: 2002-08-28
tctctcctctcttcgaggagtctccctctcctctcctctccttctagagagagagagagaggcgcagccgccgccgccgctcgcaaagcgccacgtcccccgatcgagccggctagggttccgccaccgccgccgcagccatggtgggctgttccagagggggcgggggcctccccgcctggatgaccgccgccgccgcccgcgtcgatctctccagcgccggcggaggcggcggcatacccggctcgggggcctcctcctcctcctcctgctcctcacagcccggatactcggggccgcatcagcaggctggggttgcgggggcggccgccgaccaggagctcgggatggccgagcgcgcgctctccgccgccggcgccgcgttcgtctccgccatcatcgtcaaccctctcgacgtcgccaagacgagattgcaggcgcaggcggcgggggtgccctactaccagccgtcgcagatggcgtcgctcggcccggacgcggtaacgaatctgatgatctcgatgcgggtgccgtgtgggtggtttgcaatttagttgtagttagcctccgatttcatgtggtgtgggggattcttgctttttgggttttcgtgatttcaggctagtacatgatgtttgttgtgtgcttctacagttgaccagggtgatactgtgtggaatgcagttagtgtttctgtttgttttgccatctaattattaatattacccaagctgaatgttgaggttcattagttgaatgcaggggcatgctaatctgcttgttgacccagaatacccagaattatatatggtttagt

SEQ ID NO: 11050 - DNA, 1181 bp, Oryza sativa
  ref <308>: DATABASE ACCESSION NUMBER: AK108398
  ref <309>: DATABASE ENTRY DATE: 2002-08-28
actctcagcgaccacaaacccaatcccaagaacccgttcgatcgatggctgcttccgacgtgcaccacggcggcgccacgccggcggcggcggcgaccgccgtgccgtgcgtcacgctcaactcgggccacgcgatgccggtgctgggcttcggcaccggctcgtcgaccccgccggccgacctggcggcgaccatcgcgcacgccgtgcgcctcggctaccgccacctcgacaccgcggcggtgtacggcaccgagggcgcggtcggcgccgccgtcgccgaggccgtgcgctgcggcgccgtggcgtcccgcggcgagctgttcgtcaccaccaagctctccatggccgacgcgcacccgccgcgcgtggtcgccgcgctccgggagtcgctgtcccggctcggcctcgactacgtcgacctcttcctcatccactggcccgtcgccatcggcaagaaggacgccgccggcgagctgacgtgggacgacctgagccgcggcctggtgccgttcgacatggagggcgtgtggcgcggcatggaggagtgccaccggctgggcctcgcgaggtccatcggcgtcagcaacttctccgccgccaagatgtcgcggctgctcgcgctcgccgccgcgccgccggcggtgaaccaggtggagatgaacgtcgggtggcggcaggagaaggtgcgggaggtgtgtggcgagggcggcgtcgtcgtcgccgcctactcgccgctcggcgcgcacggcgcgcactggggctccgacgccgtcatgaacagcggcgtgctgcacggcgtcgccgccgcgagatgcaagacgatcgctcaggtggcgttaaggtggctgtacgagcaaggcgtgtgcatggtggcgaggagcttcaacgagggccggatgaagcagaacatggacatcttcgactgggagctcagcgaccaagacaaggcgatgatcgccggcgtgccgcagcggcgagcctgccatggaaactacttcgtctcgccggacggcccgtacaagtccctccacgacctctgggacggcgagatctgacgacggcaacgactagatctctattcgcatcattgtgctggtcaaaatactgtcttgtgtttatatggatcatcgatgctaggtcattcccaactcaataattatgatggtgtctatagcatt

SEQ ID NO: 11051 - DNA, 1018 bp, Oryza sativa
  ref <308>: DATABASE ACCESSION NUMBER: AK108399
  ref <309>: DATABASE ENTRY DATE: 2002-08-28
tagatataagttatcccctataactagtcggataaccgtgccgtgtgggtatggggtacccataatctcaacaaatggctaggaggagctccgggatagcatgtccaacgggagcttgtcggcggcacaatggtggccaggtcagcacggctatagacactaattgcacaaactggagctggcgctagttattagaggtacaaaggatgctacgggcgtgagagtgtaccatgagaacgcgagacggcgaaaagcggcggagtagggctcgatgtgtcgcagaacataggcagacagcattgacggtgcccgaaagtgctcgtcgacgttccttgcattaacgtccaacctccccaatggcgacgacggcagcgcggctccgcctccacttcctccaacctccaactccggccggggagaccccgcaatggtggtttctagtagcggtgagatcatgcatggaaggtgcttgatgaaatgtattcgggacgaaagctgagaggaatggggattttactgggggcttagcttagggtgtaaggaaaccatggggataagatcgccagcacatggcctggatgagctagagctctaatggcgatcggataagagcaatgaggtggatgacgcgactaaggttcatctccttctccattaaggttctatggctccatcattgtgcctatagcctatagtctgcgagttttagtcctagctggggaaggggactctgttttatccactagacataaagaggggcgccgagacatcattggctgtggacaaggtggcggacgtggccatggcgacgcgcgcacatggaagctgtggcggaacggcggcttggttgggcggcgggcccacgcgggcgctgtgcgccgtggtgcggtgcacgggaggcaggtgtgaggcggcatgggcgttgctggcgcggccgggagcgatgtggtgcacgcgatacataggatcgaacggttggcagacaatgtacagtagcgcctagaaaggagagaaaagg

SEQ ID NO: 11052 - DNA, 1164 bp, Oryza sativa
  ref <308>: DATABASE ACCESSION NUMBER: AK108400
  ref <309>: DATABASE ENTRY DATE: 2002-08-28
tatacagtgtcagacaacaagaatttcattactgtcaagtttttgtatggcacaaacacgtcacaacattcccaggactacttgaagctcgggtcgttgcagcttccgtcgacactcgctccggattttgccagcttcaacccaaacgcacagtccatacccattccggtgggagatagcaccactgacttcaaagctgtctcgagctggaaacataatggtgaaatcaacaaaattcgtctcagtcccgatgcttcgagtgcgattacttttgacaactcaggcgatgtccatctttacgacctttcagccgtcaacaaaccgcccacgagcttcgtgtaccacaaacaggaaggttatgctttggaatgggttctgaacgaccggtttctttccggtgcaaacgacagtcaaattgtgctttgggatgtctccaaacctctgaccccacttcaggcattcaagtctcacacagcggtaatcaacgacctttctcatagtgttccgtcgcagcatttgttcgggtcggttgcagacgactattggacccatattcacgatttgcgaagctcggtcaacgacggtccagccatcaagacacagacttcacacgtgcaaaacgctatctccttccatcctcagatcgctactttgtatgctgtggctggaaaagacaaagtggtcaatgtctacgatttgcgaaacccaaacgagccgttccgcaagctctttggtcacactgagtccgttgctggtgtacaatggaatctggattctgagcctgaattgttgacttcgtggggctacgaccgtcgagtcatcacgtggaatttggctgcgttgaacgaggactttagttatcctgacagcgaggaaggaggcagaaagagggcggccaagagtgctgatccctgcttatacttcatccacggcggtcatactggccgcgtaaacgatgtaagtatccatccaaagatccccagcctatacgctacatgcggagacgattcacttctagaggtctacagaacgaagactgtgcgagaagataccgataatgaagaagaagctgaaaaggaagataacgataatgatgagaagaaggatgtggaaatggaggaaaatgatcagtgattagcaatgaaaatagatgccaagtagatt

SEQ ID NO: 11053 - DNA, 884 bp, Oryza sativa
  ref <308>: DATABASE ACCESSION NUMBER: AK108401
  ref <309>: DATABASE ENTRY DATE: 2002-08-28
tttgcaaaccctgaagttacttggttgttgatgatggtcctggaaggcaccccatcttcctaccataaactttccagaactactcacagattgcatagcagcaagggagaataaatgagatgagattagttgcaggaaggaaggaagggctaggcggcatgggcgacgatgtgggcgtagaggaagtggttccaggtgtcggggaggccagggaggcaccagtggatgcagtcggcgtaggtgcgagggtcggcctgctgctccggggtcagcagcttgccctgccgcagcgtgtgcaccgacgtgtgcgcgtccttgcgaagctccgacagcgccgtgatgtccacgaatcgcacgcccacccgccgcatcgaccgcagcacaccgcgcgccaccccgtgcagcctccagtccgtcccgatgtccagcccccctgatgtccggttcacgatcggctgcgtctccatcgcgcacttcaccgcccccgccgatcccccccaagcctccggcctgtacatccgatatttcacttattagatcacacaaattcagagctggccaccatatggaccaacaaacagtaagcactccactgcacagtagatacgactcgactagccaaatcccactcgcatatggatctgcctgtcacccactttactttaactcactttcaccaaagccactagtgagtgactcagtgctgtagcactggagtggagcatcttagcaaaataatggtcagattctgtcaggcaacactgtgctgctatacatgatactactgatctgtagatgcgacaaccaaccttagccgcccttgagctgatattgccagcctaaaacaatctgattacggccaccgttgctcgatccggagctgc

SEQ ID NO: 11054 - DNA, 1071 bp, Oryza sativa
  ref <308>: DATABASE ACCESSION NUMBER: AK108402
  ref <309>: DATABASE ENTRY DATE: 2002-08-28
agtgcagcacacggccgccaccctctccccccatctccgccaccaccgcgcacgacaaccggagccccgcattccccggcggctctccggagagagagagagagagagagagagagccttccaccaccatcgacggagccagccggcgtcatcccccaccgtgatcgagatggcggcggcggcgacggcgacgctgcggtccgcgactgccgcggccgcggccgccgcgggggcgcgcaagggtggcgggctgcggtggctggggacggcggcgtaggcggaggcggagagggagggcggggccggggcgaggtgggagctctcggcggcgcgggagtactacgactaccgcaagtccgtctacggcgacgtcacccaccgcgccctcctcgtcgacgccgtcggcaccctcgtcgtccccgcgcagcccaccgctaaggtgtataagagcattggtgagaagtatggagtgaagtactccgaagatgagatccttgcgagataccggcgtgcgtatgagcaaccgtggggcggatcacggctcagtactatatgacagagaaggcttggaagctttgtgatcctgatgctgaaaacgtatttaaagctttaagaaaggcaggtgtcaaaactgctgttgtctccaattttgatacccgtctacggcctctgttacatgttctgaagtgtgatcactggtttgatgcggttgcggtctctgctgaggttgctgcagaaaagccaaacccaacaatatttctgaaggcatgtgagtctttaggtgtcaaacctgaagaggccgtgcatgtcggcgatgatcgtagaatgatatatggggagctagagatgcaggctgcgatgcctggctatggggaagtgatgttcactctttcaaggaggttgcagagaggatcggggttgaggtggccaagtgatgggcagtggttctcaggagcattaatcgatatatatggtttaggagtgcggtcgtgatgtacatagcagagacccgtccttgttgctcgagtgacgttgtctgctgttcagtgagtgctcgagacatttcccttg

SEQ ID NO: 11055 - DNA, 1459 bp, Oryza sativa
  ref <308>: DATABASE ACCESSION NUMBER: AK108403
  ref <309>: DATABASE ENTRY DATE: 2002-08-28
aaattacttgttaacatgcctttacacttcgacacacttcaattgcacgctggtcaactggtggagcaaccacatcgctccagagcacctcctattcatgctactacctcgtacgtcttcaatgattcggaacatggagccaacctttttggtcttaaagagcctggtatgatctactccagaatcatgaatcctaccaatggggtgttcgaggagcgtatggctgctcttgagggaggaattggtgcccttgcggtatcttctggtcaggcagctcaatttatcactgtagctggattggctcatgctggagacaatattgtttctacatcatatttgtatggtggaacctacaaccaattcaaggttgcgttcaaaagacttgggattgagacccggtttgtcaatggtgacaagcctgaggactttgagcatcttattgatgatcgtaccaaagcgatttacattgaaagtattggaaacccaaaatataatgttcccgatttcgagaaaatcgtctcaatttctcacgctaaaggagttcctgttgtagtggacaacacttttggtgctggtgggttcttggttcgtccaattgatcatggcgttgatatcgttgtccactctgctaccaagtggattggaggacatggaactaccattggaggtgttatcattgactctggaaagtttccatgggcggaataccctgaaaagtttcctcaattttccaagccttctgagggctaccatggacttattcttagtgaggctttaggaaacgctgctttcattggacatgctcgtattgagttgttgcgtgatttgggtcctgccttgaacccatttggtctgttcttgttgcttcaagggttggaaacattgtctttgagagtggagcgccaatcacagaacgcattgaaattggctaaatatttggaaagctctcctcatgtcagttgggtttcttacttgggacttccttctcacgaaagctatgaactcggcaagaaatacttgaacacagaacatgctggaggcatgttgtcgtttggtgtcaaaccaatcgattctggtgacaaatctccattcaaagaggccggtccaagagttgtggaccaacttaagatcgcttctaatttggctaatgttggtgactccaagaccttggttattgctccttattacaccacccacgagcagctcagtcaagaagaaaaggtggcttctggtgtcaccaaggacctcatcagagtgtcggttggtactgagcacattgacgacttgatccaggactttgagcaagctttcggcgaggtgtacaagtaaatgtggagataaccaggtagtggagaagtagtggagaatgtactgttttaattgaatgttaaatagaggtgataattagagtagatcagtctggtgtgaaccaggacataattcaattaacagagaatgt

SEQ ID NO: 11056 - DNA, 804 bp, Oryza sativa
  ref <308>: DATABASE ACCESSION NUMBER: AK108404
  ref <309>: DATABASE ENTRY DATE: 2002-08-28
tggtactataagggacaaggtgcgaaagatggagtataaaaatagggaggattttaggcatgatgtggctcagatagcactgaatgcacatacatacaatcttaaccgccatccccacatccctccgcttgctgatgagctcttggagttgtgtgattatcttcttgaggaaagcgcggatgtgctagatgatgcggaatacgcgatcgaggactagtgcacactaaccagatatggcatttagatcttgctatattctaacttagatgctgtaatgctgacctgtaggaggggggaagagcacctgtagaatttttcattttaggctctggctatggtatacctgggatccccaattccaactattttgcctcttgttggtattgggagttgggagttggaatgtacacaaactctaggttagacattgagggcccactgtaactattggcctcttgctgtaaaaatgtagcgatgtaattttttgtccatatccatggccttgggtgtctcaaattctgatgttgtagcattacatcctatgtgaatggcatctaaccatgagtcaaaggtgcaacacgtcaaagcatgtgctaaaggttgtacccggtctaacctgattggtgaaggtcccttcaaatcctgcatgattagaggcttaccatgcaactatgcgaagtcaaaacctgtaattgtaactgtaacgtgagagatggtgtaccggcagtacaagttgtttgagttgctgccagatgatgatgtatttgatgttgcatgctttgaatgagtattcaccgctcaacg

SEQ ID NO: 11057 - DNA, 1054 bp, Oryza sativa
  ref <308>: DATABASE ACCESSION NUMBER: AK108405
  ref <309>: DATABASE ENTRY DATE: 2002-08-28
attgcgttgcgacaactgtcacaattggttcgcagcaacggatcagcttgtcaattcacaatgaggatcttcagcggaatcgcccttcccattctcgcggctgcgtcggctgcgtatggtgctagctggggcttcgaagatgccacgctcacagttcaagagaagggtgcgggcgttggtggtggtgccaaagagaagctctctttgacctctgcactctctcccgccgttttcctctcggcaaccgataccctcaagattgttctcactgccacggagggcaagactggaaagaagcctcaccaggccttcctcacacttcacgatccttctactggtcttgaggagtcgttcccgttcagtctgaaggacaatggcaagggcaaggttgaattgacccagaaggacctccccttccaattcctgacctcctcccaatccgctcgcgcatcaatcgttctcgcctccttcggctccaccactcctctccgcaagcatgtctttgacctcgaggtcacccgcgacactgcgacccccctcgcactccctcccgcccccgagcgctacacatccaagcccgagatcaagcacatcttcaaggctgacgcacagtcgccgcccgtgatcgtctccggcgtcttcatgctcgccgtgatcttcaccctccccgcccttctcggcctgtgggccggcctcggaggaaacctcgaccacgctggcaaggccttcggcgccaacccggtcgctcacggacttttctttggaagcgtcgttgcgatggagggtgtcttcttcctgtactactacagctggacgctcttccagacgctgcctgttgcgggtctggtcggtgttgtggcatacgtcagtgggagcagggctttgacggaagtgcaggaacggagactggctggccagaggtaaaatggaagactatcaccttcgtgagccattctattgcattggacagtcgtattcagcgaggcagcgcatagactagcatagaggcctgcatggcatggtcttacatgtaagatgaacgatcgcacaaacg

SEQ ID NO: 11058 - DNA, 998 bp, Oryza sativa
  ref <308>: DATABASE ACCESSION NUMBER: AK108406
  ref <309>: DATABASE ENTRY DATE: 2002-08-28
ctggctctcgaaccacacgacgacagagaccagacgcagaagatgtcgagatctcgatagctagctagcttgtgcatgagcatgactcctcactgcttatagcttagcttcctatatagctcgatcgatcgatcaccaggccgtgccgatcggcggcgtactgatcatcgatcgatcgatcgatccatggcgtcggcgtcgccgagtagtaattcggtcgtaggaggggccggcgccggcgccggcgacgtgtgctgcatgtgcggcgaccgcggcctgccggaggagctgttccgctgccgtctctgccgcgtccggctgcagcacaggtattgcagcgatctgtacccgagggcgacggcgtacaggcggtgcaactggtgcctggtcagggagcctgctcccgccgccgccgccggagccgccggccatgtccacgcgatggtggataagccgacgacggtgcgacggaagacggcatcgtcgtcgtcgccgccgccgtcgtcgtcgatgacggatcaggagacttcgccgacgacgatgtccagtgaggcagagcggcagcggcgcctgcaggaggcggccggatggtcggcttccaggagggcgccggacacggccgggctcggccggccggtcaagaagcagaaggctgccgccgacgacgacgagggggaggaggctccgggcgcgagagcggcgccggcggcgaaggggaacaacggcggcaacaaggaggagatgcaagcggcggggaagaagaccggggtgaaggtcagggtgaggaggtacaagctcctcgccgaggtcatcagctgctagagccaattgcggttgctacaatgtgtacagtatgtgtactgtatacacgtatccgtcgttatgcacggcaaatagtgtacagatcttgtgagaaaccataatcgagtcggagccctcttcttacgcggttgtttgtgttgaatgattgaaaagctataatacctattcgagagtat

SEQ ID NO: 11059 - DNA, 524 bp, Oryza sativa
  ref <308>: DATABASE ACCESSION NUMBER: AK108407
  ref <309>: DATABASE ENTRY DATE: 2002-08-28
aagacctctgtggatgggcatccgatggatagggttggaggtgggacaattttgtaaaaaaccgtccgcaattagccttgctaatctcgttttgttattgcaaatcacctccgcagcaaccccgtccagcgccctggggcgcgtcgtccgcttcgcttcgtttcgactccgcctcccgtgattcaagacgacgacgacgacgcccagtgaatcgtcagacgccgccggggtcgcgggcctaacacgatgccgccgacgcccgctgccccttcttttctcgtcgcgccgtcgtccctttgcgggtctcccgtcgcccgcccgctcgagagctggcggcgccgcccttctccggcgatgggcccccggcaccgtcgcgtgagcggtggcgatggagtgtagcaaggccgggactgtgaatggtggtcaagaggaggtggccattggccgagtggagatgccgccggcgccgagctggacagagacgacagtgcagatattcagataaccaagtgctttcttcagat

SEQ ID NO: 11060 - DNA, 1526 bp, Oryza sativa
  ref <308>: DATABASE ACCESSION NUMBER: AK108408
  ref <309>: DATABASE ENTRY DATE: 2002-08-28
tcacaccagaaccaccactgctataactctcctcttcctcttccaccaccaccaacaccacaatatatggtcctctactatcataattctagaagtgtatgatcagtttgatccaagaagtggtagagagtagttggtgttgtattctcttccattgatcattgagctaagctatagctgtagcagcagcagcagcgacaacctcccatagctttgatcttgcaatgctgcaaaggaacctgccgaatctctccctccggataagccctccggccgtctcgtcggcggcggcgccggtatcctccggaacaccgacgacggcggcgaggacgactctgccgaccggagtgattacagacgcagaaggaggaggcgaagtagcagcgttctttggaaaccctagctccggcagcgagccccccggtctgagcctggggctcgggccgacgacgccggcgcacgcggacgccggcggcggccgccatggcgaccaccacctgcagccgcaggggtgcgcgccgttcaagcgcgcggcggccagggcgtcccagctgccggcgggctcgaagcggagcgtccgcgcgccgcggatgcgatggaccaccgcgctccacgcccgcttcgtgcacgccgtcgagctcctcggcggccacgagagagcgacgccgaagtcggtgctggagctgatgaacgtgaaggatctgacactggcgcatgtcaagagtcacctccagatgtataggacagtgaagagcacagacagatcatcccacattgcctcaggagaggcgcagctgcagcagcaggcaggaatggaggtggccatggaggcggcagctggaggaggaggaaatggtggtggtggtggtggtggggtggtgctaccgatgatgccggcatgtgacgacatggttgggatctgtagctcccctgcgccgcctgccgcagcgactagttccgctgctgcctacttcctctgcgcgacgacgacgtcaacagcaactgctccactggcagtagtgccatcgcctcctgctccaaccattcccacaaggaggactgaccaaacgccagcgctggaaaagggtgtcgcgattgttgactcgttgcaccggtgtcagaagcataactactcaccagtgcttcaagatgctcttcatcagggagctgaagaagatcatcttattaccgggaacctaccaatgggaggagcatcagcacaagcgagcattgaggccatggcgactaccaactcttcaagccctgcaagctcatctccatcacttgcaagcctggagcagctgctacctgaagactcgtttgcgcccaacctggagatctccctcgggagacataactggaacatggaccatcctgaagaactcagcctgaaatacctgtgaaaaaagccaaaaaaaaaaagaggtttttctctcctctgggtttcactccactaaccattgatgattgctcgatcagatcgttgtgatgatgactgaaaaatatattcagtaaccgcatccatc

SEQ ID NO: 11061 - DNA, 709 bp, Oryza sativa
  ref <308>: DATABASE ACCESSION NUMBER: AK108409
  ref <309>: DATABASE ENTRY DATE: 2002-08-28
tgagctgaaatgtaatagtactacgctgatcttcgttcagagcatacacatttcttcatgtccttcatgagatagtttttggtttcagatttacgaactctttgcgaaactgatcccaaccatagattttaaatttacagggccagccaggatttccttttttattaaaaggtggtaattcggctgtgatcagctagttttcatctttgcgttatttccaagcattcccctattgttctgagttctgcatatgctggttagtcttatttttgtgcttggtggtaatgagtagcagatttcacccaaattacctgagatgcaattcccaaatcatctcattatccacgctcagtttcctgaaggtttcagtgaaaacatagctaaatctgttgtgtggtctcaagcctgaagtctgaaccaacctaaagagttagtgcaagatgctcctcagactgcaattctgcgtccaagttaggtcgttttctaatggaacgagtcgttctatcatccccggttcttgggaagacctcaacggtcaagcaggaccacggattgagccgttgatccgtcttgacttgtggcataatttttctctgtatgccaagttagcagctttgctcaggaaacttcggaaccatttccacgtgaggactcttgtctgtaccaatcttgtattacatgaagaaaaattatgtagtagtactccact

SEQ ID NO: 11062 - DNA, 973 bp, Oryza sativa
  ref <308>: DATABASE ACCESSION NUMBER: AK108410
  ref <309>: DATABASE ENTRY DATE: 2002-08-28
aaccaatcgcaaattcaccatcccatccaatcttgacgacgatgccgccgagatcgccgcttctcgccctcgtcttcctcgccgccggcgtcctatcctcggccacctctccgcctccgccgccgtgcagccgctcgtgcgccgccctcaaccgcgactccgtagggatccggtatggcaagtactgcggcgttggctgagcggctgcgatggagaggagccctgcgatgacctcgacgcctgctgccgcgaccacgaccactgcgtcgacaagaaaggtctgatgagtgtgaaatgccatgagaaattcaaaaactgcatgaggaaggtaaaaaaggctggcaagattggcttctctaggaaatgcccgtacgagatggctatggcaacaatgacctcagggatggacatggccatcatgctcagtcagttgggcacccagaagttggaactgtagctttaatttggcttctccttacggaggtactccatttcttagatgatggttaaccgtatttgattgcaccaaagtttgattttttttttacaggaatgtattgatttgggcagcctaaaaagatttcttttccccttgctgcacaatttgcagcatatagtattttttttgtacaagagatttggcatgtaaactgaaccaaatgttccggctcactgggtatgggtaaaaagggttttcctttcctttatgctgtaacattatccatttactttgctttgatacgttggatcagtaggggtctggatctctttaacataataatgtaacactcctgagtctctgagcatgttatggacaaactctggtgcttgtgtaatcagtggcgtctgttgattgattgatttggtgcttgaggatgaaacagtaggcagtgggcacacacaactggaaagtgtgttggaaaacaaaagacattacacataagaaatgatagtattaccgttaatttgtagt

SEQ ID NO: 11063 - DNA, 864 bp, Oryza sativa
  ref <308>: DATABASE ACCESSION NUMBER: AK108411
  ref <309>: DATABASE ENTRY DATE: 2002-08-28
ttcatgttcgacaagaacgtccagcgggagacgaactcgcctgtgctgccctacgtgcagaagatactgttctgcttcctcgtcgccacgctcatccgcctcgtcaagacgctgctgctcaaggtgctggcatcctccttccatgtcaacacatactttgaccggattcaggaggcattgttcaaccagtttgtcatcgagacgctctccgggccgcccctagttgacgaaaaccaattccttgctgagatgcatgagcttcaacgcgcaggagcaaccatcccagctgagctccgttccactgtaccaaccaagaatctttcagggcaaaggagtattcggatgtccggggtgattcctaagggagaagggagcaagcagctgtcaaaagagaaaggagagcaccagattgaggaggggatcaccattgacaagcttcataaactcaaccagaaaaatatctcagcttggaacatgaaaaggttgatgaggattgttcggtttgggacgctcacgacaatggatgagcagatacagcaggcaacgggtgagggggatgagtcagcgacacagattcgtagtgaatatgaagccaagattgctgccaagaagatctttcacaatgtggcgaagcctggctccaagtaagtgtcttcattgtcagtagtatagtatggttagtttccctaatctcctgcaagtgccatcattgctagttcttacaatatagataatcagacaagcaactgcaatttatctgtaatgtaggaactgttagttcgtgcggtggtcgtgcggacagtcagtgttatttcattggagatgctagtatgctaatatttcatcctatatatctttagtatt

SEQ ID NO: 11064 - DNA, 1074 bp, Oryza sativa
  ref <308>: DATABASE ACCESSION NUMBER: AK108412
  ref <309>: DATABASE ENTRY DATE: 2002-08-28
aatcagacatcctaatacttgacttcgccgattccttgttcacatccacacttcaaatcgaatacagacctatcataatgtcagaccacaccaccgtccacgtttcaggcatcgcctcctctacttcggacaaggaagtccaggacttcttcagcttctgcggcaagattgtcaatatctctgtcactcccacctccagcgaagccaacgctcccaaatcggcaagcgttacattcgaaaaggatgctgctgccaaaacagcccttctactcgaccaaacccagctcggcccctccgtcgtgaccgtcaaagccgcgcaatctctcgaggatattgctggcgagcagggcacctcagccgcccaagccaaagacgagaaccacaacgacatcgagcaggaagataagccgcgctcgcgcattctcgcagaatacctcgcccatggttacgctatcagcgatcaggcgctccagagagctatcgctcttgaccagaagcacggtttctcgtctcgcttcacgagcgtgctgagcaatttcgataagaagaccggcgctactgaccgtgctagaggcctcgatgaaagctacaagctcagtgacaaggccgctagtggctggcgcgggctgcacagttacttcgagaaggccctcggcacgccttctggccagaagctgcgcgatttctactcccagaccgataagcaggttcgcgatatccacaacgaagccaggagactcgcagacttgaaggctggaaagccggagaagactgagggtgagggtgctgctgcgactgaggctgctgctgcccctgcccctgcccctggcgtggaacctcaagctgctcaagctgccccggctgctactgagaaggcgtaaacacctctttcccgaggcgttgtaattatacctcctgatgactgcgcctggattttatgattcttatgatcctctttgcccattgtgtttctagcatgatgactttttggatggttcttctttttattcttatgttcatagtcgattaccctcgctgtctgcgacagaagtttacaaactgagctttaatgac

SEQ ID NO: 11065 - DNA, 1396 bp, Oryza sativa
  ref <308>: DATABASE ACCESSION NUMBER: AK108413
  ref <309>: DATABASE ENTRY DATE: 2002-08-28
aactttgcttttcagcaacgcaagctatagtttcaaaagcgcattgcatatgctcccaaattgagctgcagcaggaggaaaagcctctcgctttcagaccgtgatcacttaccatcctcacaaatatatatacaaaccaaactaaagcttcaaatccacaccaaacataaacacaaaacctcacaaatttcgccaagtcgcggcacacgtcacggacacgtacacagaaggaaagaaaagggttgcagcgatggatgagctccgtgctccggcgtgcggcggcggcgtcgggacggtgatcgaggaccttccgacggacgtcctcgcgctcgtgctccggcggctcgacggcgcgtcgctggcggcggtggggtgcgcgtgcttcagcttccgcgagctcgccgtcgaccaggagacgtggcgcggcctctgcctcgccctgtggccgtcggttcgcgacgtgctcggctgcggcggcggcggcggcggagacgggtaccgtgcgttcttcgccgacgcgttcccgttcccggaggcagcggcggcggtggcgtcggcggcgccggcgccggtgcccgggtccctcccatcacgcctcgtctccgccgttgacctgcaccacggcggcgtttgcatcatgtcgcgcgtcgtggagacggacacctcgtcggcgtggttcctgggctcgccgttccgcgtcgacgcgctcgtccaggagggcttctcggcgccgtcgccgatcacgccgagctcgctgacgctgagctggatactcatcgaccccgcgtccggccgcgccatgaacgcctcgagccgacgcccggtggccgtcgaccggaagtggctcaccggggagacggtggcgcggttcaccgtgatgctcggcggcggcgtcgccctcgacgcggccgtcacctgcgacgacaggtacgggcacgtcagggaggtgagcctgtgcgtcgaggacggcgagggcggcggcgtgagcggccaggacgggctgggcgcggtggccgcggccatggcgggcgcgcggcggggcaagggcgcggaggcggcggcgaggcagcggtacgaggagttcgtgaaggggaagagggcgaggaaggagtggaaggcgaggcgtgagggcatcgtcgacctctgctgctccggcgtcggcgcggcggcgttcgtcggcttcctcgtcatgctcaccttccggtgatcatgcggcggcgtccggcgagcggcggggcaggcataacggcataagcagcgtacgtagctgggtaccgtacaatttcgttgagaatggcaagaaatgtaaatatgataaaagtggtactagtgtcgtaggaactgttatcacaaaattggctaaattgatagtaacaaatttttcctgtttgctatt

SEQ ID NO: 11066 - DNA, 1173 bp, Oryza sativa
  ref <308>: DATABASE ACCESSION NUMBER: AK108414
  ref <309>: DATABASE ENTRY DATE: 2002-08-28
caacctcctcatcgccgcatagaaattccaccgaacacatagcgagcaagaagaggaggaggaggagaagcgaaggagacaaggaaacagcgcgacatgccgtgcatcccggcgtccagccctggcatcccgcaccagcaccagcaccagcaccaccgggcgctagcaggcgtcggcatggcggtcgggtgcgcggcggaggcggccgtggccgcggcgggtgtcgcggggacgaggtgcggggcgcacgacggggaggtgcctatggaggtggcgcggcaccacgagcacgcggagccagggtcggggcggtgctgctccgcggtggtccagcacgtagcggcgccggcggcggcggtgtggtcggtggtgcggcggttcgaccagccccaggcgtacaagcggttcgtccgcagctgcgcgctgctcgccggggacggcggcgtgggcacgctccgcgaggtgcgcgtcgtgtcgggcctccccgcggcgtcctcccgcgagcgcctcgagatcctcgacgacgagagccacgtcctcagcttccgcgtcgtcggcggcgagcaccgcctcaagaactacctctcggtcaccaccgtccacccgtccccgtccgcgccgacggtcgccaccgtcgtggtggagtcctacgtcgtcgacgtgcccccgggcaacacgcccgaggacacccgcgtgttcgtcgacaccatcgtcaagtgcaacctccagtctctcgccaagaccgccgagaagctcgccgccggcgcgagggccgccggctcgtgagcgctctccaccgccgggccaccgatcgtttttttccgggcggatggatgtgtgtttcttcggcgcgtgagagctttctcctttttttccccctttttcccctctggtttcttcacatttgaccccctcttttttttcctctttatttttttccctcgttgttgcgagagacacacaaacaccatccacccttgtccaaaaagattcaagaaatgacatgtataattgacagcctgcaattccatttgtatgctcgagttggttggtgtattgagtacatacatacatatacataaacacgatagtagtattagatatttagatctgttctctggcacaaatttaaagtgtacgttcgtatttaaagttgtgctacatctatacagc

SEQ ID NO: 11067 - DNA, 937 bp, Oryza sativa
  ref <308>: DATABASE ACCESSION NUMBER: AK108415
  ref <309>: DATABASE ENTRY DATE: 2002-08-28
acacaaattccacatcacagatcgagcacaaaaattttacatcacaaagattaagaggtgaggcatcacagatcgagcacaaaaatattacatcacaaagattaagaggtgaggatggattcgttgctcccaagggagggcgtggatggccggcagcggatccgctcgccggcgccggctctgctccccaccgcccctcccacgcgccggtgccgccgagcgccgccactggcccctccccccgtgcctctcccgaggacaggcggcggcggatccactctcccgaggctcgccggcgccagatccgcatctcgttgtcgagaaccaccgccgcttccttccccgcgccactgccgcacctccttccttgcgccgccgcccccttccccactcagcaatggagagtgaagggaggctggcggcggtggagaaagaagggaggctggcggcaatggagagagaagggaggagggatagaggagggaggcagagggaccgtgcgctaccgcgcacttgccttccgtcaccgtcgccgccgcgcgctgccgcttgagaaccgacgtgcgctcgcgttttgtcaccgtcgccgccacaagccgctgctggagccaccgcgcgccgtcgcccgagaaccgtcgtcggagctgccgccgccgcctgtggggagtgagtaggagggtgcatctggagggaggaagaggaacaagaggataaggactaggtggataaggagtggtgggtggtgattttttaatgggcggtgatatttttaagtgtgtgatttttttaagtgcggcgtttaaacgctggcggtaggttaagaagcaatagggttattttttgaaatggacttcttaaccaacctcaagcgaaaacggattttcacttgtggtcctagactcaccgtcggcgaaaatgaattttcactaacggttct

SEQ ID NO: 11068 - DNA, 1151 bp, Oryza sativa
  ref <308>: DATABASE ACCESSION NUMBER: AK108416
  ref <309>: DATABASE ENTRY DATE: 2002-08-28
cttttcagtctgaacaatcagaagttggcaagtctggagatgcaatatacatcatttgtaaagagaatgaaattgtgaattccgagggactagaatggcctaattcatccagtggcctttcgaattcataaatgtgtttttctggcagtgaatattagcagatgacctttgcacagaagcctccaatgaagaatgaagtattatgttgtttggagggctcttcagcaggtagtgagctgcctcagtttaagttaaagtggtatttatttatcatggtcaataaagcagaggagagctgcatcctgatccacgatttcgtgtcatcaacgctgtatcgctggctgttgaggatgatgctgacaacactactgaaatcatgtgctttatacgtggaaacaatgacagttcacacaggaggagaaacctggatagagttgccggttgcgacataaacgtatttccttgagagacagaaacttttaaaccatcttattaatgaaatatgttcaatcgatccagatattatagttggatgggagattcagttgggatctttaggattttttgctgaaggagctggtataggcttactgaaaagaatttcaaggacaccaccaaatcagatgaaacatccacctatgaacccagtggaggaatcttgtcaggagtttcctggagcatcttcagctgatgatgttattgatgatgctagtgagagcaattggagtcttactcatgctagtggtatacatgttgatggaagaatcattctgaacttatggcgtctcatgcgtgcagaaattaagcttaataattactcccttgaggctgtagctgatgaagtcttgaggaaggtaccattagtaccaaccaagatattgaatcgatggtttgcaacaggtcctggacgaggaagataccggtgcatagaatatgttaacaattgatcttctctcaaccttgaaatattaaatatacttgacctggtaaatggaatcccccacatttatcgtgctggtacatcatcaagatattgctatttgagatttcctttgtatttccagttgaaaacttttatcaattttgcatcttctccttaacaatctcctagccacgatttatcacacagaaatgcagttggttttgttgac

SEQ ID NO: 11069 - DNA, 670 bp, Oryza sativa
  ref <308>: DATABASE ACCESSION NUMBER: AK108417
  ref <309>: DATABASE ENTRY DATE: 2002-08-28
tgacttagagcattgtgcttgtctgtattcagatgcatttccagagagaccattttctctgtgaggataaagggtgcttggagaagaagtttgttgtctttgaaagtgaagcagagctcaagaggcataatggtgtggaacacgggaagcacatgcctggtgctgttgacagtagctcgtcgtccatgcaaaatggcattgcagctgtaggccatgggttgggaggtcaaagtgattcatctcgggtgccattgcaatcattaagcatttcttctagttctgggcaatcatcagaaacaagacaaagctttgcgagaaatcgggtacttcagcaagcatgtgttcctcctctttcccgtcaggaggtccatgatgctagagtaggttctgtccttcaagaagcttcattcccttccctaccagcacaatcaaggaaggcaccagcacatagtcagagctcaaggactgcagcaaggattggggaccagcagtttcgtcctttatcagttactagtaacaggaatgttgctttagcacagcagggtacaagaacattacctgaaaacacccatgtatctgggcttgcacaatacagcaagagaactgagaacatgcaccaagctgttcagcctcagttcctaaaaaataattctttgatcccttctggctc

SEQ ID NO: 11070 - DNA, 1590 bp, Oryza sativa
  ref <308>: DATABASE ACCESSION NUMBER: AK108418
  ref <309>: DATABASE ENTRY DATE: 2002-08-28
agtactccccatctcccatccaccattgctgccatctccaccacatacaatacaacaactactactcagctcaccatcaccggagcaagagccaagaagacgacgacgacgacgagctagcagcagcattgcaaccgacggcaatggaggagcagcagcaggtggaggtggaggtggaggtgccgtcctacttcgtgtgccccatctcgctgcagatcatgcgcgacccggtgacgctccccaccggcatcacctacgaccgcgacggcatcgagcgatggctcctcaccgccggcacctgcccgctcaccaagcagcccgtgccgcccgactgcgaccccacgcccaaccacaccctgcgccgcctcatccagtcgtggtgcgccctccacgccgaccatggcgtcgacctcgtccccacccccaagccccccgccgaccgcgcccgcgtcgccgacctcgtctcccgcctccgcgccgccacgagctccgctgccctcctcgacgcgctgcgcgagctcagggacgttgccgccgagagcgagcgtaacaggaagctcctcgccgccgtccccggcgcggtggatgttctggccgccgtcgtcgtcgcgtcgtgtcgagacgccaaggccgcgtgcgacgaggccctcgagatcgtctgctcgctggagctctcggagcggtgcctggcgcggctcgtcgagaggaacgaggagctcgtcgacgcgctcgtcgccacgctgcagcggacgaacaccacgtcccgggcgcacgcggcgctgctcctggaggccgtgacggcggtcatgccgtcgaacaggctggtgtccctcccggaggaggtgttcggtgaggcggtgcagctgctccgcgacagggtatcgagcccggcgacgagggcggcgctgcacgtgctggtcggcacgacgtcgtggggccgcaaccgcgtgaaggcggtggacgccggcgcggtggcggtgctggtcgacatgctcctggacgggccagtcgagcggcgcgggtgcgagctggccctggcggcgctggaccggatgtgcgggtgcgcggaagggcgggcggcgctggtgtcgcacggcgcgggcgtggcggtggtggggaggaaggtgctgagggtgtcggaggtggcgagcgagaaggcggtgcgggtgctgcggtcggtggcgaggcacgcggcgacggcggcggtggtgcaggagatggggcagacgggggcggtggagaagctgtgcgtggtggcgcagtcggagcagtgcggggagaggacgcgggagcgggcgcgggagacgctgcggctgcacgccagagcgtggaggaactcgccctgcttgcagcctcacctccaggccctctacccttcttgctgatcgaattctgattcatgatcaccggcctcatcactagctagctaccaacatacagcacagagagaattgaacacttgttcgattcttcctttcgctcgattaattttattgagttgagatcgttcgatgtagtcctatgaatcaaagtgtacagatcgacgcaatagatgaactaaatcatgcgcgagcttttttgtttgggtct

SEQ ID NO: 11071 - DNA, 1216 bp, Oryza sativa
  ref <308>: DATABASE ACCESSION NUMBER: AK108419
  ref <309>: DATABASE ENTRY DATE: 2002-08-28
taatagatatgtcaaggttgatcaatcctgagttctccgaggaggagattgccaagctcggatcagcctgtgaggattggggattcttccagcttgtgaaccatggggtggatggggagttgctgcaacggatcaaggatgacatcacagagttcttcagacttcctctgcaggagaagatgtccgtggcgatcccacccaatggcttgcaggggttcggtcaccacttcgtcttctccaaggagcagaagctggactgggtcgatttgctcttcctcaccacacgcccagtggaggacaggaccacagagttctggcctacaaagcctcccacattcagggactcacttgacaagtactcgctggagattgcaaatgtgtctgctaagctgttcaagttcatggccatcaacctgggcgtcgacgaggaggcactccttgcagcattcaagccagagcaacctcagagtgtaaggatcaaccattacccaccctgcagtcaggctaacaaggtgctgggcctctcgccgcacacggatggcgtcggcatgacactgctcctccaagtgaacgacgtgcaagggctccagatcaggaaggacggcaggtggttcgccgtgaagaacctccctggagccctcgtcgtcaatgtcggcgacgttcttgagatcctcaccaatggcaagtacaagagtattgagcacagagcagtaataaaccctgataaggaaaggatcacacttgctgcattccagagcgttccgctttccagcacagttggcccactccaggagcttctgatgaaaggtgaggcacgctacaagacggttgatggtgctgagttcaccaaaggctactttgccgcgaagctggaaggcaggagatacctggagagcttgaagctgggagtgtgaatgtgtcaggatgagtagtttctgcttctctttgattcttttgtttcggtgaatggataacgatgctacatcttcctcatcctggtacaattcagctggtattttccttgaccatacactcaactggagtattagtgcccatgagctaacggcacagagaacaatggaacatatggtagaactggctggcaggtatgatgtccgagattgcgtacaacacgcagttccttgggatccatttcatatgccagtaaagtattgtccaatccataatgaaagaagatcaaattgcactctggatg

SEQ ID NO: 11072 - DNA, 1555 bp, Oryza sativa
  ref <308>: DATABASE ACCESSION NUMBER: AK108420
  ref <309>: DATABASE ENTRY DATE: 2002-08-28
acagtcacttgttgggtctttgcaattgctttcctcgctggctggctgtaagaatggacacgctgcagcagcgcaggaaccagctccggataccaatggagccgctcgcctccttcgccgcgagcttcttcgcggccctgtcgccgccgtcgccgtcggcggccgcggcggatagctccacggtgctcctcctgccgctccccgtggcggcggcgcgggccctgaccgtgctccgaaggctctgctcctcgccacgcagtccttcatctccctcttcttcatgttcctcagcgtgctgtccccgccgccgccgccgcctcctccggcgctcgcgccggcgctgccgcgtgctgacccggggtgccccgcgggggccagctgcgtgggccgcgccctcgcgcacgtgctctccgtggcgtcgcggctccccgttgcctcccgcaagtacgagctcgtgcgggggctcgcggagcggctgctggacgacaacgcgcgcggcggcggggcgcggatcggggccgtgaaccgcgccgcgctgtcgggggcgttcgcgcgcacgctgcggcagctggacgcggcggcgggaggggagtggccgggcatggagctggccgtgcgcgcggtgcgaacgggcatgcggtggtggaggccgaccgccgccgcgttggacgatgggttcggcgggcccgcggcggagaagctggccgccgagctgctctggctcgggcagaagatggccgagtgcggcgccgcccgcgaggccgccgcgcagttcggcgccgcgtcgcgtctggggagccgcgcgctcgtcgccgagccgacgctccaggtcgcgttgcttcggcttgctgtgttcctgttcaagcacgccaactcgagggaattcgagccgagccccggagggaacgaggacaagggcgccatcgccgagcagcgggtctcgctgctgcggtcgtggctgccgctgctctgccgcggcagcaacggcacggacgcgccggtgcttagcagcaaggagaggacggagatggtggccgtgctggatgagctgatcgggaagctggggtgggagcagcaggaggagatcctggcgctctggctgcaccacttcgccgcgtgcccggacaccgattggcccaacctcgagagctgctacacccgctggtacgcagagtcgcgcaggctgctcgagtagaacaccaacactacacgcggaaggagtgcggacgccggtgtgcctccgtctccgtccagccaaatacgtgtatcattgtaagtgttaacgtgtatcgtgtacagcatagcagttagcaaactcagtgtagccgtgcagggtaccacatcattttagccagtgcattcacttgtgcgtatgttcacagcggcagtaatcgtatgacagttatgtattctgcagtttatttactcctgaactctatagtgtaagggtatctgcaaacgaagatacaatcaccttcggcaaacgtgtaaatcatctagtagcaaataaaggcattctatcagtaaaataatggagtgcctacgagttgtaccc

SEQ ID NO: 11073 - DNA, 626 bp, Oryza sativa
  ref <308>: DATABASE ACCESSION NUMBER: AK108421
  ref <309>: DATABASE ENTRY DATE: 2002-08-28
atccaccacatcgacaacctcacgccgtcgacaactttccagccaaaatgggtcgtcttcactccaagggcaagggcattgcctcctccaccctcccctactcccgcactcctcctgcgtggctcaagaccacccccgaccaggttgtcgaccacatctgcaagctggccaagaagggtgccactccttcccagatcggtgttgttctccgtgactcccacggtgttgcccaggtcaagatcgtgaccggtaacaagatcctccgtatcctcaagtccaacggcctcgcccccgagcttcccgaggacctttacttcctgatcaagaaggccgtcgctgtccgcaagcaccttgagcgtaaccgcaaggacaaggactccaagttccgcctcattctgatcgagtcccgtatccaccgtctgtcccgctactacaagaccgtcggtgtccttccccccacctggcgctacgagtccgccactgcctccaccctggtcgcataagcgaaggcgttggttgtctgtggtcatggagataggggcatgattgatattctgggcttctgttcggagtatctttcatgtgtgttagatacgaccattaaaaaagaacttatgagttatacc

SEQ ID NO: 11074 - DNA, 927 bp, Oryza sativa
  ref <308>: DATABASE ACCESSION NUMBER: AK108422
  ref <309>: DATABASE ENTRY DATE: 2002-08-28
actggacgattagccagtgcgccaccggccaccggatcgataccggcggcggcggcggtggcggtatcccacccgcgagcacgagcacgagcacggctgccgcgtccggggcgcaagtgcggaaacagtccaagtccacgccgcgttggggatcccacctaacctcaaccgctccacgcgggcgccgagggtgccatgaagaagctgttctgctcccgcggcggcaccgtggcgaggaggtcggagagggccccgatggctgaatggtgcgtgttctgccccatcgcccgccgcgaccccgcttgcgacaccgccctcctctactccgatgacagggtcatggcgttcaaggacatcaacccgtcggctttcaggcactatcttgtcatacccattgaacatatacctactgtcaataatctccaaagaaccaccgaagatcaccagttagttagtcacatgttggcagtaggaagagatttactcaatcgggatgctcccaattcggaggaacagagatttggttttcaccagccaccatttaatagtgttgatcaccttcatcttcactgcttggcattgccatttacgcccagctggaggcaagtaaaatatacacctcttggtccccttggagggtttattgaagctgagagtctattggaaagaatacgcccatagtctaccgttatcacaactaccggtacaagctattcttgcttaacttttgttgtattgtcatttgtacgtgattcattgtacattcacaacacatggtctgaaattgtagactaaatcagacccactctttctggatgttgagctgcattgagttgataaatgcctgctgtatgaatttcttttcatggtggacagccttagcttacaaacaaaggaataataaccacctatggaccttttatggcc

SEQ ID NO: 11075 - DNA, 674 bp, Oryza sativa
  ref <308>: DATABASE ACCESSION NUMBER: AK108423
  ref <309>: DATABASE ENTRY DATE: 2002-08-28
aaaaagcggcggcgctccgccagggtctcaccgccagcgacggcgaggcgcgacggccaccatacgcacggcgcgacggacaggtttgaggtggatccatggcgacgggtcggtggagaacaggacctgcagaccgcggcctgcggcggcggcgacggcgccgtggggctcagcttcgagacgcaccacggcggcggcgtggcgccttcaccagagttcgcggcgtgcacggcgagctcctgcagcgcggcgagctcctggtgcaccatgaccggccgagccatcaccaccgccgtcgcttcccaacgccgcaaccagccgaagccgccgccgcagttgaagttggatggggatttcagaaacctttcatccagagctcatggtaaaccggacagcagagtgaccgtcacttgccatccttgttgccactgaagagatagtcaagtgatgaaccaccgcctggagcagcctgcaccttggttgacggacggtcctgtgcaaacaaaagggaaagaaatgtcagcataaagcctcaaatcggacgcaatgcaagtaagatcaattgcaaaatgcttacgaagtgagcttgtgtgttacgtaaggcatcttagcacgtttcagaccagacaatgtacagtctgagagttaaatgagtacaaaatggatatttcttc

SEQ ID NO: 11076 - DNA, 1263 bp, Oryza sativa
  ref <308>: DATABASE ACCESSION NUMBER: AK108424
  ref <309>: DATABASE ENTRY DATE: 2002-08-28
catatacaatgatgatgaagaggaagctaatatggaaacaacatcatacgctattattaaattgaagaatcatatggcgcagcagctcttagttgttcagggcatagttaaattgtatgagacacacaggtggtctttttatgctgagcatatgggaataattttagagacactatcagccattgcgtcacatgcaagtgaagtgagctccgaatctaccttgctcatgaaattccataaagcatgttcccttttggaggtgtctgagccagcagtcattcatttcgagaatgagtcttaccagagctatctcaaacttctgcaagctttggttcatgaccacccatcaatctcagaagatatgaaaattgagtcacatattatgcttgtttctgagaaaatactacggaagtatctcaaatgtgcagggcgtgaacgatctaacgattcatctggtagagatccagcattacgctggaaactgcctttgggcactgctaagaaggaggaactgtctgctagaacttcattggtccttcatgtgatgcagttattgggtggcctagagagggactgctttaggagaaacctgcccctgtttttccccttattaactaacctcattcgctgtgagcatagctctggagaagttcagcttgcactgtatgatatattccagtcatcgataggccctataatatcaacatagtatatatatcatttgttcagcggttgtacaatttttccattccaatttcataaggtatagcttattgatagtggttacatgagaatataagataagaaaaaggtaccagcttggcactgctgtaaatgactggcagttggaacctgcgccttcagaattctgtttgaagcatcatttaacatcgacccaggtgcctggagatggtcttttgaggctcatttgacattctttttctaacatacatttcaattcgatgggggttcagacttcagaggcaactgaatattggaagttagaacaagtctttctgacttccaggtctgctgaggttttacaaagaaatggtttgctcacgaatgacaaaaattttggcatgtagcattttgtcctttgtattacttgtcttttgtatagtattttcttcagaaaagagactttaaagtcgtccatcaagttgttctttttttccgctttaaatttatatactcgaattgcaggcaacatgtatttgtcattcttagtggaaatggatcaataaatgaaagttgattggt

SEQ ID NO: 11077 - DNA, 1236 bp, Oryza sativa
  ref <308>: DATABASE ACCESSION NUMBER: AK108425
  ref <309>: DATABASE ENTRY DATE: 2002-08-28
atccacccgcgtcgtcgcctctcgtctactcctcctcctatctctcaattctcattccttccccctctcctgccaccatggaggagaggattccagagccgcaagatcccaccgccgacgtcgccgctgacgtgctgccggcggaggcttcttccagcgacgtgacgacgacgggagtggaggaggaatctgattccgatggggagttcgagttcgagttccccttcgtcagcagggactcccccgcgggcaccgccgccgtggccgacgacctgttcgccgacggccgcatcaagccgttctacccggttttcggccgcgccggcgccggaggaggaggcgatcgccagcagcatctggccaaggacgacgctgcggcgacggtgccgccgcggacgaggggcccgctcgggcggctcttcctcgaggagtcccgtggttcgttcgacaggtggtccacgtccacgtcgtcgtcgtcgtcgtcttccgcgccggcgtccgacgagggcggcctggacggcgcgccgccggagagctactgtctctggacgcccggcgccggcgccggctccgcctcggcatcggcctccccgcgcccgcccaggaagagcggctcaatggggtccatggcgcggtggcgccgcatcagcgagctcgtcgtcggccgcagccacagcgacggcaaggagaagttcctgttcctccccatcccgccgcccagtagcaaggagaacgacgtcgaacacttcaagcccaaacccaaaccacccaagccgacgccggcaagcggccgcaagacggcacaggccgccgccgcagagatcgacacggtcgccgccatccacaggatagcttacggcgctaagggcggtggcgccaccggcaccagcgccggcgggggcacgccgcggcggacgttcttgccttaccgggaagagctcgtcggcctcttcgccaacgtgaacggcatcagccgcagccacccgcatccgttctaattaattttacagtgtttggttctgcatatattgatagtcaattaatcacgtgattaggttaattaattacggcttaatgtggactatgaacagtgtgaagtcagtgacttaactggcctttgtctttctcggacagagtgtgaacgcctacgggtggcgcgagaaaaacctccattagacaaggttttgtacacccgagtttgtacatgtgcaatagcaaattcattaattttgtgag

SEQ ID NO: 11078 - DNA, 989 bp, Oryza sativa
  ref <308>: DATABASE ACCESSION NUMBER: AK108426
  ref <309>: DATABASE ENTRY DATE: 2002-08-28
cctcggctacgccatcctcctctacttcctcgtccaggagtcgccgcggtggctgctggtgcgcggccggaagcacgacgccatcgagacggtccgccagatcgcggcgctcaacggcggcggcggcatcacgtgcagcttctccatgctgcacgcgtgcgccacggagcgcgaggacgacgccgccggcggggccggcggcggcggcggcggcgtgttcgcgacgctgcggtcgatgtgggagcggcggtgggcgctgcggaggctggcggtgatcatgacggcgagcttcggcgtcggcatggtctactacgggatgccgctcaacgtcggcaacctgggctccaacctctacctcagcgtgacgtacaacgcgctggccgagttcccgtcgtccgtcctctcgtggctcctcatgggcaggatcaaccggcggagctcggtggtcgcgctcaccgcggcggcgggggtgtgcagcctcgcgtgcgtggccatcccggagggcaccggcgggcggatggccgccgaggtgctctccttcttcgcgacgtgcacggcgttcaacatcatcctcatgtactccatcgagctgttcccgacgtcggtgcgcaactcggcggtggggatggtgcgccaggcgctcgtgctcggcggcgtggcggcgcccatgctcgtggcgctcggccgggagcggagcttctggtcgttcggggtgttcgggctcgccgtcggctgcctcgggctgttggccgtctgcctgccggagacgagggggaggagcatgtcggacaccatggaggaggaggagcacaaggaggccgccgccgccattggcgacatggatagcaatgccgacctcgtgtagatcgatcgcctccaactcgcatcttggcgccggatatttgctcgatcgtgctggtccatgcgaagctgtcgctcgcgtgtaagctactgtccacttgcacaatataaacaatcaattcatgtcc

SEQ ID NO: 11079 - DNA, 1100 bp, Oryza sativa
  ref <308>: DATABASE ACCESSION NUMBER: AK108427
  ref <309>: DATABASE ENTRY DATE: 2002-08-28
agcaccaccctagagctggccaacactcttaaatcgtgtccatgcctcaagttgacacctagctctcacttgccacctcaactttcaccattaaccaaaccaactcgccaccatgaactcaccaagaaatctctcaaaatcacctagaacatcctcctcattttctcagccaaaggtgtttgatccgttgcaaatcttctctggggtcgaacaccctgcgctgagctcgtcgtcgccctcggtgtccagagcgccgccgctcgtcgtgtcgctgttctcggcgatccggtgcgtctccgaccaagccatcgcgccaccgttgtcgccaagatgcaaggaagcagcacgcgggaggaatcaagctgaagagctcccaatcacgagatcgccgtcgtcttcctcaagtccggctgctggctctccccttcgattcctcgtcctcggaacgacggtcgggtggagctatcgccgtcgccataccgatttttgccgccgccggaacattcttcacgccgtcatcgccattcaagcatcaccggcgcatgtgcgaccctcagtaagcctccaggagcggaggagccccgtagccacacatgcatgcacccattcgcatcgcatgaaaacgagccggagcttgacatgccttagcatgccgagaaccacctccgcttgcgccaccgtttccgctgactccgaccaccgcagcccgcgagaccaccaccatcagcttcgccatcttccactctacatttttctgtttagtccgcgtcggctatctcgccgtcgttcgccgtcaccgccgccgcaaaggtcgccggccgcctccgctctgtctctgctgctgctgttcctctcctgagccaatgacagttggaccccacttcattaagcaccaaggaccgcgattagaaatagtttaaatcatgtagggttctatctgtaaaagtacttaggatgacatgtggaccaaggatatacatgtaaatactcttaatgaaatttcatttaaacatgtgctagggacctcaggacctatccctagaaacccttggtacttttctgcatatttgctctcactgccatgtggaccccatcctttt

SEQ ID NO: 11080 - DNA, 1115 bp, Oryza sativa
  ref <308>: DATABASE ACCESSION NUMBER: AK108428
  ref <309>: DATABASE ENTRY DATE: 2002-08-28
ttgcgtaagacgttcgttgagaggtccacggattgtgttaatcttttgaaagagttggaactgcacaaaaggccagagggaaatgatatccctttgtttgatttggagggtctccaatgcttaggctcaatactacgcatagtttctcagagcagtactaccatggatttctcaaatatttcaatccagtggttccgtgtacacccaaaagaaagtaacaaagagattatttcaggtgccacaagatcagtatatgctcccgaaccacatgacgttggacggtatttggaagctgaaattaattatggtggtgaaattgctatagcaaagacagctgggccaatagaccctgacgctggattggtcgattatgtagagacactcgtaaggaaacgtgaaactgagttcaatgttgttgtgcttcagttgaatggaattgatcagccaaaagagtctgttcatgttctcaatattggaaaattgaggatgaggctttctaaaggaaagacagtggttgccaaggaattctattcgtcatcaatgcagctatgcggtgtccgaggtggcggtgaagcagcttctcaggcgatgttctggcggccgaggaatgacctcagcatggtcctggccttcgaaacgacgagagaacgcaacaccgcaatcatgctcacccggcgattcgccatagattgcaatatcatccttgccggtccaggcgacaagactccatggtgaagaaacgcgagcgcgccaccaccggtgctcatcatcctctgatcctccgcaacttcaaaccccgtgctgcggttgtatgtacattttctggtgcacattgtgttttgcatcatgccctgtttgtcagttagtatgcggttcttcctttgtgatggttcttctgaaaggcgacgcctgtgggcaccgttttagccgcctccggttgccgtctttctcctccccctgtcaccgtgatgctgatgttcttacgctgctgcggctgtgatttgttgctaggaaaaaaaatagctgtataatgtattgtctgtttggtagtagtacataccacgacgacattgagctaagtaaagtttgatccggaacgtgggctagtttgtgct

SEQ ID NO: 11081 - DNA, 1197 bp, Oryza sativa
  ref <308>: DATABASE ACCESSION NUMBER: AK108429
  ref <309>: DATABASE ENTRY DATE: 2002-08-28
atctacttctcttcttcacatctctatccatccccaaaactacacaaataccgcaaacatggttcccaaggttggtatcaacggattcggccgtatcggtcgcattgtcttccgcaatgccatcaaccacggtggtgtcgacgttgtcgccgtcaacgaccccttcattgaggtccactacgctgcatacatgctcaagtatgacagcactcacggtcagttcaagggcaccatcgagatcgatggcacctccggcctgattgtcaacggcaagaagatccgcttctacgctgagcgtgaccccgcctccatcccctggtctgagaccggcgccgcctacgtcgtcgagtccaccggtgtcttcaccaccaccgagaaggcctctgctcacttgaagggtggtgccaagaaggtcatcatctctgctccctccgccgatgcccccatgttcgtcatgggtgtcaacaacgactcctacaagtccgacgtcaacgtcctctccaacgcttcttgcaccaccaactgcctggctcccctcgccaaggttatcaacgacaagtacggtctcgttgagggtctgatgaccaccatccactcctacaccgctacccagaagaccgtcgacggtccctccgctaaggactggcgtggtggccgcactgcggcccagaacatcatcccctcctccaccggtgccgccaaggctgtcggcaaggttatcccctcccttaacggcaagctcactggtatggccatgcgtgtgcctaccgccaacgtctccgttgtcgacctgacctgccgcatcgagaaggccgccacctacgaggacatcaaggccaccatcaaggccgcctccgagggtgagctcaagggtatcctgggctacaccgaggacgacattgtctcctccgacctgaacggtgatgacaactcctccatcttcgatgccaaggccggtattgccctgaaccccaacttcatcaagctggtttcctggtacgacaacgagtggggctactcccaccgtgttgttgacctcatcgcctacatcgccaaggtcgatggtcagtaggaatcaggacggcgtcctggggccaggagtcttctctaaaagacggagtttgctacgaagatggccttcgccttgtagaaaaaatccgataacgtcaatttaatgaaaccaaatacaattctttc

SEQ ID NO: 11082 - DNA, 1095 bp, Oryza sativa
  ref <308>: DATABASE ACCESSION NUMBER: AK108430
  ref <309>: DATABASE ENTRY DATE: 2002-08-28
atcaacacctctctacgtttattttacgtgtgatcgggaaactgtttaggcatcatggttgccaacgccctagtctaccaccctgctctcgcccactggctgcgctttgttgcgacaaccgttggtcgcgataagcttctccgtaccctccaatacttctcccgcttctacgcctggtacctgtaccgcaccaaccgcccgcaatcggctattgatccctacaatgcggtcaagaagcagttcggcacaacgcgtaaaattatgcgtatcggcaaattcgccgagcacctcaaggctgcttccgtcgcttttgacaacaagagtcccatcgacccagttctgcgttatctcgccgtcggtcgtcaactcggctatgctggctacctgaccctcgacaccgtgaccgtagtcgatgctgtcggctatcgcaagctggagtctgtcaagaagatccaggaatacgcctaccgctcctggggtgctggtctgctgtgcagtgccatcgccggtatctacactctctacactctccatgagaaggagaagacgattgaccgcaaggagggcgagggcgtcgtcgaggccaagaagattgagaaggagcgtgccgccgccaggatacagctcatctctgacctgttcgacttgactatccccgcctcggcggttggcctcgccaacctcgacgatggtatcgtcggtctggccggtaccgtcagcagtttgatcggtacctggtcccagtggcgcaagaccgcctaaagaggacaataatagccactgagtgatgtagttttaagttggttgatgaagtgagaacagcgatccggccgcgtctgtactggtatggaatgttggatgtcgctgaattttggggagaagtgggatccagaagacttgaaatcatgcaaaacttctgagatatgaaagctaccacctccgcgtttatatccctgcgtttcatggacaaagttgtaactcttgttttttttggttttttttttaacaccccttttgatgtcgatgagatatctagatgtgtttttcctttgttgtcgtatatagtcaaatcccatgggatctctctaccctgag

SEQ ID NO: 11083 - DNA, 1211 bp, Oryza sativa
  ref <308>: DATABASE ACCESSION NUMBER: AK108431
  ref <309>: DATABASE ENTRY DATE: 2002-08-28
atctctctaaagcatcacatctatcgccatcatggtccccaaggtcggtatcaacggtttcggtcgtattggccgcattgtcttccgcaatgccacccaagctggcactgtcgacgttgtcgctgtcaacgaccccttcattgaggttcactacgctgcctacatgctccgctatgacagcacccacggccagttcaagggtaccattgagatcaacggtaccgagggcctgatcgtcaacggcaagaagatccgcttctacgctgagcgtgaccccgctgccatcccctggggtaaggagggtgccgactacgttgtcgagtccactggtgtcttcaccaccaccgacaaggcctctgcccacatcaagggtggtgccaagaaggtcatcatctccgctccctccgccgatgcccccatgttcgtcatgggtgtcaacaacgactcctacaccaaggacgtcaacgttctctccaacgcctcttgcaccaccaactgccttgctccccttgccaaggttatcaacgacaagtacggtctcgttgagggtctcatgaccactgtccactcctacactgccacccagaagaccgtcgacggcccctccggaaaggactggcgtggtggccgcactgcggcccagaacatcatcccctcctccaccggtgccgccaaggctgtcggcaaggtcatcccctctttgaacggcaagctcaccggcatgtccatgcgtgtccctaccgccaacgtctccgtcgttgacttgacctgccgcatcgagaagggtgctacctacgaggagatcaaggccaccatcaaggccgcctccgagaacgagctcaagggcattctcggctacaccgaggatgacatcgtctccactgacctcaacggtgacgaccactcctccatcttcgatgccaaggctggtatcgccctcaacgccaacttcatcaagcttgtctcttggtacgacaacgagtggggttactcccaccgtgttgttgacctgatctcctacatcgccaaggtcgatggccagtagcaattaaaacagtctcctgaggccaggagccttctctgagatgtgaaatggctcttacgctgctcgcccatagatctgatatcgggtgcttttgaagagttgctttccgtcctgtagaaaaaatcagctgataacgtcactttaatgaaccaaatacatttcttct

SEQ ID NO: 11084 - DNA, 968 bp, Oryza sativa
  ref <308>: DATABASE ACCESSION NUMBER: AK108432
  ref <309>: DATABASE ENTRY DATE: 2002-08-28
attcccgccataatccttgaactgcttgcttggtctcacgatgggtcccactgactggccggagccggccgccggcgacgagagcagcgccgtcgtgtccgacaccgacgaacactccgaggagagctcagccgatgccaacgccgacgagacggcgacgcgcgtgcagcgccggcttgacgagggcgcggacgccgaggccgaggagatggcggcgcgcatgcagcggcgggtggaggcgctgccggggaaggcgcacgagagcgagccgttcaccatcttccgcgtcgccggcccgatgcgcggccgcaaccgccacctctacgagccccagatggtctccgtcggccccttccaccgcggcgccgcccgcctccgcgccatggaggagcacaagtggcgctacctccgcgacctcctcgcccgcaacaaccccggcggcgacgcgccgctcgccgcctacgcccgcgccgcccgcgagctcgagcccgcggcgcgccgccgctacgccgagcccgtcgcactcccgccgcgggagttcgccgagatgctcctcctcgacggctgcttcatcgtcgagttcttcctcaagggcgaggaccgcgccgccgacgcgctcgtcgacgccgcgtgggcgatgcagaacgtgtacaacgacctcttcctcctcgagaaccagctccccttcttcgtcgtcgagcgcttctacgacatcgccaccggcggcctcggccgcgactacctcgtcacaagcctcctcgccaagtacctcaccatggacacccctcaggacgccgccacggcgcggccgcccgacggcgagatcctcctcctcctcaccgtcgtccagaccgtctacaccgttctaccctactaccatcccacctaatcacacacctactattgcatgtattgtatcgtatcgtacctttttttaatcccattcttggaagagatcattagcgcat

SEQ ID NO: 11085 - DNA, 697 bp, Oryza sativa
  ref <308>: DATABASE ACCESSION NUMBER: AK108433
  ref <309>: DATABASE ENTRY DATE: 2002-08-28
ctcctcgaatacacaatttcttttttcacggtctagccaaatttcccaatccgtcggcgctcaccgccttctgtgccgcctcacttgcgccggcgaccggatgacgcctgcatcccctccaattcatcttcctcatcccgatctgatcctccagccctagttccacaagcaacatgccggagatgtgtgcgggagggatccaagcgaggtgcctggctagaggcgccacatccgccggggaagacgagggttcgctggggaagacgagggttcagtcaacgcatgagagagccactacaatggaaggatgcgagggtacacagggtcggcttcggccccggcgtcgacgaggaagcggagccggaggatgtcgcttgctgcagatggggggtcggccgcggcgccatcgatggaagttgcacgcagcgccgccgccgtcgatggaagccgagcgcagcgctgccgttgacggaagccgggtgtatcgtcggatgccgaatatgccgcgtcgcgccgctgccgccgccgccgctgggcgtagcactgcctccaccgccggacgccctatgccatcgccaccacactaccacgtaggccagggcacaaagctgccatccaatgggttgtggaggtaattaaattgagttattggagaagatagagagaaatcagactggaagacatgatttattttttt

SEQ ID NO: 11086 - DNA, 919 bp, Oryza sativa
  ref <308>: DATABASE ACCESSION NUMBER: AK108434
  ref <309>: DATABASE ENTRY DATE: 2002-08-28
aacgtagcgaaatgcgatacctggtgtgaattgcagaatcccgtgaaccatcgagtctttgaacgcaagttgcgcccgaggccatccggccgagggcacgcctgcctgggcgtcacgcctgcagcttcgttatggagtatgacatccatactgtgctagatactgctacacttgcagctacactttttgtaatctacatgatccggttcaaattgagaccaacttatatggtggacaaggacaattttgcattgtactatgtggtggtaccttgtgctgtgctagcactgcttattcatccttcaacatctcataacattgtgaaccgtatcagctgggcattttgtgtttacttggaagctgtctcagttctaccacagctgcgtttgatgcaaaacacaaagattgttgagccgttcacagcacactatgtgtttgcattgggagttgcaaggtttcttagctgtgcacactgggttcttcaggtattggatactcgtggtcgattgttgactgctctgggctatggcttgtggccatctatggtgcttctgtcggaaatcgtgcagacattcatccttgctgatttctgctactactatgtgaagagtttggtcggtgggcagctggtgctacggcttccatctggggtggtgtaagaactgtagaaggatacaaagcttccagcttcacccatttttatgtactctgaataacagttatgttctagtgtccgaccttctgtgtctcttaccaagaccgagaccggagccttttttttacttgatattttgaggtataactattaatgacaagtgcactagagtcttcttaaacataggtcgttgaatgactgtttatagttgcgaatgtgctgatactttggttcaatttagcttctgggtacatggttgtcgtg

SEQ ID NO: 11087 - DNA, 1042 bp, Oryza sativa
  ref <308>: DATABASE ACCESSION NUMBER: AK108435
  ref <309>: DATABASE ENTRY DATE: 2002-08-28
aacttctcatccaagccaactctcccctcctctcctaggtttcgcctccgccgccgccgaccgccgccgccgtcgccgccgtagaccgatcgagcgggagtggggaggatgacgacgtcggagagggagccgtgcccggaccgcatccgggacgacgtgggcggcgcgttcgcgatgggggcggtggggggcaccgccttccacttcctcaggggcgcgtacaactcccccaacggccaccgcctctccggcggctcccaggccgtccgcatgagcgtcccgcgcaccggcggcaacttcgccgcctggggcggcctcttctccgccttcgactgcgccatggtccacgcccgccagaaggaggacccctggaactccatcctcgccggcgccgccaccggcgccgtcctctccctgcgccagggcccgcgcgccaccgcgacgtccgccctcgtcggcgcctccctcctcgcgctcgtcgagggcgccggcatcttgctcacccgcaccatggccacccttccccaggaggaccacgcctacccgttcccggtggtgccgccgcctgaggaggtctcggcccatgaatcgagccctatcgcatgggttaggggaattttcgggaggaaggaggagaagcctgctgctgctggtggtgaccgcaagtcggacgtgttggagtccttcgagacgcccagccctccaattccatccttcgactacagggacatctgatcttcaagtttggatctgaagtttctaatgaatcgtacgaaggaagagaggaccattttgttagataaacatcaaacttagttcaggatcatagaatcacgtaacatattttgaccacttaccgactcattacgtttaagttatttcctaacgctgttagcttttatttattatatggtatatgctctactgaaagtgaagttagtccagatatctccattctattacgtaggtgaagaggctcaaattttttaaatgtggaattaacaacagtatgccttcttaatatgtactttgggatctcttt

SEQ ID NO: 11088 - DNA, 483 bp, Oryza sativa
  ref <308>: DATABASE ACCESSION NUMBER: AK108436
  ref <309>: DATABASE ENTRY DATE: 2002-08-28
ctccagcggcgtggaatttttcctcgagaggaggcggcggcgcaacgaagacgcgacggcgggggcggcgcgcggcgcgcggcgcgatccggaggcgacggcgacggcacggcgctcacctccggccgccatcttctctccggctttgggaggaaggaagtctgagaggatgctggttcaaatactgagtggctgagcaaacatgtacatgatgctggttttgtaaaggagcaataaatgtggttctctgaacattgtatattgctgatgtaaccatttggcataggagagtactggtgtggcagcccatgtttattttttatagcttgaaaggtcacataaatgcaaattctaagtagaaatgtcaagtgaatcatgccatatttcacttttttttaggcttcatcaatgtgtatttgatgcatcagtagcaaatgatgcatgacgttcatgggcccatgcttaattatctcctggctaatt

SEQ ID NO: 11089 - DNA, 933 bp, Oryza sativa
  ref <308>: DATABASE ACCESSION NUMBER: AK108437
  ref <309>: DATABASE ENTRY DATE: 2002-08-28
aatcaacgtttcccttagcaaattctttagacaaaaaacatcacgaacaaaggtagtataatacaaatgaatcaaggaccatgtagttttgctatgtacaaattcagtttgtttgttctatgtactcatcagatcacactcggtgggctctccggtcgtttcaccctgctcgcgtaccggccgtcgcgcagcgggctctccgcgtgcacggccgacgtgacgtgcttctttccccgccggctccccctcgccggctcgtcgtcgccggcgtcgccggcggcgctactcccggccgccgccgccgccgcctcctcgccgccgaccgtgaacacgaacgggcccatgggcacgtcgtcgtcgacggcgagcagcggctcgagcgcgtcgacgacgtcgcgcatgcaggggcgcgacttgggcacgctctgcaggcactggtgcgccaccttcgcggcggcgtgcgcggcgcgcgccgagtactgcagctcgaggctggggtccatgatgcggtgcagccggtcggcgcggcggaggtaggggcgcgcccagtccacgaggttctgctcccggccgcgccgccgcttgtcgacggagcggcggccggtgagcagctccagcagaacgacgccgaagctgtacacgtcgctcctcgccgtcaggtggcccgtcaggatgtactccggcgccgcgtacccgtgcgtgcccatcacccgcgtcgtcacgtgcgtcgcgtccccctgcggcccctccttcgccagcccaaagtccgacagcttcgccgtgtaatcctgcaaatttttcccatttgacaagtcagcaaatttggcatcaaagtgtgcctattttaatgggtctattaagatggagtggagttgtggagcgacaaaaacccagctacacctctatagtataaatttatggagcagctccgct

SEQ ID NO: 11090 - DNA, 1075 bp, Oryza sativa
  ref <308>: DATABASE ACCESSION NUMBER: AK108438
  ref <309>: DATABASE ENTRY DATE: 2002-08-28
agaaaaaaactcctcctaaacccccgaaaaccctaacctttcgtccgcgccgccgcacgggtcgccatggctctcttcgccgccgctcgccgcgccgccacctccaccctccccctcctccgcgcctccgcctccgccgcggggaccacccgcggcgccgccgccctgctccgccccctggccgccgccgccgcggcgcggccgcagcctcgctcgatgcccttctcgtcggccccctccacgaggcccagctcagatggcgagctcctccgcatcatcgacgccgagatcaagttcgccgaggagagcgacgaccacgaccgggttgaggagattcctgacaacttcccctttaaaattagtgatgaaaagggctttaattcaattactctcacaagaacttaccagggtgagaatattgaggttctagtttccatgcccagtcttgtgactggcgatgaacctgaccgtgagaatgaggctgatgaggacagaaacgaggatgatcaggaggaagaaactcagaaggccccaaaatctagcattcctctaactgtcaccatctcgaagggagaagagggaccaagccttgaattcatctgcactgcctatcctgatgagatcctcatcgatgccttgtctgtgatgccatcagagagtggggaagatgaaatgatcacgtatgagggccctgatttcaatgaccttgatgaagacctgcaaagggcattccacaagtacctggagatgcgcgggattacgcccatggccacaaacttcctacacgagtacatgatcaacaaggacagccgagaatacctcatctggctgaggcggctgaaggattttgttaggaattaatgattaacacaatcatttccttgccataagattagttttgagggctgtgaaccgctcctttctataagtatacatggaccatgaattgtgaatgtatgcttatttaggcgtttaaggtcgttgtcgtgaccaagttttttggcagtatcataatggctcatgagtcatgaacctggatgttggaaccaatggaaatgcttcagttaggatattc

SEQ ID NO: 11091 - DNA, 1202 bp, Oryza sativa
  ref <308>: DATABASE ACCESSION NUMBER: AK108439
  ref <309>: DATABASE ENTRY DATE: 2002-08-28
aacacgccagctcgcacgaccgcgacgagcccacgactcgcaagtcgcaccctccccgaccccgatcggcgcgaagccacccacttccagccctcgccgtcgccgcgccgccgccgccgccgccatggccccgaggccggccatgtcccactcctccgccttcctgctgccctcgccgtccgcggcggcggcgggcgccgacgccgacggcgccgcctacgcgctcctcgtcctcaaccagcgcctgccccgcttcgcgccccgcctctgggaccgcgcgcaggtgcgggtgtgcgcggacggcggcgccaaccgggtgttcgacggcatgccggagctgtttcctggacaggaccccgacgaggttcgccgcagatacaaaccagatgtaatcaaaggagatctggactcagttcgaccagaagtgaaggaatattattccaatatgggtactcaaatagtcgatgagtcacatgatcaggacaccaccgatttacacaaatgtgtagcttttatcactgagaattcggccatccccaacaaatctaatctgtgtatctttgctcttggggcccttgggggaaggtttgaccacgagatgggaaacatcaacgtacttcatctcttcccaaacaacaggatcatactcctatcggatgattgcttgatctttctgctgccaagaacacacactcataacatccatattgaacggtctattgaggggccccactgtggattgattcccatcggcgcgccttcggccaccaccacaaccactgggcttcaatggaatttagataataccagcatgagctttggtggacttattagcacatcaaacattgtgagagaggagagtactgttgttacgatcacttcagattctgacctgatttggacaatatcgctccggcaccactcttgaaatacgtaacacaattgtatcatagttccaattttgtctcatctattttacgtcgttgagttctacccttagtagaagagtgaaaacatacatggcatctgatgtggctaaacctggtgaaatgttaatatgtaacttagaggacttggcacgtctctaaatatataccttgcactgtaattgcacaattttttttttttgtaaacatgtcaccaaattacctgtaatgtaaagaaccagttgtatttgttaagcaaactccatattttcgctt

SEQ ID NO: 11092 - DNA, 877 bp, Oryza sativa
  ref <308>: DATABASE ACCESSION NUMBER: AK108440
  ref <309>: DATABASE ENTRY DATE: 2002-08-28
atctccatccattgtttctgtccttgaccacagcggcaatgggagagagagagagaaaaaaagatacctgaaatccactttagcccggaccattccggccggccggtgagtggccggcgggccccgccaccggcgatgatgcccagccatcctgcgagctttatataagccgcaggtgagggacgctagcttagctcacagcagcgcggcgaaacaagatttgcaaaaactcctaggcttgtgtttgatctcgagtacagcaagtcgatcgagagagtgatcttaattttgtcagtgagaagagatggcgtttctggacggactgtacggcagccggaggaggatggcgacagcgaagggcgccggcgtagcagggaggcggcggtcgtcgtcggcggtggcggcgccgcggccggtgaggcagctgtactggaagctgaggtcgaggttgcggtcgtcgtcgaagaggcacgccggcggcgcggcggcggcgaggttcgggtacgacctgcagagctactcccgcaacttcgacgacggcgtcggcctcgtcgtctccggccaccgcttctaggctctctagctaggtagctcattcggttcgatcccgagatcgcgcgccctgccattgctggagaccggagattattgttctggtctacctgcaactctgcaagtggtattagtgttagattgtactactgtttttttttcatagtgctcatctgggatggcaaaattaatggagaaactacgatcctaacacgctcttgttcatgtattgtgtacatatactgtatggacagtatggtatggaatgtatatatacgtacgtgacacatgaatatattcggttgccataataagcctgaagctg

SEQ ID NO: 11093 - DNA, 897 bp, Oryza sativa
  ref <308>: DATABASE ACCESSION NUMBER: AK108441
  ref <309>: DATABASE ENTRY DATE: 2002-08-28
gcactctcgtctcacaaagtcaacgctcgtactcccagcaaagccatccataatcggagcgggatgatgcaaccattcaccacatccccagtggctcacgctcctagagcaggcaggctctcatggaccggcgcttcgtgccggcccagcagatgctgggtgagagtacggtccatgaggaacgggtctaccgagagcctggaccatctgcagagggcctcaaaggctagaccgcggcagcagcaggggactcccagcgccaggaggagagtcatccaaaccacgccatttgagctgctgcggttgctgaagttgctcatgctactgttgagtccgttgttgttccgtcctctgtcagcgaagatctctcgccagcggtcaaccttagcagtatgccacctcgtctcagatgcaagaataaaggtttcctcgcttggtacggcgcctgtctatcttcgaggcagccaagctcggtccccccacaggaacctagggatatcttcgtctgttcggaacagttgtctgccaacccagttctgtctccacctcaggatcctgatagcacgagatcgccacctccgacattgagtggcccctcagctgctgagcaaatcagaagagctctagcaggtctaagtccagaaggatctattcactctgcttcactctctccaggtcgggtgccagtcattacttccgatgacactactgctgcgcaggactttgcttttggggaaccagatccagttaacatatcaggagacagtgacgatgatattcttgatatctttatcccctttgttgacatgagagtaactgctcattacgccactgcttatgttacccctccatgtgaatgccctggcagagtaattcgaaaagcaatgcaggatgctc

SEQ ID NO: 11094 - DNA, 649 bp, Oryza sativa
  ref <308>: DATABASE ACCESSION NUMBER: AK108442
  ref <309>: DATABASE ENTRY DATE: 2002-08-28
ctgaagttggtattggtattcaggccaatttggatgacgcgaagcgatggtactggcgctcagcggctcaaggaaaccctaaagctcgtgaacgtcttgaagagctcaagaagggcggcggcagaatgcaaaagtccaacatggaccgcgccaagttcaacggcaagcaggccgatggagagtgtgttctaatgtaacatatactgcgatatctgtctcgacttgtgttcgatttcccttatttacattttctttcttggtgccggccaccttttcttggtgctgcacacgtgctgcaagcattttttctacccttctaatgactactaccaccgatgacgagagcaatttcccttcccatttacaagcactttggatgaattctcgcggttggactgtacaatgttttgacctgatgccacgacctacttttttcggagctggctttgacattttgtgaattttctattttctccagcccttcccacctcatgttctgggttaggtgcattactaccatggagaccggtatgactgttatggacactgagggcaaataccctggagccaggcctggctacatttgcatactgaatagaatggattttgcgtgaccttaccattactcttcaaacatatatcaagctgg

SEQ ID NO: 11095 - DNA, 920 bp, Oryza sativa
  ref <308>: DATABASE ACCESSION NUMBER: AK108443
  ref <309>: DATABASE ENTRY DATE: 2002-08-28
gtgcaatgcaaaaaacgaacgcgaagaacacgaatcctccggcgatctcgagcgcaacgatccccagagccaagaaacccgccgctgccgccgtgtcgccgtcgtcgaagttggcgagcagcaacaaggtcaccaaggtgtcgccgccgccgccgcagttgtccgcgctgtgggccgccgcctcgtcgtccgacgaggaggaggaggccgtcgccgtcgccgtcgccgtcgtcccagcgccgccgccgccgcagccggcgagcaagaagggaaagtacgtcaagggccgcgcggcgtccaagaacaagtaccttgtcccccgccgcggcgaggaggatcaggcggcggagggcggcgggaacagcggcagcaagttgatgtccggggcgccggaggagttcggcctgccggcggggacgttcgacgcgttcgcggacgcggagggggaggacgccgccgcggccgcggcgccggcggcgactacgtgcacgtccgcgtgcagcagcgcaatgggcggaagacgctgaccaccgtgcaggggatcggcggcgagtacaactacgccaaggtgctccgcgacctcaagcgggagctctgctgcaacggcaacgtggtggaggacaaggagctcggcaagatcatccagctgcagggcgaccaccgcaacagcgtctccgacttcctcgccaaggccggcatggtccgcaaggacaacatcaaggtccacggattctaagtccagagagatcgtatatcacttgggttttagtataggttcttaattatcagttttgattagtataggttctggttcagtttagcagtgtgtcgtgtctgccgtaatggcttgcagtcgtcaggttgatcatgttaagcctcatacttcttttccgtattggtgtcaatggatgattttaagt

SEQ ID NO: 11096 - DNA, 921 bp, Oryza sativa
  ref <308>: DATABASE ACCESSION NUMBER: AK108444
  ref <309>: DATABASE ENTRY DATE: 2002-08-28
atatatctctcttcagtcttcaccagttgattaattactacgacgccgcatcaaaagctccagcaatggcggcatctcctccgggcgccatcgtgatcaacatggcatcgaacaccaacggcgagtccacggcggtgacgaccaataacttagctccgtcgacgcctaaggccgtcgatgagtccacgacgtcgtcgaaaacagatgtggccacgaagacggtgaccgacaaggtgatggcaagcacggcgaacctggcgcagctgctgccgacggggacggtgctggcttaccaggcgctgtcgccgtccttcaccaaccacggcgagtgcaacgccgccaacaagtggctcaccgccgtgctggtcggcgtcctggccggcctctccctcttcttctccttcacggacagcgtcgtcggccaagacggcaagctctactacggcgtggcgacacggcggggattgaacgtgttcaacatgtcccgggaagaggaggaagcgaagaaattgagtcacagtgagctaagactacggccgctggacttcgtgcactccttcttcacggcgatggtgttcctcaccgttgcgttcagtgatgtcgggctgcagaactgcttcttcgggcagaatcctggcggcaacaccaaggagctcctcaagaacctgcctcttggcatggcgttcttgtcgagcttcgtcttcttgatcttcccgaccaagaggaagggcatcggatacaacgacaatacacccaaccgcaaggccgaggatgtaactaaaaattaaattaaagctcttatatacgtagctaggtcacacgtacatgtctctcaaaaatttcttgttagaatatatatataatgtaattaacaagtatttgattggagatcagttaattaaattatgtcttgtattaatt

SEQ ID NO: 11097 - DNA, 1242 bp, Oryza sativa
  ref <308>: DATABASE ACCESSION NUMBER: AK108445
  ref <309>: DATABASE ENTRY DATE: 2002-08-28
tatacattcaagtattacggaaatgtgagccagcctgagtgggaagtgtgggagcccgaagagaggccatttctgatgatcgtgcggccattcgacgatggaacaggaaacatcaaggccaatacagcgttcctctgcccttcctttgaggccgagcgagcgcggctccttgggatgccttttaccgaagcaattcagatcgtaccgtgggaggagcattgggacccctatatcaccctccagcaatcagacgttttctccgatctgactcgtaagcctcgattgatggttgacgaagaaatgcgcgatttcatccaaagaggattgtcttctgtaggatttgaggttgttggcttgagtggccgcgttgaggaagttcgccagatcaagagctcaagcgaaatcgagattctccgcgctgtgaatacaggaacagtcgaggctgtgcgacaagtgagaaaatgcctctacccaggactgaccgagaacgaaattgctgaagcactggacagcgctctccgtgcagccgggatggatccgttctttgatattgtcctcttcgatgaaaatgcatccaatccccatggcggtactaatgggtccaaggtccttgaggcagaaactttagttctgatcgatgttggggcccatttatacggctactcctctgatatctgtcgcactttctttcctccatttttcgagaagccgttaacggaggaggagaaacagacattcgcaccccatattgcagagaagctcaatgtatggaatattgtcttcgacgcacagacgcaatcaattcatcagttccgggagaatgaaacggccgcaagtgtcgatatagctgctcgcaccgtcatcgaccaggccggatacgaagggaccttcacacatcgcgtgggtcatggaattggaatcaaggcccacgagagcccttacctcaacaagggaaatcacaaaaccttattgaagaccggcatgactttcacctctgagcctggaatctatctggtggacaaatttggggtccgacatgaggatatatttgttgtacaaggcgagggagagcctgaacttttgactggaagacgagctactgggccatgggatccatgaatgaacctgcagaagcgaaggctagggaaaaccttacttcccagcatttaaagtggagataccttctgaagggcctgtattgtatagccttttgtgaccgaagatgatagatactcagatccc

SEQ ID NO: 11098 - DNA, 1223 bp, Oryza sativa
  ref <308>: DATABASE ACCESSION NUMBER: AK108446
  ref <309>: DATABASE ENTRY DATE: 2002-08-28
gatccatggctcccgtcgtctcccgcggcggcggcggcggcgggcgcgcgatgggggcgaaggagcggaaggaggcggcgcagcgcgagaaggaggccggcgacgaggcgtacggcgaggagctgtacaagagggccgccgcccactatgccgccgccgccgacctcgaccccggcgacacctcctgcctcatcaaacgcgccgcagccaacttcagcatgaacaaggtcagttcacttccaatcccacacgcaattccgcggagaaaaccgctccgattcacctcgccgctcgccgccggcgcgtttcagtgcaaggagtgcgtggcggactgcgacgaggcgttggggaggaggaggaggagggacgcgcgctgcggctgcgacgagaagctggccgccgacgcgctgttcctcaaggcgctggcgctgctcaacctcgccgtctgcgccgcggatcacgagccggcgatcacggcgctggaggggtcgctggagctgcgccccggcagcaaggagacgcgggctaagctggacatggcgaagaggaacagggacgcgtttgcggagcaggagcggctcgatcaggaagctgccaagacccaccgagacagaggtttgtgacatttttatttcttcctcttcccctcttgacgaacaaccactaaattcatccctaatcacacacaccatatatatttaaatatgtaattgtgcacatcgatcaacacacagtatgtaattgtgcacatcgatcaacacatcgtatgtaattgtgaacatcgatcaatttactctgtaccgatcactgacgttgttcagtttcaaaaaatcatctgacgttgttgatgttgattcagtcgagtccacaataggatcaggtacccatctatgtggaagaatcacgcgcacacactgctatggagtacttgccatcgcacatgcacggatttgtagtcaccggtagtgagttactactccataagcagagcagctgtcctgctcccatctgtctgttgtgctcttctgtgagtgtttggtgtagtgtgtagcgctttgcgccaatgcttctttctcctcaacgatcctgttgttgattcatgtaaaattgtaaaatgtaatgctttctccacatcttactataatcggtcggcattcttccgccatcccagcgggggaaaaaaactgtagtgcattgctaaaacacacacataggtgttctcc

SEQ ID NO: 11099 - DNA, 838 bp, Oryza sativa
  ref <308>: DATABASE ACCESSION NUMBER: AK108447
  ref <309>: DATABASE ENTRY DATE: 2002-08-28
accaccgcagcggcggcggcggcgattccggcgagcccctctcctcccgcctccggccagtacgctcccaccgcggcggccacggggaacggcacgagctcccgcggcagggcgatggccgccgcccgcttcgccggtgtccctcgccgcgcggcgcagtcgtcgtcgtcgtcgtcccaggcgcccctcgacgagccgcctccgccggcgctgacgcccgagcaggtcggtctatgcagggaggcgctcgagtacttcgaggggatgtgtggccggccggaagccatgtccgacgagttcaggagactccaggtatgtatgtactgtgttcgtccgatttcctcgtcgtcgtgatgtgaatgtttgattgataatgtgttgctgtttcctccctagtttggctaactactagattgttcaggctaattccgtaattgaatacctgttttagcgatcctatattttctgtttgcatcttacaatgcaatttggtctgcttgttcataggttctgtatccccttttgtgttatgtatgttaagtgagtataattttgcatgtaggtttgaaaattactgatcattattactgacacacacaggctgtgacagactagcattaagtggcttttctgagtgaaatgaagaattgtaatcaaagtgacagatgtgcagtccaaattactttgggttatgccctatcttcacataatttatttgttggtgtatttagttatgctttgctttgaagtgaagcactttgattgggttgctttcaactgaagcattgggatgtgatgtgatgtgatacaagtttcagtacatgaagtggtaagctcg

SEQ ID NO: 11100 - DNA, 660 bp, Oryza sativa
  ref <308>: DATABASE ACCESSION NUMBER: AK108448
  ref <309>: DATABASE ENTRY DATE: 2002-08-28
gtgtctcaaatcagatcgagatcgatcgaaagttgaaagctgaaacttgaaaagttgaaagccgcattgcctcccatggcggcgaagaggaaggagccggagacggcggcggcagaggaggacccgtcggactggatcggggccgtggcgagcgtgttcaggatgcttggcgagatgagggagcgggagaagagggaggaggaggagctgcgcgaggagagggagctcgccgcgtgggtggcggcgacgagggccgagagctacgccaggttcaacatgcgcttgccgacgccggaggaggaggcggcgttcgcccgcgaccatgcccacgagatagacttgtccgtcctcaggccggaggactacggagagagcaagcgcggcgtcggcaacgatggcatcctccgtcgcctcgactaggcaatactaataatcaaatcaatcaatcaatctcgatccacggattttccagctagttagctaggttaaccgattcatgtttcaaaatcctagtactatgtcgcagcttgtttatcccgtagtgtgtcatctgatgacttgcttttagcatgttttttgattctgttaattttgatcaaggtgaaatttgtcacacatctgtcatgcattactattatgctataaacatgaaaatttgac

SEQ ID NO: 11101 - DNA, 1439 bp, Oryza sativa
  ref <308>: DATABASE ACCESSION NUMBER: AK108449
  ref <309>: DATABASE ENTRY DATE: 2002-08-28
acagcatttgtcttggctgcattcagaatgaatttgagagcatgaatttctcgatcagaatcatcagagattgattttttttttttactgatgatcattgtttccatgttgtttatgatctctccagatttacgcggtgtcgattactatccgtattgtgcttggattcatgctgattgctctcatctggaagttcgatttctcaccgttcatgatcctcgtcatcgcgatcctcaacgacggaacgatcatgacaatatccaaggacagggtgaagccgtcgccgcacccggacagctggaagttgccggagatcttcatcaccggcatcgtctacggcacctacctcgccgtcatgaccgtcctcttcttctgggccatgaggagcaccgatttcttcaccagcacgttccatgtgaagccactgatggagaaggacgagatgatgtcggcactgtacctgcaggtgagcatcatcagccaggcgctcatcttcgtgacgcgctcccgcagctggtgcttcgtcgagcgccccggcatgctgctctgcggcgccttcgtcgccgcgcagatcatcgcgacgctggtgacggtgtacgccaccttggggttcgcccacatcaagggcatcggctgggggtgggccggcgtcatctggctctacagcatcgtcaccttcctccccctcgacatcttcaagttcgccgtccgctacgccctcagcggccgcgcctgggacaccctcatcgagcacaagattgccttcacgagcaagaaggattacgggagaggggagagggaggcgcagtgggcgacggcgcagaggacgctgcacgggctgcagacgccggagatgggggaccacctcggcggcgtcggcggcggcgagcggagcagctacagggagctctcggagatcgccgagcaggccaagcgccgcgccgaggtggcccggctgcgcgagctcagcacgctcaagggccagatggagtccaccgtcaggctcaagggcctcgacatggacaacgtccagcaccactacaccgtctgaagtccaccgccggcgagctcgctcgccggagaaggaggaggctccgccgagctcgctcgccgcggctattttcaggggcagcgtgcatgcaattgagcctctcctcgtcgtcgtcgtcgtctgtaattccctttttttttatattaaattttaaactttggtttgaggtctagtggttaattgagttgacggtttgagggtttgagtttgtccttaatttggggttctgcttgaattatgacctggcattacctctcattagatttgtggttaatttcctctaattgcttggaaataattgagttgttaccgtgctttacagtacttggtatgaagttgttgaatctaatagtttccctttgtttgatttggggaaactattctaatc

SEQ ID NO: 11102 - DNA, 1083 bp, Oryza sativa
  ref <308>: DATABASE ACCESSION NUMBER: AK108450
  ref <309>: DATABASE ENTRY DATE: 2002-08-28
acaactaaacccctcgacactttttttttttttttgtcgccgagtattcgtcgtccccgacgaccacgaaaaaccgctaggaaaacatatttgggtttcttgatccatccgattcccgatcccaccaccacccgccgctttaataccctcctgcccatccacccctcttcccggcccctcgccgcgccattagcggaaggttttgctttgcgtcatccaggatgggcaatctgatctcgtcgggcgcggtggtgggcgcgagcggcggagggaaggtggtgatggcggacgggagcgtgcgggcgctcagcgagccggtgtcggtggcggagctgatgatggaccacccgcgccacttcgtcatcgacgcgcgcgacctgcagcagcagcggcggcacaaggggaaagctggggctcctcctcctccagggggcaaggtcgcgccgctgccggccgaccacgtgctgggcgccggcggggtgtacgtcctgctgccggccaccacccgcggcaaggtgtcggccgaggaggcgcgccgcgcgctgacggcgtcccggtcgctcgagcggtcgcggtcaatgccgggccggctgaggaggaagctgtcgtccaagaagatgacccaggaggctgacaacgacggcaatgcgtccgagaaccacgcggcggcggcggaggcggagaggagggaggagacggcggcggcggcgaggccgccgccggcggacgggttcgaggagcaccggccggagttcctgagcagggagctgtcgagcagagggtggaagccgagcctgatcaccatcgaggagcgcgtagcgccgaagaaggtgtcccattggctcttctgagttctgacctcgtcgccgacgacgacgagatcaacaggaagcttcttaatttgacttgtcatctaatctctctttcttctctttttcttctttcttgctgatcctctgctgaatgcttgtcaattgtcatcatctagtccgtcaaaatgcatgcactgatgtacgcataatggcatgttgtaatgagatagcacaaatgaaatgtgcactgtaattacaaactttaattagt

SEQ ID NO: 11103 - DNA, 739 bp, Oryza sativa
  ref <308>: DATABASE ACCESSION NUMBER: AK108451
  ref <309>: DATABASE ENTRY DATE: 2002-08-28
aagcggctgcagcagaagatgagcgccaaggagtccgacacgtggtccaaggtcatccgccaggaggaggccctcgaccgccgcctcaagacctcgctgcacatcaccctgctcgacgccgacggcggcgaggaggacgacagcgacggcctggaggacgtggtgcgcggcgccgcggcgcaggacaagcgcaagcgcgagtacaccagaagcggtagcgggagcagcagcggcaactccggcggcgggaagttcccccgtggggggagcggcggcgccgatcatcatcagctggccgtcatgctaccggagctcgcggcggcggcggatcaggaagggcggagcccgatcaacgagctgatgaagctgtactacagctgcctgcagcaggaggagggggcggccgacggcggcgaggcgggcggcgaggggtgcgacgtggcggcggcggcgctggccgttccgccggaggtgctggccggcgtggatgaggtggcgcaggacgtcctgttcgacctcatcgggagctatccggaagtggacgacgtgttgcacttcatggacgagtgacgacgtggcgcccttgggccccaccacgtgtcgccgcgcgattgtccgggtttgggcgggagaagctatagtcaggttgatgctgcatttgctggcgctctagtgctgctactagctagtagtactggttaaactaagttaattaagcatgtgctgctgctgtgttgct

SEQ ID NO: 11104 - DNA, 1262 bp, Oryza sativa
  ref <308>: DATABASE ACCESSION NUMBER: AK108452
  ref <309>: DATABASE ENTRY DATE: 2002-08-28
atcggtcggtctcggtcgctgccgtccctgtgcttggagtagacacgagccggtgacgcgcatatcgtcttctgctcgagatcgatcgatcgatcgcttggttggttgctgcgactgcgagggaggccgcgggtggtgaggaggattgtgcaaaaaaaatggggcgcgcgccgtgctgcgacaaggcgagcgtgaagcgggggccgtggtcgccggaggaggacgagcagctgcggagctacgtccagagccacggcatcggcggcaactggatcgcgctcccgcagaaagcagggctcaaccgctgcggcaagagctgcaggctccggtggctcaactacctgaggccggacatcaagcacggcggctacaccgagcaggaggaccacatcatctgctcgctctacaactcgattggaagcaggtggtccatcatcgcgtcgaagctccccggccggactgacaacgacgtcaagaactactggaacaccaagctcaagaagaaagccatgggcgccgtgcagccgcgcgccgccgcctcggcgccgagccaatgcacgtcgtcagcgatggcgccggcgctctcgccggcctcctcgtccgtcaccagctcgagcggcgacgcctgcttcgccgccgccgccaccaccaccaccaccatgtacccgccaccgacgacgccgccgcagcagcagttcatccgcttcgacgcaccacccgcggcggcggcggcggcatccccgaccgacctcgcgcccgtgccaccaccggccaccgtcacggcggacggcgacggcggctgggcgtccgacgccttgtccctcgacgacgtgttcctcggcgagctcgcggccggcgagccgctgttcccttacgccgagctgttcagcggcttcgccggcgcggcgccggacagcaaggccaccttggagctctcggcgtgctacttcccgaacatggcggagatgtgggcggcctccgaccacgcctacgccaagccacagggtctctgcaacaccctgacataggaggacacgctaaaacctccattgaattcttgcgtagctgcgaacgcaacggcgatcgatcgatgcgtcgccacttgctactagcataattcttgctctcttttttttttcaatttttttctcttcttcgagtggcccattctctagctggcgttttctcgtgtattatgagtgatcgattattacatgtaaattaatccatagatgtatctgcactgatccaaattctccagc

SEQ ID NO: 11105 - DNA, 1318 bp, Oryza sativa
  ref <308>: DATABASE ACCESSION NUMBER: AK108453
  ref <309>: DATABASE ENTRY DATE: 2002-08-28
aaaaacatgccaatgccatcccccacgcgtcggcgcgccccacccatctccacactttcctcatcccacggcgcccatgcccaccacctgttcgaccacctgacacgcctgccatgcctcccgccctcacctccaaccccccctccttccgccccctctccacccctctaacccgccgccgtgccgccacaaccttcctctgccgtgtcggccctggcaagccttccaaggacaccggcgcggatgacgagccgaagaagaggtcgttcttcgccgatttcggtaagctctcggatggaaggtcgctgataccggccttcccgccggccgcggctgggtctctgttcgccggcgggagggggaggaaggacccgcagacagtgttcgtcgcgggcgccacggggcaggcgggagttcgcatcgcgcagacgctgctgcggcaggggttcgccgtgcgcgccggggtgccggacctcgcgtccgcccaggagctggcgcggctcgcctccgcgtaccggctcatttcccccaccgaggcgcgccgactcaacgcggtggagtccgatttcgaggaccccgaggcgatcgccaagtccatcggccctgcaactaaggtggtggttacagtcggcgcagctgagaaggggcccgacggcggtgtggtcaccaccgacgaggcgctccgagttgtgcaggctgctgaccttgccggcgtgacacacgttgtggtggtgtacgacctgggggccggtgaccccagtggtgagtcgacgtacaatgtgctcgacgggttcacgtccttcttctcgaacctcttctcccgtgtgcagtccttgccactaaacgagttcttggctaaggtggtggagaccgacgtcaggtacactctcatcaagacgtcactcacagatgactacagccctgagagcacctatggcttggtcctggccaaagagggcgcgtccagcactacttcctcaacagaaaccggcaaggtgtccaagttgcagattgctggtcttgtggcagatgtcttctccaacgtggcagtcgcggagaacaaggtactggtttacatgtgccatatgttcaacctttgcatgccaacgcatttgaaagcatcattgtaattaggcactctgttctgttggtagttctgccctggtagtcccacgaggaacttgtatggaacaggaaggttcttgtgattagtcagaactcagaagtagattgcctcgcgtttgtggttactatattcatgacagacactgttaattagatgtgtcaatttgattaaagagaacatacatacttgacc

SEQ ID NO: 11106 - DNA, 917 bp, Oryza sativa
  ref <308>: DATABASE ACCESSION NUMBER: AK108454
  ref <309>: DATABASE ENTRY DATE: 2002-08-28
ttgcacttgtagttgtagcatgggaggagctacaaacttacctccaggtttccacttcttcccctcggatgaagagctcgtcgtccatttcctccgtcgcaaggtctccctcctcccatgccaccctgacatcatcccgacgctgcttccgcatcggtacaatccatgggagctgaatggcaaagcactgcaagctgggaaccagtggtacttcttctgccatctaacacaaagtaggacctcatccaatgggcactggagccccattggagttgatgaaacagtaagaagcggcggccgcaatgttggcttgaagaaaacgctgctattctccattggagagccctctgaaggcatcagaaccaactggatcatgcatgagtaccatctgctagacggggattgcgtcgctggcggtagcagcaacttgactagctcgagctctaacaggaggtctcataggaagagaggccactcaagcatggagtccaacaactgggtgctgtgccgagtgttcgaatcgagctgcggttcacaagtgagcttccacggtgggggcaccgagctttcatgcttagatgaggtgtttttgtcactagatgactacgatgaagtaagtttgccgaataaatagaaatatagaacctagctaagtcagtactcgttagagctgacagtaggtcctatgcctatcaaaccatttgattagctatggccgggttatgttgatgatatctatacataatctgttgcattatgaataattaaatggtctgggaggcattgaacccaatccagtccatcctagataattaccatgtaattagttatcccccaacgagtatgttgggcttgtgtcagacaactgtggcatatgtgtgaagcacaagtcgcttctaaaaagatgagtttttttt

SEQ ID NO: 11107 - DNA, 1242 bp, Oryza sativa
  ref <308>: DATABASE ACCESSION NUMBER: AK108455
  ref <309>: DATABASE ENTRY DATE: 2002-08-28
ccaaatcctcttctcccatccgcttccttctcctcctcccccgcccatggcgtcctcggcggtggcgagccgcaagcgcgcggcgccctacgatctggagccccgtgcctgctgcggatcctccccggcgagcgggccgaagcggcggcggtacaacttcgggagcgccgatgactacgagcgcctcgacgtggtcggccagggcgggttcggcgtggtgctcagggcgcgggatcgccgcaccggcaaggtcgtcgcgctcaagcgcctcatcggggcggacgagggcggccgcttcgcccccgacttcgacgcgctcagggtggaggccgcctgccagcacgcctgccgcggccaccccaacatcgtccagatcaaggacgtcgtcgccgacgccaagacaggtgacctcttcctcgtcctcgagttcgtcggaagcagcctccgggatgagttccccagggcccacccggaggacatcgtccgcgccatgatgcggccgctcgtcgacgccgccaagaagatgcacgcctcgcgcgtcatccatcgggacatcaagccggagaacatccttgtcagcttctccgggcagctcaagatctgtgatttcggggccgccacgctgatgaagcccgccgggaagccgtacgacctgtgccgccccggcacgctgccgtacacctcgccggagcagctggccggcaaccggtgctacggccccgcggtggacatgtgggcgttaggatgcatcatgggcgagctcctcaccggcgcgccgctcttcggaggcgacatgactgaggaggagctgctcgccgacctgtccgccaacctggacgaccagctcaacgagctcttctatgatgtcctgccggagctgtcgccggcggcgcgcgaggtcctgtccgggctgctggcgttcgacccagagaagaggctgacggcgtcggaggcgctggagcaccggtggttcgccgaggagcccaagaaagcagagttccctggcttcgtgcctctcttcggttagtctgtcagtgtagagtgttggtttcagattgtcagtctgcatgtaacttactagaactgttagtctgcagtcttgtctttaaattagaactgatgattggtagtcttgtttaggactgatgattgcattagcaaatcggcattgcaatcagtgtaatctttttattccgatttattcatagtatgcatatttatgtaatcttattcaatttgtat

SEQ ID NO: 11108 - DNA, 859 bp, Oryza sativa
  ref <308>: DATABASE ACCESSION NUMBER: AK108456
  ref <309>: DATABASE ENTRY DATE: 2002-08-28
ggtaaaattaaagagacaaatgcaagtcgtgagtcaccccgaatcctcaagcctactggtgagccaaacccatccactggtggcatacggattcagaataatcggcaagagcaacctgcagaaatgaccattttccatccatggaaaaacattactgatagaacatcagcttatgagctaagccatattgacaacttggttaatcatgaagatgatgagacaaagaggcagaaagaacagagtgttcacatcactctgttgtatgagatcaacctcatcaacgaagagcttttcgataccgtgatcagtatcaccggtcacaaacatggtgggacagtgatcaaattcagctacaatgcagtgtctcttgcacaagacatggagctaccatttgcagcatacggaacgtctcctctcaagccggcgaagctatttgtcccagctgattatcctcgaagctccccggtgtacgaagatggtgatgaacagcaccagggaatgtacagcgtgatttcaggcatggttgacaaggtgttccagcgtgccctgcgtaaactcccggtgccaatgtcgatcagggacatggcccggcagtggggcatctccgtgcgaacggtcaccaacggtggaggaacgttcggctccgggtatggccagtgggagagttgcaccgatgagtttgcaagtccatagtccatggatagacccatgaagttttgcaggaacaagtgatatgaagaataatgctgatctgctgttttgctgtagggcagatgcagaatccagtgtgagtgttgtgagagaatatttatatttttgttatgcattaagaggctgtgtggatcatctgtttttgatt

SEQ ID NO: 11109 - DNA, 971 bp, Oryza sativa
  ref <308>: DATABASE ACCESSION NUMBER: AK108457
  ref <309>: DATABASE ENTRY DATE: 2002-08-28
gctatagctagctagctccagctcccatggcgacggcggcggagaacaagaacgagccggcgcggccattcgcggtgccatccccgtcggtccacccggcggcgaccggcgtgggggaggaggaggaggcgcaggcggcgacggggtggcggtccatgcagtacctccggaagcggcggcgcgcgctctgctgctgcggctgctgcgtgaccaccctggtcgtcgtcggcctcgtcatcctcgtcctcgcgctcaccgtgttcagggtgaaggacccccgcatcaccatgaacggcgtgtgggtgacggccatcagcaccggccccggcaccggcgccggcatcgggagcaccgtggcgaccaacgcgacgctcaccgccgacgtctcggtcaagaaccccaacgccgcgtcgctccggttctcccggagcgagacggacgtgtactacaaggggaagacggtgagcgtggcgtacgtccccgccggcagcgtcggcgccgaccggacggtgcggatgaacatcacgctcgacctgctcgccgaccgcctcgcgtcggtgctcaacggcacggggctgatactcgggcaggagtacgacctgaccacctacacggcgatgagggcgagggtcagcgtgctggggatcatcaagaagagcctcgacgttcggatgaactgctcggtcatcttggacgtcgccggcatcgccggcgtgctgctgcccggggacggggccaagtcgggcgtgcagactaggagcgtggattgcgttgcaatcgtgagctgatcagcggttttcttgtgtgagtactgcattgtcattacagcacctcattacatatgaatatgtatttttctggatgtatattctgctactctcgtatgtatgtttttctggatatatattatgctactttcgtgtgttcacagatcgaattctctctaggaaataatacccaatagcattatt

SEQ ID NO: 11110 - DNA, 755 bp, Oryza sativa
  ref <308>: DATABASE ACCESSION NUMBER: AK108458
  ref <309>: DATABASE ENTRY DATE: 2002-08-28
tcaatggttctttaataaattgtgtcatgattaccacttatctggttgtcttattttctgacagagcctattaagcgaaagcatccaaatatcacttatgctgatctttatcagcttgctggagtggttgcagttgaagttactggaggtccaaccgttgactttgttcctggaagaagggactcatcagtttgcccgcgagaaggacgtcttcctgatgcgaagaaagggaaaggcacatcctgaaagatctggatttgacggtgcatggaccaaggaaccacttaagtttgacaactcttacttcctagaactgctgagggaggaatcagagggacttttgaaacttccaactgacagggctctcctggaagatcctgaattcaggcgctttgtggatcattacgcgaaggatgaggatgccttcttcaaggactacgctgaatcacacaagaagctctccgaacttgggttcgctccacgtagctctgcaaaatcagatggttcaacggctgctgctacactcgcgcggagtgcgtttggggtcgcagttgctgcagccgtagtagttatcgcaggttacctctacgagtcttctaagaaaaccaagtagagattggttgggttctaaacattgatttgcaattgctcaacagcagaatcaatagcatcaggaataaagttttcagaaacaagtgtcatcaggaaggatgttcaactgttttgtggccagctatgaaatgacagtttaagtg

SEQ ID NO: 11111 - DNA, 1449 bp, Oryza sativa
  ref <308>: DATABASE ACCESSION NUMBER: AK108459
  ref <309>: DATABASE ENTRY DATE: 2002-08-28
acatgtctgtgaagatgcggactacctgcacctggacagaaagaccctatgaagctttactgttccctgggattggctttgggcctttcctgcgcagcttaggtggaaggcgaagaaggcccccttccgggggggcccgagccatcagtgagataccactctggaagagctcggattctaaccttgtgtcagacccgcgggccaagggacagtctcaggtagacagtttctatggggcgtaggcctcccaaaaggtaacggaggcgtgcaaaggtttcctcgggccagacggacattggtcctcgagtgcaaaggcagaagggagcttgactgcaagactcacccgtcgagcagagacgaaagtcggccttagtgatccgacggtgccgagtggaagggccgtcgctcaacggataaaagttactctagggataacaggctgatcttccccaagagtccacatcgacgggaaggtttggcacctcgatgtcggctcttcgccacctggagctgtaggtggttccaagggttgggctgttcgcccattaatgcggtacgtgagctgggttcagaacgtcgtgagacagttcggtccatatccggtgtgggcgttagagcattgagaggacctttccctagtacgagaggaccgggaaggacgcacctctggtgtaccagttatcgtgcctacggtaaacgctgggtagccaagtgcggagaggataactgctgaaagcatataagtagtaagcccaccccaagatgagtgctctctcggagccaagccctaggctcctcctctcctcccaatccccaatccctgttcggcttctccttcctcccctccgcagccgatcgcgatggaaccctgagctacgtggttggtgcttcaccgctggagtagagttctactatagtagggtttgggggcggcggtctcggaggagggaggaagcctttggccatggcgagcgacgtgcccatgagcccggagctcgagcagatcgacggcgaggtccaggacatcttccgcgccctccagtgagccacatctctccctcccctgttactgttactgttactcttctcttctgttcagtacttactagtagtactattaatatgcgcacacacaactctgcgctgaggccaacccacgctggttcaatcgttgtttctatcttctttactccctcctgttttgagccaactggatgcctaatctgtcccaagcgatcgtcagattgtttgctccggtgcgatttcaacgattttaactaaatgaatttggataatgatagtatacttcgacttgttttcggaacatttagataccaaattgtctgataacatgcgcgccttgcaaattgaactttttggactgcttgagtatccgacaaacatatatttttgacagcctgatgtataattcagtattctttttttttc

SEQ ID NO: 11112 - DNA, 1144 bp, Oryza sativa
  ref <308>: DATABASE ACCESSION NUMBER: AK108460
  ref <309>: DATABASE ENTRY DATE: 2002-08-28
caccaaatgatatcacttttcttgcagtcctatcggtatgtagccatgttggactgactgatttgggccgctggtacttcaaaactatggtgtctcagtacaagattaagccacgagttgagcactacgggtgcatgattgatctacttggccgtgcaggttgtttgatggaagctcgtggtttaattcaggatatgcctttcaaggcaaatgcagcaatatggggagctcttcttgctgctgctcgtactcacggtgatacagagcttggagaacaagccttgttgcatctaattgagctcgaacctctcaacagtgggaattatattctcctatctaatatatacgcagaacaggagaggtgggatgctgtgagagaacttcgaatatcaatgagagatagaggattaagaaatgtgccaggggcaagttctattgatgttgatggcatggttcatgagttcacttccagagatggctctcatccttccttgcataagatacgtgaagttctatgtgcaattaacagtaacataaaatccgtcggtcatattgcgctgctccctgaaagtttgcatgatgttgaagaagggtgagatgaacatcatctagtgtgagcattgttccatcacatgccaagtgtgcacaattgaagttttgttaagattgatggcatggtttacaagttctcctagaggttaaaccccatccttccagtcagactcagactgatacagaagatacctgatgcaatgcttcatactgaatcattgtttccagcaaaacaaaagtgatcactatgccttaatgccttgatggtaaaacagattccaatgattatgctcatattctacgaagcacttgtttgtattgaaggaggacaacatactttggtacactcagaaagaaacatatttgccttgtgtgataagtgaacatagctgataatttagagaatgttttaaaggagtagtttttcgccaactcattgcatgcacaacagcacaaggttgaaactcaagagtagattcttgattgactagttgtttgatgtgagatttagtcttcttataggataaaagttggccaagcctttcttcttcagttaaaggtacgggcaacatctaaacagaagttttttttt

SEQ ID NO: 11113 - DNA, 986 bp, Oryza sativa
  ref <308>: DATABASE ACCESSION NUMBER: AK108461
  ref <309>: DATABASE ENTRY DATE: 2002-08-28
aagaaatatgtggcttaggaggggctgaagattttgcagagtcgagttctgctcaacttgcttacagggattctcaggctgagtcactgaaggattcacttagcgctgttcgtaaatcaacgcaagctgcagccaggatatttcaagcttttagggtggagtcattccacagaaagaaggtggttgaatatggagatgatgattgtggattatcagatgagcgcactctttcacttgtatccattaaaaatgccaaacctggacagaacgacgggtcacattctgctgctgttcgtatccaaaataagtttagaggatggaaaggtagaaaggagtttatgattattcgacagaaaattgtcaagatacaggcccatgtacgaggacatcaagtaaggaaaagctatcggaggatagtctggtctgtaggcattgtggagaaaattatattgaggtggaggagaaagcgaaggggcctgcgtggtttccaaccggtaaaacagcttgaaggtccatcaccgatccaacagcttgaaggtccatcgcagatccaaccagcaaaggaagaggaagaggatgaatatgattacctcaaagatggcaggaagcaagccgaaggcagattacagagagcactagctcgtgtgaaatcgatgactcaatacccagaagcaagagaacagtacagtagaatcgcaaaccgtgttacagaactgcaggagcctcaggcgatgatgattcaggatgatatgcaaagtgatggagctattgctgatggaggcgacttcatggctgaactggaggagctatgcggggatggggacgcaccaatgcccaccattttgtgacattgaggagttttactagatcagttaggctgcgacctctgttctttaccaggctagctgtaaattcttgtgctagatgttcagtgctcaccgttcgactctatatagcgttatacctaataccatgcgacttctatt

SEQ ID NO: 11114 - DNA, 755 bp, Oryza sativa
  ref <308>: DATABASE ACCESSION NUMBER: AK108462
  ref <309>: DATABASE ENTRY DATE: 2002-08-28
cagtgcaccgagcgtgatgaattctcctaccaggagatgatcacccacctggcccttaactcccaccccaaccctaagaaggttcttgtcatcggtggtggtgacggtggtgtcctccgtgaggtcgtcaagcacgcgtccgtcgaggaggctatcctctgtgacatcgatgaggctgtcattcgtctctccaagaagtacctccccggcatgtccgttggcttccagcaccccaacgctaccacccacgttggtgatggcttcgagttcctcaagactcacaagaacgagttcgatgttatcatcactgactcctccgaccccgagggtcccgccgagactcttttccagaagccctacttcgagcttctgaacgatgccctgcgcgagggcggtgttattactactcaagccgagaaccaatggcttcacctctctctcatcgctgacctgaagaagtcctgcaaggaggtcttccccgtcgccgagtacgcttacaccaccatccccacctacccctccggccagattggcttcatggtctgctgcaaggacgccaaccgcaacgtcaaggagcccgtccgctcctggacccgtgaggaggaggagaagctgtgccgctactacaaccaggacattcaccgcgccagctttgtcctgccaaacttcgcccgcaaggctctgggcaactaaatggttcctatatatgggttcgctctgaaaagttagggtaatgaattatatcatgatgaatg

SEQ ID NO: 11115 - DNA, 815 bp, Oryza sativa
  ref <308>: DATABASE ACCESSION NUMBER: AK108463
  ref <309>: DATABASE ENTRY DATE: 2002-08-28
aaagcgggcatggatggccgcgatgtcgctggagagcctgtggcggacgcgcagctgggtggtgatgccggcgaggaagccgacggcggcgcgcgaccagccggggtagcgggacaggtcgacgcggacggcgtagtcgtcgagggcgtcctcggcgctgaacgcggcgtcgcggttctggtgcacgagcacgcgcatgagctcgccgccggcgtcggccgcccgcctctgggggtccgcctcctggaggaaggccatcagccacatgagcttgtcgcggaggcggttgatctcgccgccgacgccaaccagcgccctcccctcgctcagggccacctcctgaagcttgctaaccagcggcagcaccaccgccttcgccatcgcgagatctctcgtcactccactgattcactcgctagctagctacgactagcaggggcggattcaccgttggggctcgttggggctcgttggggcttgagccccagctccatctcggcagaaccagcagcagccgcatggtttcgggagagaagcagcgtatagcataagtgcagatcaaccaggtcgcaaggaaggagcaaacaaagacaacatatcgcgatccatgggtgattaagtggactaattggctgctagaccttccttattaagctactgtattagtttttgtttctttttttttcctacttcaatggatggaacgatcaggggattagggaagtgagtggtttttactcacaaagtaatccaacaattatcaacaattgtgttattgaatttgtggttgtgcccttgtcgtattgtcttccatc

SEQ ID NO: 11116 - DNA, 1103 bp, Oryza sativa
  ref <308>: DATABASE ACCESSION NUMBER: AK108464
  ref <309>: DATABASE ENTRY DATE: 2002-08-28
atccaccacccacccatccaacaccacccttctccaaagctgcaaaatccaaagcgagaaaccgccattgccacccacctcgattccgctctcgatctcagctcactgctgcattgcggctgtcgctgtcagctcggatcggcgccacggaggccaccgcggacaggagggccgtgcagccggccggcggcggcatggagcccgggttcgggaagcggctgatgcacgtgctgcgcgcggtgtaccacatgctgcggcgcgggctgtgccggaagcgcctcatgatggacctccacctgctcctcggccggggcaagctcgccggcagggcgctccgcgacgtcctcctcgcccaccagccgcacggcggcgcggctgccgtggcggtcatgggaggcggcgccggggtggcgcggggtggtgactcgtcgtcgtcgccgctgtcggtgtcgttcttccaccacaaccccagggacgtggagttcagctgcaccaccacgccgtcctacgcgccgggggtcttccccttcaggttccgcggccgcggcggctcacgccacgccggcggcggcgccagcaactacggcgggctcgacgcctccgccgtggcccgcgtcttcgagatgctcaacgccaacgccgcggctgctgctggcgccggcggggagacgccgctgtcgtcgatgcccggcgccacgccgtccccgttgctggcgctcagcctcggccgcagccccgccgggacgcggcagctccgcgtcaccgactcgccgttccccgtcgagccgccggagggcgccgtcgacggccgcgtcgacgacaaggccaccgacttcatcgagtggttccgccgccagctcctccagcagcaggcgtccgccgcgccaacgccggactaccgtggctagcccgccgaccgccgccgccatcgccgccgcggcatgggcgagcgagcgcgaatactaaagcacgagaagcttatatatatatataagggactatgtggcgtcaaaattgtttcactgacatgtgggtttcgagtttttctacctgcatggctgcgtgtaatttttcctcggttaattaatttcctcgcttgtgat

SEQ ID NO: 11117 - DNA, 849 bp, Oryza sativa
  ref <308>: DATABASE ACCESSION NUMBER: AK108465
  ref <309>: DATABASE ENTRY DATE: 2002-08-28
gaagcccccgccgacggcgacaagtgggcaatcacgctcgccaccgacttctccacgcccaagcctgacgtcgtcgccggcgccggcgccggcgacgacgacgacgacgtgtccatggactcgatgtggcagaccatcctccagagcggccgggcgcggccggtgaccgtgccgaagagcgagacgtgggccaccaccaccgacgagcagcagccgcggcgccgggagcgcgccgcggcggcggccgtggcgcggcgagagatacgcaagtcggcgacggcgaccaacatgaccccgccgccgtcgccgccgcacgtgcgggcgccgccggcgccggccaggcggccgtggcgcaccagggacgtgctcccggcgatgcccaacgacgagctgatgcgccgcgccgagagcctcatccggcgccaccacgagcagctgcgcctgcagcggcaggagtccgagcagcgccaggccctggagctgcagcgccgccgcccgctcatccgcgtgtaagtccgccgccgccgctcgccgccggcgacgatgcatgcatgcatgcaaggcggtgtgtacagcagtagtaaaagcttaggcagcagggaggacgtggccatggttgtgtgtgcagcggtttgatgcactggccacatagaccttgatcctccaataattattagtaggttaattagagtaattaggcttaaaaaaggtttagatttaggtttgatctgcatgactgcatgcaagattatgcttgcattttgagtgccttgatgatctctgcataggggattaatgtaactcgatctctatgaatggagaggtaattaagagcacttgttttttttg

SEQ ID NO: 11118 - DNA, 1056 bp, Oryza sativa
  ref <308>: DATABASE ACCESSION NUMBER: AK108466
  ref <309>: DATABASE ENTRY DATE: 2002-08-28
gcagggccttctcccacgcggccgcgccatcacgtccgccgctccctgtcttccgtcccctccaacacaccatggcgccgccgcagcagctggtgttcgcggcctcttccaccgacgccggcgttgccgcgtgggacctccgcacgggcgccgaggccatccgccaccgcacctgcgcctcccgcccccgcgctctcaccgtcgtcgccggccgcttcctcgccgcctcccaggcccccgccggcaactcagcacccatccactactaccactgggacaagccccaggtggccgtcaagagcttcccggttgagccgatacgcgcgctcatcgctgatccggaggggagctacctcatcggcggtgggatctctggcgacatattcttttgggaggtggctagtggggagttgcttgtccagtggcatgcacattatcgtgctgttaggtgccttgcactctatgactttttgcttgtctcggggtctgaagacggtagcatcaaagtttgggatctcctcacgatgcttgatgagcaatcaagattggaggcaaagacacaacacatatacagctttaatcagcacgcacttcctgtaaccgatgttgcttgctgtcatggagcaattgctgtatcatcttcagaggatcacacctgtaaaatttggagtctatccgagggtagaatgctaagaagcatttcatttccttctattactgattcagtggcgttagacccaaggagtcatattttctacgctggtggtcgagatggaaagatatatgttactgctatgggaattgatgtcacctctcctagtagtgatgattcaactattaatggggctttggatgaccataggtttgcctactccttgctttcattagcacctcttatttatcctgtgatgtaaacagcttcaatatacaagttagagtttgatatcttgtagtagtagagtggttataaacctatcttacctgttcatgctttaactttggttgtatccatcctagctcgaccagtttgtttttaatgaaaacattttttttttc

SEQ ID NO: 11119 - DNA, 1121 bp, Oryza sativa
  ref <308>: DATABASE ACCESSION NUMBER: AK108467
  ref <309>: DATABASE ENTRY DATE: 2002-08-28
aaaacccctttcccaaacaatcccccaccggaaaagcaggcgaacccccatccatcgggatccatggccggcggcgggcaggcggcggcgtcgctgctgacgaagctggcgcaggcggcggccgggctgggcatcgcggcgtcggcggcgtcgacggcgctgtacacggtggacggcgggcagcgcgccgtggtcttcgaccggttccgcggcgtgctcccggagacctcgtcggagggcacccacttcatcgtcccctggctccagaagcccttcatcttcgacatccgcacccgcccgcacagcttctcctccacctctgggaccaaggacctgcagatggtcagcctcaccctccgcgtcctcgcgcgccccgacatcgaccgcctcccggacatcttcacctcgctgggcctcgagtacgacgagaaggtgctcccctccatcggcaacgaggtgctcaaggccgtcgtcgcgcagttcaacgccgaccagctcctcaccgagcgcccccacgtctccgcgcttgtccgcgactccctcatccgccgcgccgccgagttcaacatcgtcctcgacgacgtcgccatcacgcacctcgcctacggcccggagttctcccaggccgtcgagaagaagcaggtggcgcagcaggaggccgagcggtccaggttcctcgtcgcgcgcgccgagcaggagaggcgcgccgccatcgtccgcgccgagggggagagcgaggccgcgcgcctcatctccgaggccaccgccgccgcgggcaccggccagatcgagctcaggaggatcgaggccgccaaggagatcgccggggagcttgcgcgctcccccaatgtctcgtacatcccggccggcgacagcagccagatgctgcttggtctcagcggcgctcggtgaatgaatcatcatctttccctttagtcagttgcattaccttttagatcttattatcacttcatggtattattggatcccataaattttccactgatggagatgaattgtcgaacaattgctgcatttgtcttgcccaaaatatgtggcaatttgttgaattttgtgatccttcaaccactgcaatgcaggaatcttatatttagaaatct

SEQ ID NO: 11120 - DNA, 1068 bp, Oryza sativa
  ref <308>: DATABASE ACCESSION NUMBER: AK108468
  ref <309>: DATABASE ENTRY DATE: 2002-08-28
caaggtcagggagcatgctagaaagctcttagagaagcgcattaagaaaccattctttgatgctagatatgggggctctgcagaaagaatgagtctagacgaatttgaagaaggcaagcaatggctgaatgaaacattccatctgatccggtgtgaagatgattgccttccatctgttaattgggttctcgagcttgctaaagctgcagttctaagatatggagtgcgtggtcttgtgattgatccctacaatgaacttgatcaccaacgcccctcaaatcaaaccgaaacagaatatgtcagtcagatgcttaccaagattaagcggtttgctcagcaccattcttgtcatgtttggtttgttgcccaccctagacagcttcataactggaatggtggtcctcctaatatgtatgacatcagtggaagcgcacatttcataaacaaatgtgataatggaattgtcatccatcgaaacagggatccaaacagtggcccacttgatgttgtgcaggtttgtgtgaggaaggtgcgcaacaaagtgattggacaaataggagatgctttcttgtcatatgaacgggttagtggtgagttcagggatgctgataaagatactgcaaagaaggctgctgttgcagccgctaatgtagcaaaagccccacagaggaaaggatagatccgctgatttgatttactcactcactgaccgatcgcacaaggtggagcgatattgttcttgatgctgcacactactggagaccgtggccaacttcatatgctggagctgactggtcagtattttttttgcgacaagaccctttggaggtcacctgtctgctgcagaatttggtgggaagatggttaaccttgttacatggcctacaagacattatttgggcgatgtatatcaaagcatcaattgtagttaattttacaccaggtgctatgaacatattggtggattctatcagtagggaaacttcatcagattattatgtactatgcccttccaaaagttgtagttgctggaagggcgtttattaatccatcagatgtatttattcc

SEQ ID NO: 11121 - DNA, 1010 bp, Oryza sativa
  ref <308>: DATABASE ACCESSION NUMBER: AK108469
  ref <309>: DATABASE ENTRY DATE: 2002-08-28
accactcaaaaaaaaaaaaaccacaacaatgaaattcattgcagtagttcttgcagcgctcctctgcgtcgcttttgctgtcgaccaaatggtcattgaccaagctctcatcaagactgtcaacagccaccctcgtgcaacatgggttgctggtgaaaacgaagtcttcaagggcaagactatgagccaaatcagaaacatgttcggcttgttcctcttggacaaggagttccaacaatccagagacggcaagtactctgctggcgtcaacgcacaagacatcccaaaggaattcgactctggtaagcaatggtctcaatgcaagaccatcaacggtatcagaaaccaaggacaatgcggttcctgctgggcatttgctggatctgaagtcttgagcgacagattctgcgttgcaacttctggttctttcaacgaaccattgtctccacaagacatggtctcttgcgacaagagcgactacggctgccaaggtggttacctcgacaaggaatggacttacctcgaaaccactggtatcgtcactgacaagtgtttgccatacaagtctggctccggctacgtcccagcttgcccaaccaagtgcgattctggctctggtgctgaattcaagaagtacaaggcaaagcaaggttccaccaaggaatacgcttctgttgctgatgcacaagctgacatcattgcacacggtccaatcatgactggtttcaaggtctacagagacttcttctcctacaagtctggtgtctacagacacgtttctggcagcttcgctggtggtcacgcagtcaagattactggttggggtgtcgatgcaaagaccaacactccatactggatcgtcgcaaactcttggggtaacaccttcggtttgaacggtttcttctggatggaaagaggaaacgatgaatgtgacttcgaatctaacctcattgctggtgatgctgatgtttaaacattcatgtactcaaagtaaatgtaaaactatactc

SEQ ID NO: 11122 - DNA, 542 bp, Oryza sativa
  ref <308>: DATABASE ACCESSION NUMBER: AK108470
  ref <309>: DATABASE ENTRY DATE: 2002-08-28
gcacaccccgccgcgccggagaatcgtcgttgctggagagcgctcttcaacaaccggtcgccgacgaaggcttgggaatcaagaaggtgggaagccggcatggactccttctcgtcgtcgtccgggtcgccccccaatacggaggcgctcatggaccagatcaaggcgcagctcgctcaggcctacgcccaggagttccttgagactgttggaaacaagtgctttgccaagtgcgtgacaaagccaggatcaagcttgagcgggagcgagagcagttgcatatcacgctgtgttgatcgttacattgaggcaactggtattgtcagccgagctctgttcagttccacacgctgagcgacgatgtgtagccttcagttgctgcttaaatcagaattggggaaaaatgtttttcctagactcgttatttttgcctttctaatctgtgagaaagagagcaacctttatattaattaagtggcaactattagctaagctggttttcagctgttaaaagccgcaaattctgccttgcagtttctctt

SEQ ID NO: 11123 - DNA, 1132 bp, Oryza sativa
  ref <308>: DATABASE ACCESSION NUMBER: AK108471
  ref <309>: DATABASE ENTRY DATE: 2002-08-28
tgaaagagggctcaactctgtaccgtcttcgctgcgcaaagcgaccagcagacggcgacttcacatccgacagctcctggttgaccgccgaaaacacctggccagacaccctagccttccaactcaatggccacttcctcgaacccaggcgcaaactccaccacggccgctacctgcccatcgacataaccccacacctgcgccccggagaaaacaccctcaacgtctacgtcctccccaacccccacgacaaaaccccctacgctctcgcaatcgaaaccgtcggcgtctcctcccactccaccatcacctcccgaatccccaccctccccgccgcccaatccctcgccgccatcaaacgctccttctcaaacccatcccactcctcctccggcgacgacgatgaagacttcatcatgacctcctcaaccctcacaatcccgctcttcgaccccttccgcgccgaccgcatctgcgcgatccccgtccgcggcgccgcctgcttgcacagggactgcttcgacctcgagaccttcctctcgcagtgccgccgcgaggagccgggctacccctgcgtgccggactgctggcgctgtcccatctgcaagggcgacgtgcggccgcagacgctggtgaaggatgggtttttgatggaggtccgcgaggagctggggaggagggggatgctgggcacgagggcgattgttgttgaggcggatggggggtggcggccgagggctgaggagaaggggacgggtgttaggagtgcgagtttggagagggaggaggctggtgtggaggcgcttggggatggggttgggaaggggaagaggaaggggagggtggtggaggttattgagcttgattgaggatggtgctgtcaacccgggcaaggttgctgttttgggttttctttttctttctctctttcttctcttttctctcgaagaattcccctggctttgtgtttcatttgcttccagcgtgcgagcgaagcgaaggcgtttgtttgggatcctggatggcatggcattatcacgataatatccggtatggctgtaacataggtactcaaagtatggctcactgggcaagaacaagcccgtatgaaaagagggtccatcggtgtgtg

SEQ ID NO: 11124 - DNA, 1355 bp, Oryza sativa
  ref <308>: DATABASE ACCESSION NUMBER: AK108472
  ref <309>: DATABASE ENTRY DATE: 2002-08-28
tacaagaaagttgcttgatgattctatgaacagcatgcatgatgctgcaacgaattttagtacagaactgtcttctcttgaagctatgatatctgaaaaggagaaggctttgtgtttgtcaaatgaagaaaaccgaatgttaaaagaaaaaatagcagagttagagcaatgtttgatccaagataaacaggaagatccagaagtcatcaagcaagagagtacagagatcattttgcgtgatatagaggtggcgcctcacatatcaccaagaagatcacatgagactcccaagcaagatatgcaatatgatgaacttgtcaaacttaactcaagtttagaaattgcttcagctgcattgaaggaagttgaaaataaaaatatcgattataatggtattttcaccaaaaatgagcaagaaaagcaactggagtgcattttaatatctattatgaagttgtcaaaggaatttgtggagatcgagcaaaaattatcagtagaaagaagtgcaagcaggtcagaggatttgagtgatcattgcaaccacatggtcagacaagccgttgtactaacaaaaataggcctttggtacaaacaaatgctagaaacaaggcgttctgagctccagaaggctgaagccaaggttgtcattttgggcgacaaggttaattcacatttaaaccttcttcagaagatatatgtaactcttgatcgctactcccctacattacagcaatatcctgggttgctagatgctttcttgaagacatgcaagcttgttgcaggtttgagaagtaatcagaacaaagatgatacgacagcataaaaagggcaactagtgcaggcatgctcaagagtagactcatgaggacctactgccaggagggtacaactgacacactgatatcctggctcatccgctcatgtgcataaccaattagccatgtgaagctccagttgtagatcaagtggaggattctcagactgaattatcgatatcataggatgttgattgttgatgcgtatttcgaaccagctgaagtagcactcaccttctgatatgcagctatatatatacacgttcagaaaatagctccatgtagtgtttgtaggtcatgcagttatacgtacaagccagaaactcagaacgacattctgtagagaataattatcagccagtggcctggtaatgtacagattacactgttcaggtctttgggtagacgggataggcgcatctttgtttagccagatacacgttttgtaatcatccactatgtaactgttttcatctttcaaaactcatattgccaactaactgtatagctagattacctgtataacgagaaactttggtc

SEQ ID NO: 11125 - DNA, 988 bp, Oryza sativa
  ref <308>: DATABASE ACCESSION NUMBER: AK108473
  ref <309>: DATABASE ENTRY DATE: 2002-08-28
aagcctccaactactccagtccacacccgcaccaccgcggcagccatggacgactcccacgacctggcctccccgacctcccctgacacggcgtcctcgtcgtcttcgtctacgtcgacatcatcgtcctccgccaccgtcgccccgaagaagcggccgcgcaacgacggccggcacccgacgtaccgcggcgtgcgcatgcggagctgggggaagtgggtgtccgagatcagggagccccgcaagaagtcgcgcatctggctgggcacgttcgccaccgcggagatggccgcgcgcgcgcacgacgtggccgcgctcgccatcaagggccgcaccgcgcacctcaacttcccggacctcgcgcacctgctcccgcgcccggccaccgcggcgcccaaggacgtgcaggcggcggcgctgctcgccgccgccgcagccgacttcccctccgtctccgtcgacgccaatgccaagagccccgacacctgctccgtcgccagcgccgcctcgccgcagccgccaccgccggacgccgaagcggaccctgacagcacgctgttcgacctcccggacctgctcctggacctgagatacgagacgtcctcgagcctctcgtgcggggcgtcgtgggccgtcgatgacgacgtggccggcggcgtcgtgttccgcctcgaggagcccatgctgtgggattactgatcaatgtggctgctcatgggagccagtcatgcttccgtgtattagatcgatcagtggcttgtacatggcggtgcttcttttcttcttctttactctgcttctgctctgttctctttcttcttttctccctttgtattttgttttttttccttccattttttcttcttttctttgccaaatctagcatgcgaggttgtataaagtcagttccttttcctcgccttgcttgatttgggggacaagaatatgtataattaacaagcatcttatcttcgactatcccttttct

SEQ ID NO: 11126 - DNA, 958 bp, Oryza sativa
  ref <308>: DATABASE ACCESSION NUMBER: AK108474
  ref <309>: DATABASE ENTRY DATE: 2002-08-28
accaatttactttttgacgatttatcacaaatgtctaccgcccctgtaactacccccgtaactacccccaacaaagccatgttgacctggcaagacccagccagaaccggtaaggtttttggtggaattgtggcgactttgatcgtttttaaaaccgttaatttattcaacgttttcttccacgtcgcctatttgggattgacagttgctgccgctgccgaatacgctggaaggctcgtgactggtcaaggttttgttaccaagtacaagcctgctgccaagtcatacgctaagcaatttaacagtgaagtgttgccacaagtggccagatgctctgagaaattcgaggagcagatccaaaaggtgatctacgcacacgacattgaagtcacattgaaggctgctggtctttcatatgttctctacaagatcacctcatggttctctctctatactttggtgtttgctggtgtcgttttgacgtttaccctcccagcggtttacgttcacaacaagaaggagatcgatgctgctgtcacccaatacactaagcttgccaaggacaaggcctcggagttgagcgccgctgcccacaagaaagctggtccacactttgacactttggtgaagaaaactggacctcttggatcgttcatcaatagtaagattcccgtgagaaccgccggttccactgttggaactgaaactaatggctacaaagaacctacttctgcccacaccaccggtgcctccaagttccctgaagtcccatcatcggccgacgactcgatcttggatgagtttgacgatgctgctgatacctccaaggctgaggtaccagtgagattgtaaactcgtggtgttcttttattattttttttattaagtagttatcttgctataacccagcttgagagtatttatatatgccaatgtggccccgatgttcgtattcaat

SEQ ID NO: 11127 - DNA, 867 bp, Oryza sativa
  ref <308>: DATABASE ACCESSION NUMBER: AK108475
  ref <309>: DATABASE ENTRY DATE: 2002-08-28
gtttacctcctgatccattccccccaccccgcctattgattgatctgctcgcctccgccattgtcgttgtcgatctcttctgaagggtgagcgccggctgcggcagggaggcgtgtgttgctgccgcagatcgatggaggtggatgcctccgcggtcgcaagagcactaccaagagatttccctcccatcgagaacttgagcttcgaaggcttcccccgttatactttcaagatcggcaaccggatccactgcaccaacttgatgtatcgcccaggtagtcggacgctattaacgcaggaagaagctcatgagatcattcgcgagggcttgaggtctgacattcgtcggggccgcatacaactgaacgccgacttcttgcagcagcttgttgatcaggttcgcgatcatattcttcagcgtcagcgccgtggcactgccactgccatggatggagtagtggaggtggaggatgcgtacaggaacggtgggttcggcgctatccccgcgtcgagcaaggccatggccgagctgcaggaggcgatggcaagcgacgccagggaacgcgggtgcgctgtgtgcctggaggatttcgaggcgggagagaagctgacgaggatgccctgctcgcattgcttccatgcgacctgcatctcggattggctccgcctcagccatcgttgcccgctctgcagattcccgatgccaacccaagaccaatcttactaggctgtaagaggataacgccgcggccagagatgaaacaaatcatacaactcttgtgcttactcatgctccatcaaacaccattcctttcatgtaccatctgtcatttatgatcgaataactaatcatatgctgtgtcggtg

SEQ ID NO: 11128 - DNA, 1154 bp, Oryza sativa
  ref <308>: DATABASE ACCESSION NUMBER: AK108476
  ref <309>: DATABASE ENTRY DATE: 2002-08-28
caggaaattcaaaaggcaaaagtggcatttgctaaagacgaggcagagctagcgaaactgaagggtgaagagaaaatactacaaggccttgttgacaagctcacagaacaaaagaaattgatagagaaggcagaggaagaggaacgcttaagaaaagaaaaggaagaaaagaggatgaaggaagaagccgaaaagcaagctgctgatgaaaagaaagcgtcagatgcttctcaggaggtagattctcaggaaaatcatgaaactgtgcaagaagatgagagcaaggtagctgaacatcatgatggacatgccacgagccatgacaatcacacaccagaaagcgagtcatctgttgagcagcatgatcctgaaagccaagatgacattagcataaaagccgcacctgctgatgaatcaccaccagaggagacatctgcagcacctactaaagagcaggaatccactcctgctgactcagaaggtttatcaagagaggagttaggtcgtctggtagctcccagatggactggagaaaaggttgatgaggtcagtaaagatgataaaaatgagcatgaagctgagcatgatatgccagaacattcagaagaaacacatgaagatgaatcagatgtaccagaatctgctgaagacagctatgctggttaccattcagaagttgaggatgacagacataaatatgatgatgaagacttctcacatgaatcagatgatgaatatgtcgatgatcatgatgagcatgttgcgtcatacaagtctgatgatgatcagaaaggtgatgaccattcagatttcactgcctctgggcaagcatcatggctggataaaattcagcaaactgtacagaatgttttacgaacattcaactttttcaagacccctgtggatttatctgaggcttctcgtgttcggaaggagtatgatgatgcaagctcaaagctgtccaagattcagtctaggatatccactctgacagataagctaaaacatgactttggtaaggagaaggagttctattacttttatgatcagtgctttgagagcaaggagggcaagtatgtttgatgctcatgaaccagaaggccttgtgaacctgctaagtatgataagataatttgtggtcatgaatgttggct

SEQ ID NO: 11129 - DNA, 1145 bp, Oryza sativa
  ref <308>: DATABASE ACCESSION NUMBER: AK108477
  ref <309>: DATABASE ENTRY DATE: 2002-08-28
tagtggaatatcaattcaaggaagtggtgtcataaatggtagggggcaagaatggtggacctattcagatccaaatgacgacgacaatgatgatgttgatgcttacaatgtggagctggagaagatgccacagattaaacctacagcattgaggttttatggtagttccaatgtcacagtaactggtatcaccattgttaacagctcacagtgccatctcaagtttgatagctgtcaaggagtaatggttcatgacctgaccatctcatcgcctgagaacagtcccaacactgatggaatacacctgcaaaattccaaacaagtcagcattcaccactctaacctcgcttgcggcgatgattgtgtttccatccagacaggctgcagtgacataaacatacataatgtgaactgtggaccagggcatgggatcagcattggtggtctaggaaggtacaacacaaaagcatgtgtatccaatgtcaccgtaagagatgtcaacatgttcaaaacaatgactggtgtcagaatcaaaacttggcagggaggttcagggttggttcaaggcataaggttctcaaacatacaagtgtcagaagttcaaacacctatcataatagaccaattttactgtgacagaacaacttgcagaaaccaaacatcagcagtggcggttttaggtgttcagtacgagaatatcagggggaccttcacaatcaagcctgcccattttgcatgcagtgatagctcgccttgttcagagatcactcttactggaatacagctcaaacccctgatagtgccacagtatcacctgtacaacccattctgctggcaagcctttggagagttgtccacccccaccatccctcccatatcctgcttgcagatcggcaaaccatctgggaacaacgtgatgtcagattatgatctatgttgaaactctctgaatgagtggaaatgctgtgatccaggaaatactatactcctggtcctcattggttagggtggtcgtcgtgattcttccgaccccctttctgcacaatcatcgtgtggtgtatatatatacagtttatgcaaggatagtatatggttatcaggacatgtaccagcttccctcttgaagtgaaatgtaggaatttgat

SEQ ID NO: 11130 - DNA, 1181 bp, Oryza sativa
  ref <308>: DATABASE ACCESSION NUMBER: AK108478
  ref <309>: DATABASE ENTRY DATE: 2002-08-28
tcacaaaaaacccccatccaagctttggcaagaccaccatctatggcttcttccccctcgatgcctttacagcaaactccgccaaatgtatctgctccacctaggccccctcaacataggccacatccaagaccataccatgctcctgcaatttcgcacccacagaatgcacttttaacacagcagcagcaaaaactaccacaacatcaacatttgcagcaacagcagcagcagcagcagcagcaacaaaaactacagcaacagcagcagcagcagcaacaaaaactacagcagcagcagcagcagcagcaacaaaagctacagcagcagcagcagcaacaacaaaatcagccacaacattcctcgcagcaaagtcaacagactacaacactcagaaaccagcaacaaatttctcagcagcaaactgctcgtacccctgtctcaatggctcagaagctagattctcctgctgtactaaaagctactaatgtgcaatctggagacatggcttcagtcgatgtggatgctggaggatctggtaatcgactgctttctaagaggagtatacatgaattagttgcacagattgatccttcagaaaagcttgatcctgaagttgaagatgttcttattgacattgcagaagattttgttgaatctgttgcaacatttgcttgttctttacagcaaaacatagaaagtcaagcattttagaagcaaaagatgtactcctccatgcagagagaagctggaatattaccttgccaggcttcagtggagatgaaataaaactgtacaagaagccgcatgtcaatgatattcacagggagaggcttactctgatcaagaagtcaatggccagcgaaagtaacgcaaagggctctgctgcgcaagctgcagctaaccagaaaaatcagacacccaagccacctgccacaggctctccatgaaagaaattcaataggattaccctccaaatcctgagccatcaatgcattgtcatcatattcggtgtttggacgatatgtgctgtagtacatcttcaactaattggcattggcttgttgtattataggactgtacaactgttgggaccgttagtaggactgcaagattacatgtacaaatgctttttctgaagagtagatctattgaaatgctaattcagttattttgggttc

SEQ ID NO: 11131 - DNA, 959 bp, Oryza sativa
  ref <308>: DATABASE ACCESSION NUMBER: AK108479
  ref <309>: DATABASE ENTRY DATE: 2002-08-28
atagctggtgcctggtggcgagcgcaacgaaccacaaggaagagcagatggcggccaccggcgctggagaaggcaaggagacggccgccgtcgccggcggcggcggcggaggtagcctgcacagtaagaccctcctcaagagcgagccgctctaccagtacgtgctggagtccaccgtgttcccgcgcgagcccgactgcctgcgcgagctccgcctcgccaccgccaatcaccccatggcggtcatggcggcctcgccggatcaggtgcagctgttcggccttctgatcgagctgatcagcgccaagaacgccatcgaggtcggcgtgttcaccgggtactcgctgctcgccaccgccctcgcgctccctgacgacggcaagatcgtggccatcgacgtgagccgggagagctacgacgaggtcggagcgccggtgatcgacaaggccggcgtggcgcacaaggtcgacttccgcgtcggcctcgccatgccggtgctcgacgagctcgtcgccgaggaggggaacaaggggaggttcgacttcgcgttcgtggacgcggacaaggtgaacttcctcggctaccacgagcggctgctgcagctggtcagggtcggcggcctcatcgcctacgacaacacgctgtggggcggctcggtggcggcgccgccggcggcggccgacgaggcggtgccgtcggggcgggaccgctcgctcgccgcgctcgccagggagttcaacgcggcgatcgccgccgaccgccgcgtcaagccgtgccagctcgccatcgccgacggcgtcatgctctgccgccgcgtggcctgaccaccacaacacaccgatcccctctccatggatgtacttttcagaaagtgcgttgggtaaaagtaaaaatgaataaaagttgctactacttggactcttttagtcataaaatataaaaatttggatgatgtgagt

SEQ ID NO: 11132 - DNA, 789 bp, Oryza sativa
  ref <308>: DATABASE ACCESSION NUMBER: AK108480
  ref <309>: DATABASE ENTRY DATE: 2002-08-28
acttaaatcacatctcagggacagcaggtagccatccattagctagctagtcaaattaacttctacacggccatgtatccccctgatccgtccaagtccggcgagtcgtcggcggcggcgccggagccggtgaccgggatccccgtcggcatgttctaccctgctccgccgatggagcgtgtggtgtcgtgccgcatggcgccggcggctggaggggcgtggaccaccgccctctgcgactgcgccgacgactgcaacacctgttgtatggcgtgctggtgcccgtgcatccctgtcggccagatcgcagaaatcgtcgacaggggctcatcatcgtgcgcgttgaacgcggtgctgtactgcctggtgttccacgtgtcggcggggatgtgccagtgggtgtactcgtgcgcctaccgcgctcgcctccgggcggcgtacgacctgccggagacgccctgctccgactgcctcgtcaccttctgctgccagacctgctccatcgcacagatgcaccgtgagctcaagaaccgcggccacgaccctaaccttggatgggaggtgaactcgcggaggacgatgatgactcctccccaacaccaagcgatggaaggaatgacaactccctcataacaactactcatcatcacctctcgatcgaccaaacaatacatacacacgatatatagctattacaagcatgtacaccctttgatttataaagtggcaatacatatatagatgtgtgacgcttattttattttataaacatattttttttctgttttc

SEQ ID NO: 11133 - DNA, 806 bp, Oryza sativa
  ref <308>: DATABASE ACCESSION NUMBER: AK108481
  ref <309>: DATABASE ENTRY DATE: 2002-08-28
gcatctctctctctctctctcccaattatatttgtagagagagggaagaaaagaagagaggggaggagcaatggcagggtctgaggagaagaaggagatgcaagaccccaggacacaggccatagcatccaccattagagttgtgcccaacttccctaagccaggaataatgttccaagatatcacgaccctacttctaaatccccctgtgttcaaggacaccatcgacttgttcgttgaacggtacactggcaaaggcatctccgttgttgctggggtcgaagctagagggtttattttcggtcctcccatagcgctcgctattggtgcaaaatttatcccactaagaaaacctaacaaacttccaggtgaggtgatgtcgaaggagtacgagctggagtatggcgccgactgcttggaaatgcacgtcggcgcggtacagcccggcgagcgagcactcgtcgtcgacgacctcgtcgccaccggcggcacgctctgtgccgccatcgtcttgcttgagcgtgctggtgcagaagtggtggagtgtgcatgtgtgattgagctcccggaactgaagggtcgtgagaggctcaatgggaagccactgtacgttctggtggagtctcactcctagcttagctacatatataccactctagctgcagaatttaattcttcttcttggtgcattccactattctgtccatgtgtagtttaattttgtgtctgcttaaaattcagcactcagtgtgtaagtgtacaactctaatggatggcaactctgctgatcgcggtgtgggtgtagt

SEQ ID NO: 11134 - DNA, 932 bp, Oryza sativa
  ref <308>: DATABASE ACCESSION NUMBER: AK108482
  ref <309>: DATABASE ENTRY DATE: 2002-08-28
aaaagggtgaagaaaccaaataagaaaaagataaaaaggggaaaaggtcgcccagcggctgaaaccgacctgcattgctcctcgctgctttggattcgcacttcgcagcttgagaccgggagcaggacgagcggcggaatgggttccggatccggatctttcctcaaggtggtggtaaagaacttggatgttcttgcggggcctatagtttcacttgcttatccactatatgcatctgttcgagcgatagaaacaaaatctgctgtagatgatcagcaatggctcacatactgggtgttgtactcgtttatcactctatttgagctcactttttctccggtacttgaatggcttcctttatggtcttatgctaaattgtttttcaattgctggttggtcttgccctacttcaatggtgctgcacatgtctatgaacactttgtgaggccaatggttgtcaaccagcaaatagttaatatctggtacatcccaagaaaggatgagtcagatagacccgatgatgtgatatcagctgcgcagagatacattgaacaaaatggatcaagagcgtttgaaagtctggttaacaagtttaaggcttcaaacacaaggcgctccattctggaggaggtagaggctgaaagaagagccaaggctgaactagaagcagaagcaagggatgagaatcccttcttcaatcaaaattatcggtactagaagtcagggttcataggatcaaatttatgctcatggggtatgtgttcaaacgatcatggattagtgtaaataggttctaggattcgagtattcttgctactcttgttgatgcagggttcttgccatgaagtaataaatactagtgaactagatttggcttctatcatatgaaaatgctagaatgaacaacagcatctgcagacaactgatttggg

SEQ ID NO: 11135 - DNA, 959 bp, Oryza sativa
  ref <308>: DATABASE ACCESSION NUMBER: AK108483
  ref <309>: DATABASE ENTRY DATE: 2002-08-28
tacctatggagacggtcgcctcgctctcgcgcgccgcgctcgccggcgcgcccgccgctacacgcgcgacagcgtcgcccgtgaacagggccgtggtccctgcggcgtcccggccgcgcgggggacgcctttgctgccgacgctcgctgacggccgtctccgcggcggcaggggcttcccctcccgtctccccgtcgcctagccccgatggcggctcccccggcgtgtgggacgctctcggcggcgtgtccgtgctcgccgccggcaccggcgaagccgttcagctcagggacctgtgggaccccaccgagggggtggccgtggtggcgctgctccggcacttcgggtgcttctgctgctgggagctggcctctgttctgaaggaatccatggcgaaattcgacgctgccggggccaagctgatcgccatcggcgtcgggactcctgacaaagctcgcattctcgccgatgggctgccgttccctgttgatagcttgtacgctgaccccgagcgcaaggcttacgacgtattggggctttaccatggtctgggtcggacattaatcagtcctgcgaagatgtactcggggcttaattccatcaagaaggtaaccaagaactacacgctcaagggcacaccagcagacctgacgggtatcttgcagcagggtggtatgcttgtgttcagagggaaagagttgctgtactcatggaaagacaaaggcacgggtgatcatgctcctctggatgatgtcctcaacgcttgctgcaatcgaacttcttgaggtctctagcagtcggaagatgtgtatgtaaatatatgaaatgctcagcatgccaaacagagagcaattagactcaacagtactagatgttcgattaattatgcattgttggtttgcttatgtacttagcatgatattggattagctacccaatggacatgacactacagtctg

SEQ ID NO: 11136 - DNA, 948 bp, Oryza sativa
  ref <308>: DATABASE ACCESSION NUMBER: AK108484
  ref <309>: DATABASE ENTRY DATE: 2002-08-28
tatcaggtctagtggcgccatctataagcaatgtgctctttgcgctaacctgtgcggtgggccggtggcgcattctcttgaacacctggtggccctcgtggtgtggtggtggaagaagagggcgatgacgaagcagacggacaggacgggacatcccagtagcgatccattgattgccgactgcaatatctgcttgaaaagtgcaacatctggaaccttggataccatctcaccttcctctccgcccccctcatcctcacccccttacaacctcatgccccattccggcgaggtccaagtggtggcggttatcacggattgggatgtgcgggaccgcctgaggtgggggagaaggacagcgaggggtggaagtctcgccgcagctggtggcggcgccgccgcaggccctccagggcggcatgcgcttcagccttcaggcagggcgtgcaccatgcaggagagggagatcgttccgagctcgccaggaggatggccgggagagatccccgcccttgtgcagacgctgccgcctctgacccgccgctgcacatcttcaatcgccggccgggtcgccgggaaagcagccggaggcgggacatggccgcggccccgtctggtgttcgccgcaacataacaggctttccgtgggcctccaaacatctcggcccgtacatgtcgaagtagttgacctagtaaacggcccactgcctagacagcacatggacacatggatgggccgacaacatcacggcctgttcagagaccgcaccatcggtctatcgcgctcacccgcccagtcacggtctcacggaggcgtagaagtgatcgaagtgttaaatcctagatttcacactgctaattgtatttcttttaatggtagatgtacacgttgacggcaaggcgcatgtaataattttattaatcttaagatataccgatccagtctag

SEQ ID NO: 11137 - DNA, 1135 bp, Oryza sativa
  ref <308>: DATABASE ACCESSION NUMBER: AK108485
  ref <309>: DATABASE ENTRY DATE: 2002-08-28
atccgcgctccgtcgcacgcgcggcccctcccctttctccgccctccgtcgcggccgccttccaacccacgcttcccgctcccttcgccgccgcccccactgctcgcgcgcctccgcccctcgcgccgatctcctccgcggcgcccctccgcccatcgcaacgatctactctgcgccgcccccatccctcccctaaccatcgtcgaccccctccccttccaacctcgccggccatccgcccgtcgctccatgcccgtcggagatcgccggccgccggttcccctaaccgccgcaatcgaccccatactggcgccgctgcacatcctgatcaccgtccagtcgcctttcatccctcggccggtctccgtcgcctcgccatcaggagcaagaggttgaggtgtcgagcgcggagagagaggcacccaggctgacctcgctggtggcgacctggtggtctgtgtgacctgcaagtgtggtgtccacaaggagttcggcttcgaccattcccactgatcaaattagccagtccccttattccatcctcactgtcaatgtcaatttgttcttgcaaccggacatcaggcatagaatgttccaactattgaggaaggtcaacgacaggttgagttttgatctaagcattacaagatccttgcgtctcacgaagtagcagaattacctttgctgatcttgctggttcagtgaacttgatcacgggttgggacttgggagttggcgactgaggcgcatgcagggcagcggcaatgaccaagtgttgggcgctctattaaggactgcaggttgtggcagtactgcagcagccagtgctttggtggggaggtcataattgttttgtagtatggctcttacggctgtccatttcatgtttatccaatttcagctcaaaatatttatttttatgcctatttcgtgctacatttgtccctcttttaatttttagattttactaatcatcttagctgttcgcttgatctgggaacaaggggatctgtgtaatatagggaacgagcaaggggacctgtgtaactgtgttggaggtcgtgggcttcgatacaaaattaattgggttgcagttggattcatcattggataaatgatctgattaattatttgt

SEQ ID NO: 11138 - DNA, 878 bp, Oryza sativa
  ref <308>: DATABASE ACCESSION NUMBER: AK108486
  ref <309>: DATABASE ENTRY DATE: 2002-08-28
gaaaggcttttcagattcaatcatcaaaccaaacctgttcgatcgacttcgccccggttcgaagttcgcccgccatggccgccgtgtcgtgccggtgcagcagcgtggtgttcgtcggcaacgtctcgtaccgggccaccgaggcggagctccgcgacgcgtgcgaggagatcggccccgtcgagtcgctccgcctcgccgtcgacgaggacgccggcaaccggcggaggggcttcgcgttcgtcgagtacctcgacgacgagaccgcccgcagcgcgtgccgcaacctcgaccgccgcgccctccgcggccgcgcgctccgcgtcgacctcgccgacctgggctgcggcggcggcgggggcgagacggactagccagtgggcgtcgaggacgccacgcacgcggcgtcgctcgtcaacggcgcgccacccagcgccgccgtcacggcgtacctcgccgggctgaaccggcggcagctgcgcgagacggtggacgcggtggaggcgcagggggacgccgccgtggaggagatgaagcgggcgtacgcggggctcgccacgctgctcgagcaggcaaggatactgctcgacatggccgacgccgacgccgccgccgcggcggcgaagcgcaagaagcgcggcgcgagggatcaccaccacggccgtgaggcccagcttgcgtcaaagctgaggaagctgaacgatggcaagcccagcacatccatggcgtttgtactgtagctagtcgttcacaacccaatcgcagcccatgggccggtttcagctgggccggcccaagcacagagaatttcaccggcatcctgcacaacgagatggcacggccgagatgactaccgatagagtaaaacgtgctcggtt

SEQ ID NO: 11139 - DNA, 1167 bp, Oryza sativa
  ref <308>: DATABASE ACCESSION NUMBER: AK108487
  ref <309>: DATABASE ENTRY DATE: 2002-08-28
gcacagatttctcgggggcgaaaccctagccgcctgcgtcgccaccttccatccaccctcaacgcctcgccgtcgccggagctcgctgctgcaaaggcgagcggccaactgggaaggcggtggtgaggacatcgtgagtcgtgacccagcgaagctcgcccttggcacgagaggacggagcggcgcatggcgttgcaggtccacagcggctagagtcgatcggcaagggcgcaatggatccgacgctctcggaagtggatttggcattcccaatgcaggggcgcagacggcggtggaggttggcagctggagagaaggtggtggcggcagtggcggtggtgccggatctagagctcccagatccagttcgacagtggcgctgtgacaggaggaagcgcacggcgccggccgacacgacgacgtgtggccggcgaagcgcgtggagagtgcgacacctgttgtggggctccagagggaagaccatgatgatggccctggcatgaaggagcacgattagtggaacatggccggcgtggtggcgagcctgctatggtggagcacggcaaggtgaggtggtgcggtgacgagactgtcacagtgggaggacggaggcgaaggtgatgcgaccaggcggcccgtaggagacacgggcagcctggtcgagatggcggcaacaacggtagcatcataagaggggcgttgaggactgcgacaagctcctctctaggtgttggtcctcttgcggcggcgatttgccatcgcaagatggccacactggatggactagtgcggggagaggggattcatcttctctctgaccctcttcctctccagcccacccatgtggatgaatctggagcacgccagaggtcgagatgcttcttcgatggccggccggtggtgaggcgtcgacacggtggctgcgtgttgaagaggattagctagtagtgtctgttgaacttgacatgcacacattgacatgagaaagtaggaaactacaggcgaaagcctagccttcgggccgataacggcgacgcctgcgtcaccgcattcctctcgggacgttgttacatttctcctattctaatggtttctttaagtattaaccatgtcctggttctttaggacgggcggcggcggcgctcttagcgttgttcccttattttt

SEQ ID NO: 11140 - DNA, 1120 bp, Oryza sativa
  ref <308>: DATABASE ACCESSION NUMBER: AK108488
  ref <309>: DATABASE ENTRY DATE: 2002-08-28
tcgagaaaacacgcttaaaaaaaagattttagtcgcgactaaatgtaaacacaaaccaaattaatctgaaattccaaattaatactccctccgtcccataatataagggattttaagtttttcttacaacgtttgatcactcgtcttattcaaaaaattatcaaattctttcttaataatctgcaattcgtgtgaaatatgtataagatttgaatgcatgctagagatttcaattgaattgggattaaacacatcgctgtcctttcaactcggaccattcagtacaggtggagtgaaaaccagcagcagtcgtcatcgatctcgagcgccacatgaaagatcatccagatccaaacaaaccatctgcaaatcgaagcggaatccgccggtgagccgcggcaaccgcagccatggacgagaggccagcgctgccgccgccgccgtcggcgccgcagtccccgccgttctccgcgccggcatcgccgtactcggcgctccacccgctgctcctcctctcccctaacccgcacctcctcctcaagcccaagacgctgaccctctcgctctcctcgtcatccctcggctcgatgccgtcttcctccccgcctggccccgccgtcaccgacgcctgggagctcgtgacgcccaccgccaccgtcgtcgccgtgggcgctgccgccgtggacgacggcggcctcgacgactgcgacgtcttccccccgcgcctccacgaggggctcggcgtcgagggggaggcggaggaggctgcggcgaaggaaggggaggaagacgacggcgaggaggatgatgatgatgatgatgatgaatttggtgatggggagtggctgtgggggtgggggaggtgccgcgcggcggcgaggcgagcgtgggcggccggggtcggggccgtgcgggaggggctgatggtgcacgggacgtgcgggtgccccgcggtgaggcccgccgtgtggtcggcggcgggcgcggccgttgtggtgggagcgctgctctacgcgcgccggcgggacaggagggagagggacctgctcgtgctgctctcgcgggagaaggataaggtttgaatctctatataattctataggttttctggtttaatttc

SEQ ID NO: 11141 - DNA, 869 bp, Oryza sativa
  ref <308>: DATABASE ACCESSION NUMBER: AK108489
  ref <309>: DATABASE ENTRY DATE: 2002-08-28
gaaaagttgtgtttcttggatggattgttcatgggttggatagccctttgaataagctttccatagagtccaagaacgccaaattccgagacccgagtcaagagatatcgccgttttattaacggtcggttgagctgaaaagtgacctgcggtctgaccgtgggccttaggccggtctgaccaggcctgttagccggtctgaccggcgtggtaaagccggtctgaccggcccactggtctgttgcactggtttggtttttggtggcgatacaaagccgccagagccgcaaccggtcagaccgagccgacggcggtctgaccgagccgttgacggtctgaccggccactacactgcggtcagaccgaccaggttgagtgggctcaatgattgccctgtaacggctagctttctagccgttacaaagtagtccggtctgaccggcctcacaacggcggtctgaccggcagggcacagagttggggatttcggttccaacgactagttttggtggttgggggtatatatacccactccccagcagcaagggtaaggttttggcactccattgcattatcttgaacccttgcaagagctctcacacccttgtgcactttgtttatctagtgaggtgttagagagtgagttaagccaatccaagtgcattgcttcattgttatagctagtgtgacacttgatcatcctcggcaagcatcctagacttgttactcttggaggttgccgcctcctagacggcttgtataggtgttgctcggtgacctctccgaggagattgtggaggaggcccggtgccgtttgtgagtggtttggagttcaccaccttcggagtgaaggaagaactacccaaaag

SEQ ID NO: 11142 - DNA, 1023 bp, Oryza sativa
  ref <308>: DATABASE ACCESSION NUMBER: AK108490
  ref <309>: DATABASE ENTRY DATE: 2002-08-28
gacgcgccgccgccacagctcgcgtcgcgtctgcgctctcctagcgccgtgcgggggtttagctagggttttccgcttgcggcggcggcggccatggaaggggaggaggaggaggtggagagcctggtcggtatcagcaacgcgctcgagtcgctcgagcggcagctcgcctctctgcaggacctccaacaccaacaaagatatgaacgagagaccattttgagccagattgatcgcagccgaggatgtcttcttaacaagctcaaagaatacaaggggcaggactgtgaagtaatacatgaggctgcttcttttgctggtgaaaaaattgaacatgatgatggtctcatgctacctccgtactcaaatcatgtcaccaattcgtttgttcttgatgatctgtatcctccaagttacttggccaagttaaagtgtatgcacaacggattgggttctggtgggactaaccaagatgttacaaagacaaacaggctggagaacaggaatggtagcatgccaaacggcaattcacaaggaggaattagatcttttgttggatggcttgctaaaactgcagtaatggttgtaggtgctgtatctatcatgaaggctgctggttacgagccagtgataggaagacacagcataaaattggatatggcaggtttgttcagtaaggaggcaaccagtggaaaagatcaggctactgtccaatgccctcctggtaaagtaatggttctcgaagatggcagggctcactgtgttgtgaaggaaagagtcgagatacctttcgacaccaacctcgcctctccaaatgcaagttatgggttaggctgaaattgggcttttgtcaatattaggatttagctagtctttgaggccctttatatgatcttctgtagaatgtgccgagcacacttgtctaaagattgaagcctatgtattatatctatctatgatcgtccatgtcttgctaattgccctcgttggtgaactccatcagtatgctgctcagttgatacc

SEQ ID NO: 11143 - DNA, 1700 bp, Oryza sativa
  ref <308>: DATABASE ACCESSION NUMBER: AK108491
  ref <309>: DATABASE ENTRY DATE: 2002-08-28
aaacgcaacgcaaacactcgctcgatcgccacatgccgacgcctcgtcctcgccaccgccaccatgcgctcccgctcgcgctcgcgctcgccgcgccgctgctgctgctagccgcggcggacgggcagccgaacgagtcgagggacaagaacaacggcggcggggaggtgggttcatggcgcccagcggcggaggcggcggcatgggctctcagtcgccgagcttcagtgcgcccatggtggtgctcctcgtggcgctcatcgcggccttcttcttcatcgggttcttctccatctatatccggcggtgcggcggcgaggcctccacggggccgaccatcccggccgcggcgctggcggcgctgtcgcggcaggagcagcggagccggcggcagcgcgggctcgaccccgccgtggtcgagtcgttccccaccatgaagtacgccgaggcgagggagctccgcgacggcggcaaggacgccgtgctcgagtgcgccgtctgcctcagcgagttcgacgacgacgaggagctccggttgctgcccaagtgcagccacgccttccacccggactgcatcggggagtggctcgccggccacgtcacctgccctgtctgtcgatgcaaccttgcgcccgacgcggcggcggcggaagcgaacgtcgtctccggcgaggtggatggggagcagcaggaggaggaggtggtggtggccatcgacgtggaccgcgagggcgaggaggaggacgaggagaggcggagggaggcgatggagctcgagaggatcggcagccagcgccgcgcggtgcggtcgaggtcggggcggccgctgccgctgccgcggtcgcactcgacgggccactccctcgccacgacgcggctcggcgacgccggcgacctcgagcggttcacgctgcgcctgccggagcacgtgcgcagggagatggtcgccgccgccggcgaggagagcctgcgccgcaccgccgtccgggaaggccgcgtcggcggcggcgcccggagcgcgcggatcgggcggtccgaccggtggccgtcgttcatcgcgaggaccttctcctcgaggatcccgttctggtctgcgtcgaggagggtactcgacgccgcggaggccggagctgacgccgccgccaccaccaccaccacgacgccaacgtcaacggcgaggaccaagcgtgacaagacggccgccgccgcagatggctccgtgagctcagccaagggcagcgtccgcttcgactgtctcggcggcggcggcggcggcggcggcccgagcaacagagtcgtcgccttcgccaacgacgacgaggaggatgacgacgagaagccaatcgcccggcaagtttgagctcgcgccatgcgcggtggcggcgccagtgcatgcatcatctgatcagaaaaccaatccgcggcggcttctcgcagcgatccgccatggctggaccttcgatgaatcagctcgtgcacggacacagatcactagaaaagatcatcaatttgagttgaaaataccactcctaaattagtactagattgttaattatacatttttctctccattgcttctttggatagagaagtggcgtggaaacgttcaaagatccaatttttcttcccctccgttgaaaaactggagcggggttgtacttgtaccggcactgtattcaaatattcatgtgattattcgt

SEQ ID NO: 11144 - DNA, 1881 bp, Oryza sativa
  ref <308>: DATABASE ACCESSION NUMBER: AK108492
  ref <309>: DATABASE ENTRY DATE: 2002-08-28
aagttcgtgtctttgaaccaccttgagtctccatcatggccgccaacgcccctccctccgccgaaatgctgagcggcgctcatccttccgatgtcactcctcagtacgacttactgccccgcctgatcccatatctcgaccgccacttggttttcccgctgctcgagttcagcgccggcaacgatgaggacgagaatgaaatcacccgcgccaagtacgagctgcttaagcacaccaatatgaccgactatgttgccaatctgtggaaggagatcaacaactccgactcaattcccgacgaatttgtcaagaagcgcgaggaggttctggccaaactgcaacactaccaggaccagagtgagaagatcaccgaacttttgcaagacgatgaggttgtgggcaacttgcgcagtgacaaggctgccaacttgcgcttccttgaggagcagcacggtgtcaccaacgagatggttaacagcctgtacgactacggccggttccagtacagctgtggcagttatggcaatgccgctgagctgctctaccagttccgcgttctgtctaccgacaacgacaaggttgcctccgccacttggggtcgtctggcttctgagatcctgaccaccaactgggagggtgccatggaggaagtgcaaaaggtcaaggactccattgagacccgccttttcaacaaccccctcggtcaactcaccaaccgctcttggttgattcactggtctctgttccctttctttaaccacgaccccgcccgcgacgtcctcaccgacctcttcttctcccccgcctacatcaacaccatccagaccagctgcccctgggtcctccgttatcttgccgccgccgtcatcaccaaccgcagccgcccccacaagcacaacggtgcctaccagaagcaattgaaagacttgattcgtgtcgtgcgccaggaggactacgagtacaccgaccccatcaccgattttgtcaaggctctctatgtcgacttcgacttcgaggaggcccaaaagaagcttggcgaggccgaggaggtcctgcgcagcgacttcttccttgtttccgccgccgattctttcgttgaggctgctcgtcacctcatctccgagagctactgcaagatccaccagcggatcgacattaaggatctgtccactcgtctgggtctcaaccaggacgagggtgagaagtggattgttaacctgatccgtgacacccgcgttgatgccaagattgactaccaggagggtaccgttatcatgaaccaccccccgcaatcggtgtaccagcaggttatcgagaagacaaagggtgccttcttccggactcaagttctgagctccgctgttgcgaaataaaataacccctccatgagctgatgccaaaaccgacttcttccttgtttctatcaaccctttttctgccatcccatactaatctcctccgtgtatgtcacaacacggttcttccaaggagaatgggacttcgcgcagagtggcatccggctggcgttctttggtggtccacacttttttgttgattttcttttatttttaacctccttagtccacagtctccttccatttccctatatctctccctttctctgtcgtcagatactttttttcactttggtctttttttattatttttcttgtgtgcaattcaagaccctttgaaggtcttttgcagagaaggggaggtctaaaagaaaccacgagggactcacggcgctctccccgcgcgcctgtgcaaaagaaaagtgactggggcttatgtagaagacttgtttgggacgaccccgaacgtctgatggatctatgctgttacgaatggcctatagagatgagtgaaaaatgatgtctg

SEQ ID NO: 11145 - DNA, 1210 bp, Oryza sativa
  ref <308>: DATABASE ACCESSION NUMBER: AK108493
  ref <309>: DATABASE ENTRY DATE: 2002-08-28
aaagaagagcagattggattagcgccgagccgaggcggcctcgacgataagcttcgcctcgccggccgccgccatgcggaacccgcccgggaggcacctcctccgcgtcgccacccgcgccgtgcgctcctcgtcggcgctcggcagcggcggcggcggagggggcgcctcgacctccgccacgtcccccgtcgccgcctcctcctcatccggtggccgcccgcgcacccgctccggcggccgcctcctgcgcgccacctcgccgcccccgccctccgccatcgccgcggccgcgtgctgggagtcccgcacgatgcgccgcgagggggaggaggagtgggaggaggtcgtcgccggggccgaggaggcggttcatggggcccccgtgcctgttgcggaggaggaggaggagtacagggtggtgttctggtcgccgcccaccggcgacgaggtccgcgcagccttcaccagcatcgaggaggtatttggtgatccttttcgtgcgcattcttatgaaactgaggagcaatcagcattgtccacctcagtacattcgtcatctggcaattcatcaggatcagatgactggattgaacctgctgcctatgctctcaactcaactgctcttctgacaagggaacatagaaatgttttggatgccttccgtttattgcaaaaagatcctaatgttcagaaaatggtcatgtccttgtcatgcgacagggctgtatgggatgctgttatgaacaacgaggcagtgcaagaattcaggagatctttccaggatgacaaagaagcagcaggtagaaagggaaaccctggtggtcctgctggagtgcttaagtggattctgggcaacacccaagcaaaaataatggaattcatgaataatataatgaagattgtgaacatgcttttccactctgatgatgatgaagcgaagcccgacctttacactgatgcagtgaaggtgtcattcatgctctcagttttcatcttcatcgtggtggccattgctcgtatcaattttgagccgtgggatttcaaagtgtggtgatgcaagattctgcaagccgtgtgtgcatgttttgtaggacagctcatgatttccaagctatctaacttaaattcacacgaaattgtacatcgatgatttctgtatcatttgaccctgttagtctgttgtaaaggattggtttgtctgtgtccc

SEQ ID NO: 11146 - DNA, 1643 bp, Oryza sativa
  ref <308>: DATABASE ACCESSION NUMBER: AK108494
  ref <309>: DATABASE ENTRY DATE: 2002-08-28
cattcccttcaactcaaactcctcttcttcttcttcctcccatcgatctctctccttcgcgatcaactcgagctcgaactcgtctcgtggtagtagcgagcatggaggaggcggcggcggaggtgccgtcctacttcctgtgcccgatctcgctggagatcatgagggacccggtgacgctggcgacggggatcacctacgaccggagcagcatcgagcggtggatgttcggcggcggcggcggcgacggggggaaggggacgtgcccggtgacgcggcggcagctggcgccggcggagcgggaggcgacgcccaaccacacgctgcggcggctcatccaggcgtggtgcgccgcgcacgccgtcgagaggttccccaccccgcgcccgcccgtcgactcctgccgcgtcgccgcgctcgtcgacgaggggacgacgacgatgctcggcggcggcggcaggcagcggcagctcgccgcgctccgggagatcaaggccatcgccgccgagagcgaccgcaacaagcgctgcgtcgaggccacgcccggcgccgtcgagttcctcgtctccgtcgtcgtccagagccatgccgccgcctccacctcagccagctcggacgacgacgacctgttcgactcggtgatcgattcccccatgtcgacgagctcgccggaggaggaggccctgggcgtgctctactccctcaagccgtccgagcccaccctgcgccgcgtcctcggcaaggacaatggcgtcggcttcctcgacaccctcgcctccgtgctccgccgcccgagctaccgttcgcgcgcgtatgccatcctcctcctgaaggcggtgacgtcggcgatgccgccggagcggctgatggcggtgagccccgagctggtggaggaggtggtccgggtggtgtccgacggcgtgtcgtcgaaggcggtgaaggcggcgctgcacgtgctgtgccggctgtgcccgtgggggcggaaccgcgtgaaggcggtggaggccggcgcggtggcggcgctggtggggctcctcctcgacgaggagggcggcggcgggcggcggcgcgcggcggagctggcggtggtggcgatcgaccacctgtgcgggtgcgcggaggggaggtcggagctggtggcgcacccggcggggctcgccgtggtgtccaagagggcgatgcgggtgtcgccggcggccaccgagagcgccgtgcgcgcgctccacgccgtcgcgaggaacgcggcgacgccggccgtgctgcaggagatgctcgccgtcggcgtggtggcgaagctgctgctggtgctgcaggcggacggcggcgagcgcgccagggcgagggcgagggagatgctcagggcgaacgctagggtttggaaggactcgccatgcttgcaagctcaccttaaggcttcttacccctcctgatcatttcatcaccatcacatccatccaccgatctattaattattattaattgctaagaggagcacgtgctttaatttgcactcctcttagtagttaattagattttgtgattacttttagttctttaatttgtttatgatctgaatgtacaaaatacactgtaaatctttcattaattctgtacaaaaatacactataaatctttcattgcct

SEQ ID NO: 11147 - DNA, 1228 bp, Oryza sativa
  ref <308>: DATABASE ACCESSION NUMBER: AK108495
  ref <309>: DATABASE ENTRY DATE: 2002-08-28
tagtaaaattatttggatgttgtctagaaaccgaggtcccgctgttggtatatgactttattcccaatgggtcattatttggtgttctgcattctggctcaagcagtgatttctctttgtcatgggatgactgtctaagaattgcagtggaagctgcaggagccctctgttatctccattcggcagcttcagtatcagtcttccatcgtgatgtcaagtcctctaatatactcctagatgtgaactacacagctaaagtatcagactttggtgcttcaagattggttccaattgaccagactcacgtagttacaaatgtacagggtacatttggctacttagatccagagtattaccatactgggcagctgaatgagaagagtgatgtatatagttttggtgtggtacttgtggaactactaatcagaagagaacctatttttacaacagtatcaggatcaaagcagaacttgtccaattacttcctttgggagctgaaggtaaagccaatcaaagagatagttgcagcctacgttcatgaggaagctactgaagatgagataaacagtgtcgcttctcttgcagagaagtgcttgatgctccgaagtgaagataggcctacaatgaagcaagttgaaatgactttacagttcttgcgaacaaaaaagttgaactcatgccatgctactccagaaaacgatgaagagctgcaacagttgctaccgagaaggtctgaagctagttgcgagcaagtggctgttaacttgggtaacagtgctaattctgagtctcgaaatagcctcaaatgctatagcttggagcaagagttcatttcatctgttgggctgccatgctaagtccctaagagccggtttataattactctgaaattcacaatgaaaggattgaattttttccaattcttaacaggccttaaacgtggacatctactactcaaggaatgcggtctaccatatttattaaataacatcccaagaaagtatccttatctcattttcccagagtatcattcacactaatgtacctatacagttataatgatattgcatttgattactacatgcatgtgcttccttttgggagagatgcatatctatcatatttgttacaaaagttttgtcccaatggaaaaattgagtgatgtatgtatctagctgagaaatggttggaaaatactagtaataaaagtactatataaattcaacgg

SEQ ID NO: 11148 - DNA, 871 bp, Oryza sativa
  ref <308>: DATABASE ACCESSION NUMBER: AK108496
  ref <309>: DATABASE ENTRY DATE: 2002-08-28
tcatgcagcaggtgttgaccgacttccaggagaatccgaaggctgctcaggcgcatctcaagaaccccggagtgatgcagaagatccagaagctacttcctcctgtttcgccgcagagagctcgttctggatgtgctgtgggacgacgtcgaacttggcgagctgcatcgtgtaagacgcgcgccccttggtcattcctctcagcgtgctgacgtactggaacatctccgcaagtggcacgaaagcatcgacaacctgcatcaaataataatataccactgggttatcacctcaactttcattataggttccaggagtcttggaccagccttcctcaatccttcacggaatgcacctctggctgcaatttggaatgccaggacacttgaatcaacatcatggtatgagccatcaaccagcaccgctcggaggtccacaacagggtaaccagcaaggacaccattgggcaagctttcctcaattcccttcatcacgcctgagaagtggaatgatgggtcttcttgagcaagcttgattagtccggttgccattttgtcagcatcagctttggtctttggttcaatagcaactttaatgacaggatcaggaaattccatgcgttcaagcacaacaggcttatctgggtcactaagagtttcaccagtaattgtatctttgagaccagcaagagctactatgtcacctgccacagcaactgttatatcttccttactgttcgcatgcatctctagaagccttccgattctttccttcttatctttgtttgcattgagaacatatgaaccagcaaccagcttcccagagtatatgcgaacaaatgtcaatgatcccacaaatgggtcagtcaaac

SEQ ID NO: 11149 - DNA, 937 bp, Oryza sativa
  ref <308>: DATABASE ACCESSION NUMBER: AK108497
  ref <309>: DATABASE ENTRY DATE: 2002-08-28
aatcgccgcctcaaaccggaagcgagagactccccccacaaaatctcatctgcttgctcgtcgtcgtggagtagcggcggcggcggcggcgacggcgacagccgcgtgcacagccaggctaggccagctgctcggcgcaggcggcatttgcgttcttcccgatcgtgcgttgcggacgcttagctcgggatcgctcccgttgccggggcggttgacatggagattgcgaagaaggcgcggagatcgacggggagcgtgtcaggccgcggcggcgacgacgacgacgacgacgcctccgcggcgacggggatgtggtccatcagcgtgccggacgacttgctcggcatgatcgcagcgcagctcgacgacgtggtcgatttcgtgcggttcctgggcgtgtgccgcacatggcgggagacaggggcttcgtcaccagcggcgacgaagccgaacgcgttcctgccatggcttctggccccgcaccaccgccacgacccgctccttcacagtcgcttcgtcttctccggcaccacccgcgactgcccctggccgccgagcctcgccgccggccccgcgcagaccatggtgatcggcgccagcggccgcctcctcgccgtcggcgcctcccacgaggcctgcttcatcgaccctctagccggcgccgtgacaccactcatcagtccccttcctcgtcgtctcaagctggatgggctcacgtgtaccgtcaccccagacatgtccaccgtcgtcgtcagcagcatcccgtctccatgctcgagcaggagagtcccagcaggagagacttctaactgcaaatatattaatgcatatgttaaatcagataaaacagaatagaaaagcaatcaagtatcatagatttcactgttgcaaaaaccttacagttgcttataaagtaaatgcgtagttggataagatc

SEQ ID NO: 11150 - DNA, 1528 bp, Oryza sativa
  ref <308>: DATABASE ACCESSION NUMBER: AK108498
  ref <309>: DATABASE ENTRY DATE: 2002-08-28
cttctgggccgtccccgtggcctttgtcggtatcatctccaacatcaagggtctcgccaacgacgtgcccttccttggctggctcaacagcatccccaacgttgtcgtcggcatcatccagggtgtcttgcccaccgtgctgcttgccgtgctcaacatgctgcttcccatcttcctgcgtctcctctcgcgcctcagcggtgtccccacccgcagcggcatcgagctcgacctccagggccgattcgccgccttccagatcgtccagaacttcctcttccttaccctcatctcgagtaacgccagtcagatcgccacctacgtcgcccaggtcgcttcgcagcccaccaccttccctggcctgcttgccaaggccattcccaagggttcgctcttcttcctcagcttcgtcgccctgcagggtctctcgggtggagcttcgctcttcgcccagctgcccggcctggtggtctactacgtcaagaagttcctgctcgcctcgacgcctcgcaaggtgtggcacatcgaccacgacacgaacggtgttgcctggggcacgctcttcccgtccatgacgctcatcacggtcatcggcaccggttacgtcgtgattgcgcccattatcaacggctttgtcgccttcaccttcctgctcttcttcttcggctacaagtacctcttcctctacgtctacgacaccaagccgcccagcgagacttcgggtctcttctttggcaaggccatccgccacatctttgccggtctgtacgttgagatggtcatgctcaccgccatcttcttcctcgcgcagtcggtcgacgctgcaggcaacaagacgcagtcggcgatccccgaaggtgccttcatggtggtcctgatcgtcattgtcgtcggattccactacttcctcaacgactcgttccgcgagctcgagaccgctctgcccctctcgctgaccgttggcgagtcgcaggcggctgccggcaacagccgcacctcgaacgagacggcgctcaacgagaagagggcgctcaacggccagggcaagttcagcatggaggcgacgcccgcttcgcagggaactggctacgacaacggcgtgcccaacggcgagaagaagcaggaggctctttcggacgagcacgactcggccttctaccacccatggctcacgggcgatcagaagcccatctggctgccgaacgacaagtttggcattggtcgcgctggagtcgcctcggctcgcaaggccggtctcgacgctacctacgagcacacctcggtcaccgagaagggccaggtggagaccgacgcttacgagccccctggtgagcccctcgtctgaggagccgcaaagtctcatgaacgtctgtgcgcaccacgcgcctctctctgctcttgcctcgcgacaacgagcggagcagagcagcgagccggtgcagcacacgtgtataacccctactgaggcagttccgagttttgtggagaatacccgtcccagtaatgcgccaacactctcttgcctccg

SEQ ID NO: 11151 - DNA, 910 bp, Oryza sativa
  ref <308>: DATABASE ACCESSION NUMBER: AK108499
  ref <309>: DATABASE ENTRY DATE: 2002-08-28
aggcgatatgtcaccctatttctgttgctgttcaacgacgtccttaaataggagtacttgtgctacaagcctaacccagagatagcaccacaaatacctctcttttctttaggtgtttacttcgacagcttcaccaccttcgtttacccattgccatggcggctgagaagcgaaccattgggctcggcatggactactcgccgtcgagcaaggccgcggcgaagtgggcggtggataacctggtgaaggccggcgaccggatcatcctcgtccatgtccttcccaaaggagcagatgccagccacaaggagctctggaagagcaccggctcacctttgattcctctgctggagtttatggagatgaacgtgcaggcgaggtatgggatcaaccccgataaggaggtactggagatcctgcaagctgaatccaagtccaagcaggttgaagtactggcaaaagtttactggggtgatgcaagggagaaactctgtgaggcagtagacgatctcaaggtgaatacctttgttcttggttgcaggggactaggacccttgaaaagggccctacttggaagtgttagcaactatgttgtcaacaatgcaacctgcccggttactgtggtgcgtgcaccaaccgtgtcaaatgcctgattctatgctacatgggactgctggaaattggaatgctgggcttgttttgctgttcatccatcttttagcagagaaccttcatctgagttggtgccattgcaaggattggtctctggctcctgcacttagcttttccatgctattggaatgttattaagttgaatcttcggtgtatttccttctgttacttcctatgtatagttcattactactgtttaatggtgaatgttaaagattgccaatggtgtgcttgcttt

SEQ ID NO: 11152 - DNA, 1036 bp, Oryza sativa
  ref <308>: DATABASE ACCESSION NUMBER: AK108500
  ref <309>: DATABASE ENTRY DATE: 2002-08-28
agtacgtctcgctcgaactgcgagcgccatggctcatctcgccaccgtcgtgctcctgctcgtcgcggccgcgcgccaagctcccctcgccgccggcgaccactcggcgaaccctcgcctccccacctgcgcagccgcaccggatgtggctgcgccgcaggagcacggcgacggcggcggcgtcggcggagggaggcggatcctggacatcacgcacgcggtgcgggcggagctcccggttctgggttcgtgcgacggggtgggcgcgctggtgcggctgaagaagtccatggcgaacggctcgcgctccaacctctcggagctccggatgagcgtgcacacgggcacccacgtcgacgcccccggccacatgtggcagccgcacttcgacgccggcctcgacgtcgacaccctcgacctcggcctcctcaatggtcctgcattgctggttgatgtcccgagacactcaaacgtaactgctgaagtaatggagtccctgaacatcccaagaggagttcgtcgagttcttttcagaacaatgaacactgacaagagactgatgtggcaaaaggagagtgatctgagttttgttggatttacagaggatggtgcgcaatggttggttggttacactgatattaagctagtcggggtggactatctatcagttgcttcgtatgaacacatgattcctgcacatgtagtgtttttgaaaagtaaggaaattgtaactgtcgaagctctgaagttagatgatgtggaacctggcatgtacatgttacattgcttacctctaaggctggctggagctgagggttcacccgttaggtgcatccttataaaatgatcgcgtcattgaggatttgaggtactgtaccagctgaagagaccgctgtaatgtaggatttggctttcaatgatcatgtaccttcaaaacagtgttctttttcatgtacgtgttctttgctcttccatttctctttatcaattcaacacttgtgatttttttatatatatcatatctctcaagtgctgt

SEQ ID NO: 11153 - DNA, 1341 bp, Oryza sativa
  ref <308>: DATABASE ACCESSION NUMBER: AK108501
  ref <309>: DATABASE ENTRY DATE: 2002-08-28
atcatcgtgtatacacgagggggagggggaactccgatgtggggaacaacagccgcagcagcgcgccgtctctgcgcggccggcgacgtccgctcggtgctcgcgatgctcgcctgcagggcgaaggcgggggacacggcgctggacatgaccgcgtgcgccgcgcttgtccggaccacgggttctgcaagggcggcgatgtggcggaagcccggagggtgttcgatctaatgccgctcttgggggtggcgcctaatgaggtcacctacaccgctttgatgcacggctacttcatccatggccagagggagaatggtttgtccttgttcgaggagatgagaattgaggagggctggagtcgagccaagcctctacacctaaaactgcttgatcgcagagtggtgcacaagggaattcgagcgcgcccgtaactagttcgacgaaatgcctgtaagggtcatagtacgcaatattattagctctcattgccgcctacgcaggcatggcaagctgtggggtaccgccaagctattggaaatgatgcggagggacagtactcgtctgagataaacatcattacctatagcctccttgttgatggctacggcaaagctgggaagatgtccaatgctttgcatttcttcagcctgatgaaggcggccagtttccaaccagtgcaatgacatacaatatgcttattgccggtttctgtcgtgctaggggcaaatagggctttatctgacatgaaggaacgaggcttggaaccgaccaaagtgacatacacaatactaattgattatttgattcatttgccagagaaaatgacatgaataaggctttttagatgcttgcatgggagaaggcaggtctagaggtggatgtgcgcacttatggtgttctggttcatgcactcttcatggaagggcatatgaaggatgccaggaagctgtttcagtcaatggaccagaaaggtgttgaaccgggcaatgtgatctatgacatgatgatttatggctatggaagagaagggagttgatacaaggctctgaagttgatcatggaaatgaggcagaagggtttggttccaaattccgtaaggtatgccttgatgatgacgatttgttttctttgcaatgatgataaatgtcaggaagctgaggctctgctcgatgacatggtccgtgctggtctgcaaacaagtgaaccaatctgccagtttactgaatgccaaggcaagattgagaggttctactgatggctcttttgtgtaagtaggaattcatttcttttcatgttatagtgaattatcctgattcatgagaaattagaaagatattgcac

SEQ ID NO: 11154 - DNA, 1227 bp, Oryza sativa
  ref <308>: DATABASE ACCESSION NUMBER: AK108502
  ref <309>: DATABASE ENTRY DATE: 2002-08-28
caaaccccttcagtccgtcgcagatcaccccgagagcgcccaatcagtcgactttcagccgccaaatccgcttggaaatgtcgccttctctgttctacaagcccgatgatccgagcacgcacaacatcgagtatgcttctaaagtcagtgggtatgattttgctgcgaacgcagatcgcacctcgagtgacaagtccatgcggagcaagccagacgacactgaagcgcgaaaccctccctccaacggctccactacccgcgacaccacccaaggctccgcgacagacccggacgacgaaaactaccacacagacagcacgaacgacgagcccaagccacaaaacggaagacaacctacgcctcccacagagcactcccaacaccccctcgaaccgcccgccgaattcctcaaaccgccccctcgcgtcggcaaactcgcctccacccctgactcccacacgcccaaaggccccatctgcctcaacctcaactgccgcctgactacctggggccgcgcgccctccaacacccaagtatacccggacccgacggacacgcgcgtcggcaagcgcgcgctgctcctctggttccacgccaaggatatcgacaaggtgcccgagggcgacgactcctggacacggctgccggacctgcactgcgtgattgcaaccgagagcagtgcgggagtatttgtcaacggcgtgcatttgaagcggggcgacgacggcaagaggctgttcggcagggtttattcgggagatgagattgtggtttggaaggagccgggcaaggcgttgaagttctcgtgcgagttttatcagggcgaggggaaggatgcgaggccgagtggggcgccgaggtttaagattgagacggagtcttcagggtggaaagggaagggaaaagagagggcggcggagtgaggggtctagcttcacggatggtcgaatcggttgtacatgtgaggtctgacgtgacacagtcgcgttcggagcggttcagcgcgcatagaatgtacgttaatacatctcttctcttttgttgtcgatcacccagggaaaggcccctctgacaaagcatggaggaaaggactttagaatgtagcatacgaaaaatgaatgattgaaattgcatgtaattaagacactgtattcgcaggtcatcatgatatgagacttgttagattgctaggagctaaacccattgaaatagccatgtctgctgctc

SEQ ID NO: 11155 - DNA, 899 bp, Oryza sativa
  ref <308>: DATABASE ACCESSION NUMBER: AK108503
  ref <309>: DATABASE ENTRY DATE: 2002-08-28
cttcctggaaagggaataatcaaacacgccccgtcacttcgccgcacacatcacagtgatcgcagccgctaagtcaaacattcccagctcacagagtcacacacatggagcaacacagccactgctggtactacggcggcggcatggctgtcaccgcagccgccggtgccggcgcggcgtcgtcgacatcctcggaatcgcagccgtctggctacgactacgagacggcggggagcgccgaggtgtcggcgcccggcggcggcggcgggcttcatcggcgtgcggaagcggccgtgggggaggttcgcggcggagatcagggactccacgcggaacggcgtgcgggtgtggctcggcacgttcgagacggccgaggccgccgcgatggcctacgaccaggccgcgctctcggcgcggggcgcggccgcggcgctcaacttccccgtggaacgcgtgcgcgagtcgctccgcgcgctcgcgctcggcgcggccggaggctcgcccgtgctggcgctgaaggggcggcactccaagcgaaagcggcggaagagatcagagctggccggtgccacggcgacggcgaacaagacgacgacgacgacgtccgccacgaccggcggggagcacaagcagatcgtcctcgagctggaggacctcggcgccgactacctagaggagctcctctggatgtccgagcaaactagccattgatgatgatgcgaacgaacctgcaaaaacatagctctcgcgcgcgatcgatcgcgagttcaatacttcaactcgatcacatccatgccttgcaatgcagtgtgtgaactcgaccgatcagttggtagtggattccatgtgaaaaaaggctgcaacgtaactgcttcaaatcgtgacataaaattggactc

SEQ ID NO: 11156 - DNA, 899 bp, Oryza sativa
  ref <308>: DATABASE ACCESSION NUMBER: AK108504
  ref <309>: DATABASE ENTRY DATE: 2002-08-28
acagcatcacacaccccacttctttgatcgatcgatcgatcgatctgcgcctcttcttctccaagatgtcgacggcggctgcaccgtcagcttcggctccgcggcgaccgacacgacggtcaccagcgacgccgcggcggccgacgagtgggtgcgccgcgtccgcgcctcggccgccaccaccccgcgcggcggcgggggcctcctcgtcggcctcgactgcgagtggaagccctgcgaccacctctggccggcggtggcgcccacggtggccatcctccagctctgcgccggcgacagctgcctcatcctgcagctgctccacgtcgccggcgcccgccgggtcccgcccctcgtcggggacctcctcgccgacccgtccgtccgcctcgtcggcatcggcatcggcgagaacgccgccaagctggccgacggctacggcgtgcggtgcgcggcgccggtggacctggaggacgtctgcgaccgccgcctcgggcgcctccccggcgcgaggaggctggggctcaagggatacgtgagggaggtgctggggctgaccatggagaagcccatggacgtgaccaggagcgactgggagaggcgccacctcgacgccgctcaggtccgctacgcgtgctcggcgagagggtcctcaccaactagtcgccaacgcgatcgccatgcgtgcttgcagtgcacttgggtcgtcatatgatatgatcatatctatcctaaattatagtattgttgccgtgctgttgcaatgatcgatctagctactagcaaaaagctacgcatatagtgtggcaacgttatgtgcaatcggcagctatcttagttatctatcgaaatattattcgatctacttatctgatctatatatggctgcattattgatt

SEQ ID NO: 11157 - DNA, 607 bp, Oryza sativa
  ref <308>: DATABASE ACCESSION NUMBER: AK108505
  ref <309>: DATABASE ENTRY DATE: 2002-08-28
tggacgaggacgacttcgaggtgctgccggggcacgtcgcggacgccgcggcgggaggggcgccccccgcggcgcgcgcggcggtggagcggctccaggtggtggcggtcggcggcggcggggaggaggcggcggcggcgtcgcggggttgcgctgtgtgcaaggacgggatcgcgcagggggagctcgccacgcagctgccgtgcgcgcacttgtaccacggggcgtgcatcgaaccgtggctcgccatccggaactcgtgtccggtgtgccgttacgagctgcccaccgatgaccccgagtacgagaagcggcgggtgaagcggcgttcttctggtgactccgtggcgcaattgggtactcctatgcaaatttgagctaggattgcttggtgatatgtgttggttgcaattccgtggaattgagaaacttcactctctaactgctcattgggatgcttcgagagtgtcatacctctttgatctcaaaactttttagtgcgtagctgtcatgattggtaattgaacggtaagaacaattgctagaatttagaactgctgtaaatacgttgtgctgctccaataatacagaaaattgtttcaatgtt

SEQ ID NO: 11158 - DNA, 942 bp, Oryza sativa
  ref <308>: DATABASE ACCESSION NUMBER: AK108506
  ref <309>: DATABASE ENTRY DATE: 2002-08-28
gagagccccaaacccccaaacctacacaccgatcaaaacggaaacgcgcgccgcaccatctgtctcgccatgggtctcgtcgtttccgccgccgcctcatgtggtcgcctccgccgcagccgcagccgctcgccgcccccggctgtcctggatccctcccagtccccgttgtccttggagcgggaggccgagccggagctgatccgcgtcttccgctgcttcgacaccgacggcgacggcctcatctcggccgcggagatgagggagttctacgggtgctcggtggacgaggccgaggagatggtcgccgccgcggacagggacggggacgggttcgtcagcatcgaggagctccgcgcggtgatggagggcgggggattggacgcgctgcgcgccgcgttcgacgagtacgacgaggacgggaacggtgtgatcacggcggaggagctgcgccgcgcgctgcgtaggctgaacctcgacgggatggatctgacggctgagcagtgcgcggagatcgtcgcggccgtggacagcgacggcgacggggtcatctccttcgacgagttcaaggccatgatgagcaagcaggcgtgatccacccgaccggccatcgtctcgtcactcgccgcgcatcgtcgtatgtacctactactactgaacttagccccagttgttaatcaggattcgctttaggatttcgcattctaattgcttcgatctattagcctcacccaactaagtttgtgtggcgtttttagtggtcagattgaaactagttgggacttttttggtagttcgtgtggcgtttttagtggtcagatcgaaactacttgggacttttttttggtgaaagcatagttaatttgacgaatactgatatggatgagtccaaatgtattggaaaatctcaatgaaacgagcgggtttttttttttttggctg

SEQ ID NO: 11159 - DNA, 635 bp, Oryza sativa
  ref <308>: DATABASE ACCESSION NUMBER: AK108507
  ref <309>: DATABASE ENTRY DATE: 2002-08-28
ttcacaaagaatagcatccacacccatgacaagaaagcaggagagagagaagggggagaagctcgccaaagaagccgcatctgcgccgagtccgagctcccgcgccgacggggagagaggagggcgtcgccaacggggagagaggagggtgccaccgcggcccccgccttcacaacgggctacgctcgctgccggccgccgcgcccctcgatctgcacccgccggaactcgccagccacgccgccccccgatccggaagaggaggaggtgaggcactcgagccgtcccgctgcccagcgctgtcaagttcccgccgtcccctactactgcgccaccgagctcccgtgtcccccgctactgcgccgccgacttcgccgctgttgcaccggcgagcaccaggccccgccgctgctccgcccggctgccccggcgctgtctccgctcgggctgccgctccacccggcagctgctttgcccgaccgccccgccgtcgtctccactcgggctgctgctccactcggccaccccgtcatggtggaaggagaagaggagagcggcgtccgagcgtgagaggagagagagggggagaaggaagcgtgggtctcgaggaaagagagagaggtggaaaagtggag

SEQ ID NO: 11160 - DNA, 991 bp, Oryza sativa
  ref <308>: DATABASE ACCESSION NUMBER: AK108508
  ref <309>: DATABASE ENTRY DATE: 2002-08-28
cccgctgatgtacctcatagttgggctgtaccttcctcaggtgtcaaatgtgatgctgtacctggtcgttcaaatcttacctccatctcggtacaacgagaaggagtttactatggtcagtgcagtgagatttgtggaactaatcatgcctttacgcctatcgtcgtagaagcggtgactttgaaagattatgcggattgggtatccaatcaattaatcctccaaaccaactaaaccggggaagctgaagcggaaatgcaattctcgggtgagggaagggggaagctccaggaaggcttcgctcgctcgctcaaaaagctctaacgctcgtttacgggtggagtgcataagaagcccttattgaagtagggcgaggccttactacacgagctcgtaagtcaagcacggaacgagccttgtctacgaagcttcgcttcatcatcttgcttgcttctggcgaagcttaacgcactataacataggcatgcatgatggtatggtagggtccaaagatacttttaaggccgaccactacataggagcgataggaagccaagccgtcaaaaggaaaggcgagcagcccttattgcaatagcaaacggcctacttatagccctatttaggaattgtaggccatcttttgtagacaggggcaaaatgctggcagcttgtttatggtatcatggctgacagcacatttggcccatgtatagcttgttccagtatgtggaacctttcaagattttgagacgcttgtagctgattagtgattaccccttaccgtcggttttgggatttgccatccggtatggagtgcacgtgcagcttcatcagatagagtctcctcgactgatcgctggaattggtcagattttgcgtgaagcgtggaattcatcaaatgtttaccactcatatttatgaaatattgtcagcattcaatgaatctgtgttaaacaggtcatactaactaatctttaaacgagtctattac

SEQ ID NO: 11161 - DNA, 615 bp, Oryza sativa
  ref <308>: DATABASE ACCESSION NUMBER: AK108509
  ref <309>: DATABASE ENTRY DATE: 2002-08-28
agtcgtcactctgcccttgcgcgccgcctccgcctccgccgacgccgatccccatctatcccgcgagcgagcacgccgccgtcgttcgtcctgccgcatcctggtgagcgcatcctccgccaccgccgatccccatccatcgcgcgagcagggtcgccgccgtcgctcgtcctgctgcttccgccgcatccgtcctctttcccatctctctctctcgcactctacccacgccggcctttttctcgaacttgcgttaaccctagcttctgttctagaaatttgccttaaccttaatactaatgacagtttgatggctcccaaaaaggtttgggggttcaactgaacccccccatgtcctatgttagatccgccactggtaatttgtaatcagcaagtcgccggtcagtggtcggactgatggaggagggagttgcatttcttggaaaccattttcagggaaggttgagattgagcttggatgtcttgaaactgtgtgcttataaagagaaagaccgatatatcgcatatcatcatcagacatttcacataagttacatatacacttctgatttctgtaaccttcaccaaattgaggtcaatatatatactacatat

SEQ ID NO: 11162 - DNA, 962 bp, Oryza sativa
  ref <308>: DATABASE ACCESSION NUMBER: AK108510
  ref <309>: DATABASE ENTRY DATE: 2002-08-28
gctccgcatcggcagcaaccgttgcgaccaattcccccaattccattccattcccctcctcccccggagagaaaccctagcaatggagcccaaatccaccacccctcctccgcctcctccgccccccgtgctgggcgcccccgtcccttacccgccggcgggagcctaccccccacccgtcgggccctacgcccacgcgccgccgctctacgccccgcctccccccgccgccgccgccgcctccgccgccgccaccgccgcctcgcagcaggccgccgccgcgcagctccagaacttctgggcggagcagtaccgcgagatcgagcacaccaccgacttcaagaaccacaacctccccctcgcccgcatcaagaagatcatgaaggccgacgaggacgtccgcatgatcgccgccgaggcccccgtcgtgttcgccagggcgtgcgagatgttcatcctcgagctcacccaccgcggctgggcgcacgccgaggagaacaagcgccgcacgctccagaagtccgacatcgccgccgccatcgcccgcaccgaggtcttcgacttcctcgtcgacatcgtgccccgcgacgaggccaaggacgccgaggccgccgccgccgttgccgccgggatcccccaccccgccgccggtttgcccgccaccgaccccatggcctactactatgtccagccgcagtaacattttcctaccgtatagcttcaagtttatttagcgatttttatttatggaatgcttttctgctgttgtcgtagttgttattatgttttgcttgttgttgccgtgtaataactagaagatgtgattatcattgtgaggagcctcctctcggtgtataaacaatccgatttgaggattgggcgagctttgttgcgattgaggaaggctgtatggtggttttgatgcatgtctaacttatatcacaatgaattatttattaccc

SEQ ID NO: 11163 - DNA, 2360 bp, Oryza sativa
  ref <308>: DATABASE ACCESSION NUMBER: AK108511
  ref <309>: DATABASE ENTRY DATE: 2002-08-28
actctcgtctcacaaagtcaacgctcgtactcccagcaaagccatccataatcggagcgggatgatgcaaccattcaccacatccccagtggctcacgctcctagagcaggcaggctctcatggaccggcgcttcgtgccggcccagcagatgctgggtgagagtacggtccatgaggaacgggtctaccgagagcctggaccatctgcagagggcctcaaaggctagaccgcggcagcagcaggggactcccagcgccaggaggagagtcatccaaaccacgccatttggtacgtatagcaaaagctcttttggtgtttgtcttcaattttgtgttaacataattgagcttcgtgtggtttttggtttgagaatgcggtcacttcttctgttgcttctcctttaccggacgtaagaaatgccctagtctgtgtgcaagatagttcaatctcagtggctgccttagttccagttcttgcatgtgctgttaatgatctagagactgtctcaactgaagtggtacctgcgactgtttccttggtgtctgttatgcctacaagagctgctgcggttgctgaagttgctcatgctactgttgagtccgttgttgttccgtcctctgtcagcgaagatctctcgccagcggtcaaccttagcagtatgccacctcgtctcagatgcaagaataaaggtttcctcgcttggtacggcgcctgtccatcttcgaggcagccaagctcggtccccccacaggaacctagggatatcttcgtctgttcggaacagttgtctgccaacccaattctgtctccacctcaggatcctgatagcacgagatcgccacctccgacattgagtggcccctcagctgctgagcaaatcagaagagctctagcaggtctaagtccagaaggatctattcactctgcttcactctctccaggtcgggtgccagtcattacttccgatgacactactgccgcgcaggactttgcttttggggaaccagatccagttaacatatcaggagacagtgacgatgatattcttgatatctttatcccctttgttgacatgagagtaactgctcattacgccactgcttatgttacccctccatgtgaatgccctggcagagtaattcgaaaagcaatgcaggatgctcaccctcgttttcagttcactctcatctcagcttgtagaggtgcaatgactctaagatttattcacagtcaggacagagacattgcagttgatcaccaggagaatcttacagctgaaggccacttggttaggcttgaacggcctgaggacagtgcggctcgcttcattcaacacaacactatgctgtccgaactagactgtattgacttcccgccagagatgttgttccctaacaagataagaaatgcttttgaaaattacggcgagctgatggaagtagatgatcaatgcctctatggggacgaacaatcctctctgcgtcttgttgttctgcactatcctggcaagaggatgagccctagatttcggctgcgctacaatttggggattgtctgcactgtctatgtcagggttctaagaacatgggagctggccatgaacgtggatgaagatggaaattacattaagcattatgaacagtttctattccctcatcagctggatcctccccgttcaggaccaactgttggaccagaggcagagttgggcaacttgaatcaggctccttcaaatcaaatctctaacaaccaaagacttcagaacaggggaagattgcttgcgattctgcctgcagctagcactgtcttcattgaggaaatctctgatacacctgaattttttgtccctccgtcaatccattctgctccctccagtatccatgactgcctccaggacctcgtgccctcagatactgaaaatgaacatgagctttcagcccggaaacgcagaaggcagaagaaacggacaattgattcagatgtcaagaggcgatatagcgaaagactggcggccaaagaaggacatttgtacatttcaatggaatccaaagcagccagagcgaaaaaactaaaggaacaacttgccaaatgctcatccaaactcaatgacgcggtacacaagcacaatctgctcgaccttaacttcaagactactccgaaagcgttggaagatctggctattgcttgcagtttgaatgatcacgatattgcccagcttcgaaaggtgttctcgtcagtggactgatggtgatcaataccctcaatgggatggacaagcccagcatgcgtctgcttctctccctttgttatgttctttcagctcttcttcagttctctagtgtcttctctcccttcgtt

SEQ ID NO: 11164 - DNA, 934 bp, Oryza sativa
  ref <308>: DATABASE ACCESSION NUMBER: AK108512
  ref <309>: DATABASE ENTRY DATE: 2002-08-28
atcaaccaccctcccgtcatgcgcaagctgcagtgcgagatccgcgcggccgtcggcgtccccggcgcctccggcggcgccgaagtcaccgaggaccacctcggcgagctccggctcctcagggccgtggtcaaggagacgctccggctgcacgcgccggtgccgctgctcgtgccccgcgagacggtggaggacacggagctgctgggctaccgcgtcccggcgcggacgcgggtgatcatcaacgtgtgggctatcggccgcgacgcggcggcgtggggcgaccgcgcggaggagttcgtgccggagcggtggctcgacggcggcggcgaggaggtggagtacgcggcgcagctggggcaggacttcaggttcgtgccgttcggcgccgggaggagggggtgccccggcgccgggttcgccgcgccgagcatcgagctggcgctcaccaacctgctgtaccacttcgactgggagctaccgccacatgccgacggagcggcggcggcgacggcggcgaggctggacatgggtgagctgtttgggctgtccatgcgaatgaagacgacgctgaatctagtcgcaaagccatggtcttccgatgtttgatgtgttcagtatgaaagctgctaggcaggctagctaccatctgtgcctattgcaacacataatttgtgtagcgagggtcatctatatttaaggggtaagtgcatgtgcacctacacgtgcttcaccgttagatttgctttgacattagtgtatactttttatattttagttaagcacaatatatattatgttctcggtataacatgaattcataatatcagtaaagcatttaatggcttagtacgtagatagagtgcacatgaacttagagcaatgataatagtggggcagtcccaacctagaaattatctaatggttttaatcc

SEQ ID NO: 11165 - DNA, 876 bp, Oryza sativa
  ref <308>: DATABASE ACCESSION NUMBER: AK108513
  ref <309>: DATABASE ENTRY DATE: 2002-08-28
aaccgacttaacttcctccctctccctttataaaaccctaaccgccacgaccccttctccctcctcgccgatcgaatcttcgccgccgccgccgcggacctcgccgccggcgccaagcaaggtatggacacccgagtctgcggcgacgaccaagcggccgaagcggcgccggtgcgcggcggcggcgaggacgcagtcgtcgtcgtcgtctccggcgagggggcggcgtcggaagctggtgctgcctctactacggccgtcgccggcgatggcgtcgtcgaagcttctgcctctgtagacctcaccggcgagaggggacgacgccgcgatgatgaagcgcccaccacggcggcggcggtggcggaggaggaagcttctgccccgccggccgtcgtcgtcgccggcgccggcgacggcgacgacgacgacgaagacgggtacgtgacaccgacgtcgccgcgccaacggctgcagccgccgacggtgtgcccgccggcgccgaaggcggcgcgttcggcgccaacgcggctgcctgcgaggaggtttgagggagctctcgtgatggcggcgtcggcgtcgccgccggggcggaagagggttcaggcgaaccccgactccgagtccgacgaggtcgtcgtcgcgttcattcgcagcctgcggcagcggctgcttccaccggaggacgagaagaagaaccccatgtagactttttaaaaatattttggtttggtttgattaaaggtagattggtttttttttaaaaaaatgaatttagtttatctgaatttcaatttttttggggctaaattcagataaatttgaaactgttggcgggatgcccatcctagctgggacccagctagacctgaaatttcc

SEQ ID NO: 11166 - DNA, 813 bp, Oryza sativa
  ref <308>: DATABASE ACCESSION NUMBER: AK108514
  ref <309>: DATABASE ENTRY DATE: 2002-08-28
atgagtatatcctagaaacattggaactgagtgatccaagatcactaatgcagtatcttgcataccaagatttgtgtgctgtatctgaatgtaacttagaaccatggcgtcgagcggccttctttgaggaatctggtgagacttacaaaagaattgtgacagcttgtttgaagccgcttgaggagttcacgtcaaaaattgctgaagctcttgaagggttttctagtgagaaaccagaattgttgtcacaacagttcaaacttgctgctgcatttaatgattcacagatatgcacatggtgcgctcggacattgtcatctttaactgcacggtcacgccaagaagatcggtatggagttgctcaactcacaggctgcaatgctgctgtgatgtctactttgctgtctgcgctagttgccgttgaggcctgtttggggaagaaaactaacccacaacctgcgcactcactgggtccagcaagcattaagtgggctaacttttccaccgggagaaaaggcaatgtaactgccattgcaagcacgcaaagaggtggtcttcacactaaagctttttccatggccgatgttattcgaacttcgatctatcagatggtttcagcctttgagcatgacatgcgggcaaatgctaaagcatcaagtttggagaagaactggatcagtgaaggaagaaaacctgtatttggttcacaggctgtgttggttcagaagctgagcctgtttattgagtaccgtgctgtctgaacttggcatcctgtaccaaatccttaccggccatttaaattattcttggatg

SEQ ID NO: 11167 - DNA, 1128 bp, Oryza sativa
  ref <308>: DATABASE ACCESSION NUMBER: AK108515
  ref <309>: DATABASE ENTRY DATE: 2002-08-28
aaaagaaaaagaaaaggaagaagaaaaactctcgtcggcggcgacctaaacgccggcgagctgaaggggaagggagggaagccgccggcgaccacccaccgcacctaccaccacctcggcctcatacaccctcctctctgtgcgcgtctttctctccgccggactgcggcgcgggcggaagcggggtggttttagggttttggccggcgaccagatggcggcggaggcggggatgcgcgtgaacgtggcgagtctgctcgccctcggggacgacaccgtggagttgctcggcgagaggaaggacggcgaggccctcgcgcaggcctgcgccggggcgcggatgctgcgttccgcctgccgctcggagtccgacgacctcgaggtgcaaatgaaagagtatcaggaaaaaataaagtcctgcaaagaaaagatagaaaagacaaaatctgaaacaattgccgatgatgaactgaatgctctgcaaaaagagatggaggagaaacttcaagatgagcaacgccttcgccaggatttaagagcagtacgtgatgagcttgataacctagatagccaaagagattctatagaacaaaggaaggaagctctaaggaagatggaaaaggaaatgatgaaagcacaaaatatgctttccatgtgtgtgtcagtgaccaaaatcatgccaaattttgaagacaaggacaagatctctggttatattgttgataagaacatgaagaaactagagaggttcgagtttgacaagacgacgccccctgttgatatctgcaacaacctttggaagatggtttagatgttgcgtggagataacggtcgtggacgatggacctcccatcgaacatccctttttttttgttatcaccgttgaatgctgccaaaggaccaagatgcgtccagttcgcatttcatgcagagatctacagaagtgctatctgtttgtagatttgctaagatcaagatctctttagctagtccttggctcgttgccatgttccttttagtatgtgtaagtactaagttgtataacatttcacatgctattgttattccggaagctgctctcacttgcaaagctgcaagtttgcagcccaatgccatttggtttcttgg

SEQ ID NO: 11168 - DNA, 1078 bp, Oryza sativa
  ref <308>: DATABASE ACCESSION NUMBER: AK108516
  ref <309>: DATABASE ENTRY DATE: 2002-08-28
aagctgagctaggaatcctgcagctgggtggcagtagccgtgtccatggcgcgcgcggcggcgacgtcgacgtcgacgccggtgtcggtgtcgggcatggtggtgaccctgacgacgagcggcgtgcggacgcggtggtagccgtcggaccagacgatctcgccgaagtcgtaccggccgcgcgacagcttcgccggcgcgacggtcacgtagtaggaggccgtgtcgcggtacggggagaaggacagcgccggcggccacacggcggcgcgcgcgccgtgcgggctgacgacggcggcgcggtacacggcgtccctccggggccccatgttcgtcaccgtccgcttcacggtcaccgtcgcgttgagccgcgggagcacgatggccgggtagttgaggtcgtactccggcggcgccgcgccgccgccctcgccgccgcagctcgtgtcgagcgacggcgaggggagcaccatctggcgtatctggtacctggtgtagccgaggccgcagaggaagaggacgtggtcgcgcacgccggcgtcgtagacgaggcccgggtccagcgcgcgcagcgggtcgacgtggccggcgccgacgtcgaacgcgtccgccgccttcagcgtcccgccggccagcatcacgtcggacgtgtcgtcgtacatgtatgccgtggtcatcagcgccgacttgatggctgccggcgaccacgtcgggtgcacggccctgacgacggcgacgatgccggagacgtgcgggcacgacatggacgtgcccgagtcgaagttccacgtcacggagcgcttgtccagcgggatcaccgtcggcgacgacatgggtggccacgccgccaggatgttcacgccgggagcggtgacatcaggctgcacccgacgaatcacaaaccaaaacacacgaataaatggttttgcaatatatccgattttctcctaaatatttatcaaatgcaaatatagtttagttatattgtaacttatatgtaattacaatataatttatatgtaatttttacatagttttgaaaaataaaatcatagtgtgcgtatggatgaggacattt

SEQ ID NO: 11169 - DNA, 945 bp, Oryza sativa
  ref <308>: DATABASE ACCESSION NUMBER: AK108517
  ref <309>: DATABASE ENTRY DATE: 2002-08-28
tggccggcccccacgcggccacgccggcgtcatgagtccctgtcgccggcgcctccacctcgccactgccggcacctccacctcgccactgctggcgtcgtcctccccgacttctccatcggggttcatctcctcgccggctccgcatccatcgcctcgagtcagcgtgggcggtgacgctggacgagctcctccgggacgaggccgctgccgccgccggggggtggaggtggacgccccgtgcgcgtcctcgtctacgacgcgttcctcctctgggcgcgcgctgtggcggtggcgttcacgttcttcacgcagtcgtgcgccgtcaacgtggtgtacggccacgcgtggtgcggccgtgtacacgtccccgtggaggccggcgccatcgcgctgatcggcttgccggcgctggagctggagggcttgccgtggttcattaaggtcggccccggcccgtacccggcgtacttcgacttggtgatgaagcagttcgacaggctggagctcgccgacgacgtgctcgtcaattcattctacgagttcgaacccgagctgagctagtaaccccatcaaagctacagtagcaactatctgctggtgataatgaaattgcagacttgcctgcagcttgcttgccggcgtcactgttggcttgcagctggcccgctgctgtctgccgcctcccgtgcacgcccgcgcagtgtcacgccatcgccatctactgtgcgtgtcacgacatcggctcggaacacaagtcaacccaaaagatcggaccgaccatgtacccacagagtgtgtggacccggtagtcagagaccgggccacggtaagagagagagaccttgagcacattgctataaaggtcggcaggattggagagagagggatatgaaaaacattgtacacaacaattcccaattgattcaaatctctcttcctgct

SEQ ID NO: 11170 - DNA, 1037 bp, Oryza sativa
  ref <308>: DATABASE ACCESSION NUMBER: AK108518
  ref <309>: DATABASE ENTRY DATE: 2002-08-28
ggacggtcaaacagaaaccaaccagcttttacgtggtgagatcaaccctaatcccctcatgatatgctattataatctcttgagtgggatactacttgggatgcaaggaagcaacaagtacttaattcggttagaatttgtagcctccgatcatgcaggcgtttcagaaattcagagtcctatagctctgcgatgagttcagccatggcgtcttccatggccaagaactcctcgcctttcaaggtcgtgctcggatcgtcgtcgccggcgcgccgcgagatactggcggacatgggatacgagttcaccgtcatgtgcgctgacatcgatgagagggccatcaggagggagaagccagaggagcttgtcaaggccctcgctgaagctaaggcagaggccatcaaactgaagttgcatggggaagactctgctcaagagagagatcagcctactattctgatcacctctgaccaggtcatggtgagcaaagggatgataagggagaggccaaaaggccaggaagaagccagggagttcatcaaggggtattcgggtgataaagcattcgcagtgaactatgttcttgtgactaacctaagcaatggagcttccaaaggaggatgggatatacctgaggtagctgcacattcataatctgagcttttagttatgtggttatgcacatagtgatgacggctgcgaatttgatctcgagtttgttttgagttcaactgaaatgatctataccaaatcatcaaatcggtgcatgttttggtttctgcagatctattttcaccacataccagaggatttcatccaaagtgtgtacttcttaattcaattaggtgaaggaaggacacatgacctgcgtggctggaggccttaagctgacacatccttcggtgctgccattcatcaagcagttagtgagcaattctttcgaaacaaccaccattgctagtattactactcttagaacggccaatctgtactggacagtgtcactgcaacgtctgaacaacaataatatcgaatcc

SEQ ID NO: 11171 - DNA, 1640 bp, Oryza sativa
  ref <308>: DATABASE ACCESSION NUMBER: AK108519
  ref <309>: DATABASE ENTRY DATE: 2002-08-28
acacacacaaacacacatcattttgtttaccaaacacactgaaacacggagcaatggcggctttgctcctttggctgtcatggcttctactctccctcctctccatctacctcctcgacctcctcgcacactcacgacgctgcctcccgccgggaccccgtccgctgccgctgatcggcagcctccacctgctcggcgacctgccacaccgctcgctcgccggcctcgccaagacttacggccctctcatgtcgctccgccttggcgctgtcaccacggtggtcgcctcctcgccggaggtcgcccgcgagttcctgcagaagcacgacgccgtcttcgccacccgttcaacccccgacgccaccggtgaccacgccaggaactccgtcgcctggctgccccccgggccgcggtggcgcgagctccgcaagatcatggcgacggagctgttctccacgcgccggctcgacgcgctccacgagctccggcaagagaaggtggcggagctcgtcgaccacgtggcgggtctggcgcgcgacggcacggcggtggacatcggccgcgtggcgttcaccacgagcctgaacctcgtcgtgcgcaccatcttctcgcacgacctgacgagcctcgacgaccacggcgcgtcgaaggagttccagcgactgatcacggacgtcatggaggcagtcggcagcccgaacctgtcggacttcttccccgcgctcgccgccgtcgacctgcagggctggcgccggcggctgtctgggctgtttgcgcggctgcaccggctgttcgacgccgagatggaccatcgcaggctgcacggaatgaaggagaaggacggcgacttcctggaggtgctcctgaggctcgccgcgcgggacgacgacacggcgaggctcgacggcgacacgctccggtcactgttcacggacttgtttactgcaggtagtgacacaagttctagcacagtagaatgggcaatggccgaattgctacagaacccaatatcaatggctaaactatgcgatgagctaagacgagttgttgggtcaagaagaagaattgaagaatctgaaattggtcaattgccctatttgcaagctgtcataaaagaaacatttcgactgcattcaccagctccgttattattaccacggcaagctacgaggacgatccaaataatgggttatacaatacctaaaggtactagagtgttaataaacgtgtgggccatgggtcgagacgaagatatatggccagaagcgggaaagtttattccggagagattcctagaaaggacaattgactacaaaggtggagatttggagctcatcccatttggtgcgggacgacgaatctgccctggaatgccattagctgttaggatggtgcatgtacttcttgcatccctgttaattcattttaaatggagactcccagctgaggtagaaggaaatagaattgatatgacggagaagtttggtgtgactttagcaaaagccaatcatttatgtgcgatggccgcaccaacgtaagtcaatcaggctcttgtgggtaaaaagtaatagattgcctttacaaatggaaacattccatcaggaatgtgattattggtgcaaataaatgaatagttttgt

SEQ ID NO: 11172 - DNA, 896 bp, Oryza sativa
  ref <308>: DATABASE ACCESSION NUMBER: AK108520
  ref <309>: DATABASE ENTRY DATE: 2002-08-28
gagagtaggaaagccgtgtccgtgagctactcggatacgagccgcggcagaaggcaacgcggcttcgaagccctaaccccccaaattcgctgtcttgactctgctatcgaaacccgcgcagctttcggattcgagggcgaggcgcgcgcagggaacgcgatcgatcgtagccatggccgccgccggagaggagaaaccgttgccggcggaggaaatccaggggatcaacgacgaggcggagccgcatcccccgaggcgtaagcgtaacgacgacttactccacgacgaggagttccagcgtgtggtgcgcggcatcgtcatcggcccggataacgttcccggcggaggacatgcgttgaggattatcagagaccctgctactgcgttcgaagagctcctagagtgctaccgcaaggccggcctgctagaaggtcaagtctggaagcgttgtaacatcttcaaggggttggaggggttggataacttgcaggatgaggtgaagatggaggagacagtgaaagaggaggaggaggaggcgacaggttgccgaggcagagacgcgagccctgatcgtcccgatgagctggcgaagaaacgacgcttggatgggccttgagctggattatggatgcaacctgccatttgagctgagctgtatttagtaacactgtcaatttttacaacagtagagagattcattcagtaactagtgattgttctgcgtgataacgaccgcagttaccatccctagataatactagtatagctagcaatactggtgagccacaatcagcagtaacccatgttccaaattgacccttaatttgtaacttcgttttctgaagactgaggtttagttgaatagttgatgtcatagctggtcttgtggcctatcg

SEQ ID NO: 11173 - DNA, 781 bp, Oryza sativa
  ref <308>: DATABASE ACCESSION NUMBER: AK108521
  ref <309>: DATABASE ENTRY DATE: 2002-08-28
acaaccttcccaacttcacagcgcgctatttcgctcttcgtaaagacaagacaacatgcccttccttcctcgcaccaccgccttcgcaccccgcttcgtcgctcgcgcggcagcgccccgcgtcgctctcgccagcaggacgcccacccgctcttatggcattggctcgaacatgtccgacaatgacccggagcggatcgagaaggaaaagaagaagactctgagcggcgatgtcgactctccgcatggcgagcatgcgccgcagttcaacgagaagctcgcatccgactcggaggcgggcgtcaaggcggacaggaaccccgtctcggacccttcccagctccagcgggataccacccagcgcgcacagaaggagcacaacagtcaaggttccgaaggcaagaagccaactgctagccccaacgacgcacctacacacagcgaggatgcagttcacgctgataggtactcgactagcgaccctaacaagctccagaaggagacgaccgacaaacttcacggttgagctccatcatctcgttcgtgattgcgcccgccttggaagcaacgagccgtgcgtagccgcgtgtaggcttcatttcggaaatgatgctgcaagaacgtagagaatgagaaaggaggaacgaggaacggggatcgagaggggttgttttgtttgccgttttgcgttgctgcgtacatttggcaggaagctagctgctagctgcttgcgttttgatcaaactcgatgacgatgataattgcatgctattgaacattc

SEQ ID NO: 11174 - DNA, 1091 bp, Oryza sativa
  ref <308>: DATABASE ACCESSION NUMBER: AK108522
  ref <309>: DATABASE ENTRY DATE: 2002-08-28
aaagcgctctgcgtgagctgagctgagctaggcgtcgcgcgcgatgtcgtcgctgtacccgtctctcctctcgctgagcgagagccccgccgagtaccggcaggtcggcggtggccgctacgcgggggaggacgtcgtcgacgacgacgacgacatggctgccgtcgccgacgctgtgtccagctacctctccttcgacatggacgacgtcgagtattacacgccggaggtgggcttccactcaaagcagcacaacccgccgccagttgctgcggcgccactggaagccggaggaggcagggagcaaagccggcgggaagccgccgtcaatcttggcaagatggacaggggaccggcgccggtgagcggcggcgcggcgactggcggcgtgccgaggagcaagaacggcagcaagatcgcgttcaagacgaggtcggaggtggacgtgctggacgacggctaccggtggaggaagtacggcaagaagatggtcaagaacagccccaacccaaggaactactaccggtgctcgagcgaggggtgccgcgtgaagaagcgggtggagcgcgcccgggacgacgcgcgcttcgtcgtcaccacctacgacggcgtccacaaccacccggcgccgctgcacctcaggccgcagctgccgccgcccggcggctactcgatcgccggggcaccggccgtggtggcgccgcacggccgcctcgggctggaggaggccgaggtgatcgctctcttcaggggcaccaccgccacctcgctgctgcttccttgaccggccagtccgacgcggcggcgccggcggcgacaactgactagctagtgtgagtcctgggccgtacaggaatggacaattagtttgtctccgatcgaggaccaaggcgacctgaatcaaaattacggcccatcgatatatagtaggtcgtttaattcatcgaaattagacgaatttcatgtacaattattgcattacagtattatttgaaacagtattgtatatatttgctatacaatttgatggatcgtatgtctttagcagttgtaagtatattaatctatagatctagtagttcagccatgat

SEQ ID NO: 11175 - DNA, 1050 bp, Oryza sativa
  ref <308>: DATABASE ACCESSION NUMBER: AK108523
  ref <309>: DATABASE ENTRY DATE: 2002-08-28
cttttcgtttcgtttcgccgcccgcttccgccgcgcgcgcgcacgtgcgagaggggagagggggatagcgacgccgcgcccaaaccctactactactcctcctcctcctccgcgtcctcgccggccactcgtcgccggcctccgtcgccgcctccgcctcgtcatccaccagaaggcgttcgtgcgcacgggtttccgcgcgatgagggtctcctcggcgtccagtacgccgccgccgccggcgttcgcggccgcggcgtgggcggtggtgctgctcgccatgctccgctccgacgtcgccctcgccgccgccgcatcctccaacgacgacacaggtctctcgccgttgatgccgccgccgccgctcgccgccccggttcccgcggcggtttctccggccccggcgacgcctcccgccgtcctctccccccgcaagctcctccgcccgcaaggcgcggacgtcgtcggcgtcggtttcgtctccggcagcggcggcggaggaggaggagacggagtacggacgcgccgggtggacgacgggtgcgcgggggcggacgacatcgcgatctaccaggggagggcgacgccgctgccgagcggggtgccggcgtacacggtggacgtgatgaaccggtgcgccggcggcggcggcggcgacgaggagtgcgccatcgcggggatccacgtgcggtgcgggtggttcagctcggtgagcctggtggacccgcgcgtgttccgccggctcggccacgacgactgcctcctcaacgacggccgcccgctcctcgccggcgagaccgtctccttcgagtacaccaactccttcccctacaagctctccgtctccgtcgcaacctgcgtcgtcgaccccgccgccccatagccgccgtcaatcgccgcaaggaaaaagtagacaaaacaaaagaaacgaaagagaaacagtagtactagtgacatctcttgccttactagtttttttgttcttttctttttttttgaccccatgtcagtatcactcacagaacaacagctcaccatttgctacgcctc

SEQ ID NO: 11176 - DNA, 627 bp, Oryza sativa
  ref <308>: DATABASE ACCESSION NUMBER: AK108524
  ref <309>: DATABASE ENTRY DATE: 2002-08-28
aaagtcatatctcaatcacctatattctccggtttaaaagagagagaagagactaagagtctcagtcaagaccactctatactcaaataccaaccaagaaccatcacgatgggcacacaagcaactaccgaggaagtccctgcctacgaggatctctacgacgagcgcccctccaacgcagctacaggggtaatttatctctcctcccgcccaaataccttcaaaagcaccattcgctcattattctcttcgatggggcagtattctcgcattgccacggatcctggtgctgatatcgagcgcgaggcacacgagcacctggctccgcctagccctatcatgcttgcacctcaacccaggccagaaggacatggacattgcgaggtttgcgataagatgatggagaagagtcgggctcggcaaggccgggcgatgatttgcaggattgtgtctaggacattgatcatcgcgggcttgtggttgactatttttgggatctttgcggttatgttcttgggtgggcgtcacagatattgatctggggtgatgtggatatgatgatgtttcatttgtatttgaactggatgtcgaatgtgagaagccgtctgtgcacggtcagttgttacg

SEQ ID NO: 11177 - DNA, 1086 bp, Oryza sativa
  ref <308>: DATABASE ACCESSION NUMBER: AK108525
  ref <309>: DATABASE ENTRY DATE: 2002-08-28
tgtacacaccgcccgtcgctcctaccgattgaatggtccggtgaagtgttcggatcgcggcgacgggggcggttcgccgcccccgacgtcgcgagaagtccattgaaccttatcatttagaggaaggagaagtcgtaacaaggtttccgtaggtgaacctgcggaaggatcattggtagatggcaaaaacggggacgatgagctcgagctcgattgacctggagctccttggccccgccctgccttgatccgacgacggagttgtagacgacactggagggagccggctgagatatagagcgccataggggatacctccgcgctggtcctggagctcgacggcctcatatagacgagtagggacggcggcggaggtccacgccgtcgctacatccgcggggatcagctcggtcggctcaacgccgctctgcttgtcgccagcctcctttacgtaccgcctctgcgcgcgatcaaccgctcgcgtcgtctcctcgatagcctccttgccgcttccgccaccacggccggtcgcaccgccccctcgacccttccgccaccaccgcgacctcacctcatcgccgacccgctcgtcgccggagatcggaggcggagacaacggagctggtggtggcaggacggccggcggtcagcccgatggcggggcctccggctcctcttaacccgctgccgttcgaccacgccacctccgctgcctccgtgatgcatgcagagctggccagcttgaagaagccttgaacccagtgaccaaagaagccagttacctcttgcatttgcaagcggcctcatccatcagttttctcagcccaaatccatgctggaaagcacaagccacaacaatagtagcgcagtaggtgcagtacagtggagtacgagagaataagagtgaactgggattgaaagcagaggtgggctctcaaaaaaaaaaaagagaaagcaaagcataggtggaacgacggggcatatgcatgcatggaggatggagcacgtcactgctcccaattcccaatggccacctgctaacttacgcgtgccatcaactcctaacaagttttcattttcacccct

SEQ ID NO: 11178 - DNA, 792 bp, Oryza sativa
  ref <308>: DATABASE ACCESSION NUMBER: AK108526
  ref <309>: DATABASE ENTRY DATE: 2002-08-28
accggtcggccatctccaagccggactagctctccgaggccacctcgcggctgcgccgcaacctcgcctacttccgcgtcaactacgccgccgtggtggcgttctccctcgcggcctcgctgctggcgcaccccttctccctcctcgtcctcctcgccatcctcggcggctggtgcttcctctacgtcttccgagccgccgaccagcccgtcgttctcttcggccgcaccttcaccgaccgcgagacgctgctcggcctcgtcgtcgcgtccgtgctggccttcttcatgacctccgtggcgtcgctcatcatctccgggctgctcgtcggcggcgcgatcgttgccgtgcacggcgcattccgcgtgcctgaggacctcttccttgacgacccgagcgttggctccaatggcaacactaccagcaggctgctctccttcctcggggcgcccggatctggggtttgatgcggcgcaggatctggtaggattcttgggctcgtggaatttattttgagtacgaattggcatggatctggttcgtcggctgtagctaattggttgccgctctgcttgtgcttaattgtgagtagttatgaatatgcagatcatattttgccttctaatatgtggttcgaattatgcaaagatctgctagatttgtacttcacttgttagtttgaatctgagtggtgactggtaagaattgttagatgtcagcaactcagtatgtcttgtgctctgttctttcaagtaactgtacaccgactccttagcaagtttatggtccttc

SEQ ID NO: 11179 - DNA, 1148 bp, Oryza sativa
  ref <308>: DATABASE ACCESSION NUMBER: AK108527
  ref <309>: DATABASE ENTRY DATE: 2002-08-28
accttccacctccacttcctcctctcatcgaagctagctgatctgccatggacgctctctcctgcctggcgccgcacgccgcgctgctgccgtgcgcggccttcaccgacgccgacatcacgcgcgcgctccacttctcctcctccatgcccgacacctcctcctcaccctcctcatcctcctccgcggccttcctcgccgacttctgcggtggtggcgccggaggagggttcgtggtgtcggcgccgccaccgacgatgccggcgatcacctgcgagtccgttctcgtggccgacagcgcgcgcccgtcgccggccgggcctgcgcggcggcaccagcagcagcagctggggctgggccccgcgggtgggcgcgccgggaagcggcggtcgcgggcgtcgaagcgcgcgccgaccacctacatcagcaccgacccggccaacttccgcctcatggtgcagcacgtcaccggcgtccaggccgaccccgcctccctcgccgacggcgccgccggcatccttcccaccaccaccaccactgcgccgttcgacgcctcctccggcctccacatgctcgacaccttcgccgccgccaacccgctgctgcaagccgagcaagcggcggcgcttcagcagcagccgtgcttccccacgctggactcgtcgtggagcgccgtcatgtacgatggcagcgacctcctctgagcattccttcattcccagctgctgctgctgcactgcagtgccaacactagttaattaggacgccgccgccgacgacgacgacatagctagtagatttcttgctctcgatcgcagtggccggcctagctagctctacatcgatcgatcaatccactaccatttcttacttgattagtttgtcgttggagccaagatcgtatcgatgatgctcgcttgatcaggttaagttgttgagttactgtagggtgttactactagtattattgtacagctagcgcattatgcatgtcatgtcgtcgtccgtcggtcaaacggagtgtggctgctatatatgcccacattttatgcagtagtagctgtctatagctgatctcagttaatttaatttgtactacgtgtatgtcaaagctaattagtcagcagtaaaacatcagtttctctcgc

SEQ ID NO: 11180 - DNA, 1441 bp, Oryza sativa
  ref <308>: DATABASE ACCESSION NUMBER: AK108528
  ref <309>: DATABASE ENTRY DATE: 2002-08-28
catgaaaataggaccaaaaatggtattggcgctatcagttctcgtctcttctatattcaccattgccttaccatggtttgctcggttcagtccaattgctttgtccgtatgtcggttcataatcggtgctgctcatggtgttatttggcctgcttttgctggattttgggcatcttgggctccttctaatgagcgtagtcgattgatcggtactggaaatgccggtgcacaaatcggaaatgtcatagcattgccgctcggtggttttctgtgcataaatggcttcgacggcggttggccatcaatattctatgtatttggcgctctcggtctcgtatggaccgttatctggttcgtattcgcctcaaactcgcccgaagagaatcgcttcattggtgaagcagaaaaagagtacattttggaggaaactaagaacacacgctcgtcgttcgaggagtccgagtcgggcgctccttggtgtgccatcatgaagtcgatcccggcttgggccatcttcatcggacactcgtgctccaattggggaacgtatcttttcctcacctcgctaccgctctacatgaaggaagtgctcaagttcgacattaaatctaacggtgcgctctctgctttgccttacttggtcttctgggctttcattttactcgccggaaatattggtgattatttcttgatgaaactcaaatggtccaagactaaagttcgaaagattttcaactctcttgctttcttcgtgccaatgttggctgtactcggtctcgcatttgtcacatgtgaaatcaaatacgttggtgtggcacttctgacagtaggccttgcattcaccggatgtgcttacggagccggtttcttggtcaactataacgatatctctggctcttactccggtgtcgtattcggtatcggcaacacattcgccactataccaggcattatcgctccttctttagtcggacttctcaccaaaaataatctacaagaagagtggcgcatagtattcataataacggcagtggtctatttgatcggagccattgtgctcttgatattcagcagtggagagctcgaaccatgggcgcaaaagaacaagaagaatcaagtcgaggaagaactgccactccgagcttaattgattcatattcattatgaggacattgatttttaaaagctcatttttttatttttagtttcaaccgtttattatttcattcgttgcgcttatgtttaatttaccaaaaaaacaacttttaatatttatgtcgttttaactttaataaattcatttaaaattgtctcttagattaaatcaacgtaaacagctttaatagtagttcaatttattataaaattatatgtttcgattatttttgtaaagaaattaataatataaaatcaattatgtttattttaataaaattgtttt

SEQ ID NO: 11181 - DNA, 1090 bp, Oryza sativa
  ref <308>: DATABASE ACCESSION NUMBER: AK108529
  ref <309>: DATABASE ENTRY DATE: 2002-08-28
acgcacccaccaatggcgccgcggtgcagcaacgccgtcttcgcggccatcaacgtcgtcacgctcctcctgggcgccgccgtcctcgccgcggggatctactacggcgccccgcaccgcggcggcggcggcgtcaccgagtgcgagcggttcctccgcgcgccggcgctcgccctcggcggcgccatcgtggccgtgtccctggcggggctcgccggcgcgtgctgccgcgcgacgccgctgctgtgggcctacctcctcctgacgggcctcctcatcctcgccgccgcctgcttcggcgtgttcgcgctcgtcgtcaccaacgccggcgccgggcgggccgtgtccgggagagggttcagggagtaccacctcggcgactactcgacgtggctccgccggagcgtggaggacggcggccactgggcgaggatcaggagctgcctcgtcgacaccggcgtgtgccggagcttgaagagcaaccagacgctcgacgaattcgtcaactccaacctctcgccgctgcagtctggatgctgcaagccaccaacagcatgcaacttcacataccagaacgagacatactggatcaagcctcctacacccagcaactactcagaccctgactgcaactcttggtcgaatgaccagtctgagctctgctacggctgccagtcctgcaaggccggtgttcttggcaacctgaggagcagctggaagaagatcgccttcgtcaacgccgccttcgtcgccctcctcctcgtcgtctactccctcggctgctgcgcgctccggaacaaccggcggcacaagtactcgctggttgggaaatgatgagggtttttggtttttgctcagatgaaggttttgtggcgtgtgtgtttgtgttgtgttgcttgctggttggctacatgaacaactgtagtatttcaggaaaaagatttatgcttcagtaaatatgcgcttccatgttatgaatgatcgctagtttagtaaatatgtgttggttgagttcttgattgagatttgagaatctctcaggaaaatatggctggaccttttaatagttacttttgggtttggaacagtc

SEQ ID NO: 11182 - DNA, 956 bp, Oryza sativa
  ref <308>: DATABASE ACCESSION NUMBER: AK108530
  ref <309>: DATABASE ENTRY DATE: 2002-08-28
atgtgcagagcttggaggggaaggattcgccggcgttgttgggcggcggcgaacatgcgctggcgaggtggccgcggacggtgttcctggtgggcgccatgacgtgcctggcggtgagcgcgacggcgcacctcctggcgtgccactcgcgcaggttcagccgcctcttctggcagctggactacgccggcatcgccgtcatgatcgtcgcctccttcttcccgccggtgtactacgcgttcctcggccgggccgtggcgcaggtggcgtacctgtcggcgatcgccgcgctgggcgcgctcgtggtggcggcgctgctggcgccggcgaggtcgtcgccgcggctgcgccacatccgcgcggggctgttcgtgtccatggggctctccggcgtcgtgccggcgctgcacgcgctgtggctcaactgggggcacccggagtgctacctggcgctgtcgctggagctggtgatggggctcgtgtacgccgccggcgcggggttctacgtggcgcgcgtgccggagcggtggcggccgggcgcgttcgactgcgtcggccacagccaccagatcttccacgtgctcgtgctcgccggcgcgctcacgcactacgccgccaccgccatcctcatcgactggcgcgaggcggcgatcgccgccggcggcggcgccgcggcatttttgtgacccgccatggcaggatgtgtatgtatgtgcgtgccattgattattccttcattatttttttatgtgacgtagcacaggtgattctttggactctgacatatcagaagttcgttgggttgaaactgtgaatgtgaatgtagaagatgggcttcaagccttgaaaagaaactgtattgcaaaagaaagcatacgaggctctgatagtaactcaatcttaagaatgcatttcaattggccctccaacttaatcgaaacttttgaggcttaatt

SEQ ID NO: 11183 - DNA, 1212 bp, Oryza sativa
  ref <308>: DATABASE ACCESSION NUMBER: AK108531
  ref <309>: DATABASE ENTRY DATE: 2002-08-28
tggaggttcttattggaaatcttggcgcatctgtcactgaagttgtaagtgatgctgttgtcacagagttcagtagaacgcagaaggccggtgtactacaatcttacgcgttcataattctggcagctggatctctcttaggaaatttgtctggtggttacgttctgttgagaacacaggaaccaaagactatgttctcagcattctccatcctccttggcctccaactagcactttccttaagtacaaaagagacgcttccaagctctcatagaaactggaacatttgtcatgtcagaacctctctgtctgacaatctccgcaaacaattctcaaacttgaggacagcaatcagcgaggagcagatcttttaccctcttatgtggataatgacatcatttgcagttgtgcctattctctctgggacaatgttttgttttcaaacacagtatctgaagcttgatccatcagtcatcggcctatcaaaagttgttgggcaggtgatggttctatctctaactgtcctctacaataagtatctcaaaaagatccctttgaggcggcttgtggctggagttcagacgatgtatgctttggcagttctatcagacttggtcctggtgaaacaagtgaaccttatgttggggataccgaatgagatccatgtgctttgtttctcggctctagcagaagcaattgctcaattcaaggtcttgccattctcagttctgttgtcaagccaatgcccacctggctgtgaaggttcgcttttcgctttcttcacatctggactggtgttttcagcaatagtaagcggagtatttggagttgggttgtccagtttaattggggtgtctggtggggattacacaagcttccctttgtgtattttgctgcaaagtttggcagcattggtacctttgggatggatatcctttctacctgaaaaatggactgccgacgacaagattcttaaaccaagatgaggcaaccctgtagggtcaataggtaaaccacacaacctcgagatgttagtaggtaatgacagtgtagagggttacatgtatagatacgaagatgtcatttttctttggaatcaatagttctagttctaacgttccagctgaatattggcatcaaattgtattctcttgcttccaagagcattgtgttcagcttatcatgcctgaagaatgggaagaatacttcagg

SEQ ID NO: 11184 - DNA, 874 bp, Oryza sativa
  ref <308>: DATABASE ACCESSION NUMBER: AK108532
  ref <309>: DATABASE ENTRY DATE: 2002-08-28
cccggtgcgcaccgcatcccctcccgcatctcgcttgcatcgccaccgcttgactcccctcctccctccaccgacggccggcgccggatctccttcctccgccgccagcgccggctctgcttctcatctcctccctccggcgccggcagctgtggttgccggctcgcgcggcgaccggcagctgtggatggcaggaatccatccgagagatcagcgtttcgtcttcaacgcgaggcagttggacgacaaccaaagcttggccgattgcaacattacccataattccacgatacacttcgtattcggcattccctgcttttacgctaccccggcatacgaacagttcaaccgccttccccggtcagagagctcggattcgagttcgacgagcaaaggagacaggtcggattcgagttcgacgagcaaaagagacatcgccccggcaaatgtcaaaacagtgcactgcccagattgccaggtccaagctaacgtgtactactgcaacaccaaggaggataacgaaggctgtgtgttctacaggtgcccttatttctcgatacacacaggctggtggctgccagttcgtccagtgcgcagacacggttgatgaaggactgcagaaacgagtggaacatgctactcaggaaacatcgtgtccccaagggaataacatgtcgctaatggaggagaggctgcagaggattcttgaccatatgaggtggatggaacagttcttgattgtgtgcatcatcgctctagcgtatgttgtatttgtcaagtagtttaggtagagtatcaattagtgtgtaatgaatggtcaataatgacgcacttctgaaccttgaaatcgatccacaattaggttgaagtacac

SEQ ID NO: 11185 - DNA, 1065 bp, Oryza sativa
  ref <308>: DATABASE ACCESSION NUMBER: AK108533
  ref <309>: DATABASE ENTRY DATE: 2002-08-28
aatccccacgccgccgcctcctcattccttcccgaaccgtcgcacatcgacgctccgccgctcctccatcccctcccgctccatcgcgccgccgcaacgccagattcatcgccgcctcatcggcgctgagagcgagggtatcgttgcccctcccctccccatcagtcgccgcgccaccgccccatcgatctccgcccggccgccaccaatctcgcagcgccaacagtcgccgggtccccgtcgccacgcgcagctgtcgttgaagcgagcgccgtcgcatcgatctcctccgcccctctctatcagtcgtcgtgccgtcgaagccatcttcaccgacgctggctcgattgaggcacagcccttgctgaccgacagcgtcgcccgccgctgacatcttcaccatcaccgacctcctcctcggaccatcgcacctcgtcatggttggggtcctctgtgtccgcccgttggatcaccaccaccgcaaagaaaactctggatttttctggtgcgtgtgaggattgctttggcaagagctttgtttatgaatccaaccatccttttgcttgatgagccaacaaaccatcttgatatggcatgacggaagacgtggatgtggctctggcggtcgattgggtggcaacgaggatgaaccacagctgcgactgcgcccatgcacaaccacaaccaactagctaaggtacaactacaagtcctgcgagcaactaaccaccatgacgcaattccgtttgggcggtgctccatgtggctttccagtagatttgatccccaaattgatatgatgtagcatcaaatgctgtgaatacactttgtgagttttgcctttgatcaagacgaactcctgattatagcgtcctaagccccacatggtgcgtgtcggcatccctttgtcaatttctaggccaaaaattggtgaaaggtttgtcaagtggtctacttttgattggaagcgtggctacttaattacttatatcaatgttgtttatgtatgactgatgctctacagatacagtttgtgttatctaatataactattttttttctttt

SEQ ID NO: 11186 - DNA, 1020 bp, Oryza sativa
  ref <308>: DATABASE ACCESSION NUMBER: AK108534
  ref <309>: DATABASE ENTRY DATE: 2002-08-28
atcggcaactccttgggacagttcaaccttgtctacggggcaaagagagggtgcatcccgacgtgcgtcatcaaggtgtaccacgccgcgagatcgttcgtcctgctcaacaacgacggcgagtaccgcatcatgaaaggtaagactatccgagttccagacgaggtgaagaaggcaatatgtcagacgctcatggcgaacaagacggagttgactcaaggtaaacctctgcccaggacagcaagcatgctgcagcgatacggtcggcacccgacggcgatcgagaccatcgtcgtgtggcacgtcgcgacgtgccaccttcagaagctggtggatgagagtcagcgcaagagctacgaggtggccacccggctgtccaagtactgcgcctacctgttgttctacaagccgaagctgctgggatcggtcggcaacaactcggtgaggtacacctgcaagacgttggtccaagaagcagccgccgccaggggcagcggcagcggtagcggggacgataatatgatgatgaggaaaggcaaggcactcgcggacaagctcaaggcccgcggccgtgtggattggacggagctggcggagttctggtcggagctgctgatatcgctcgcgccgtccgggagcgtcagcgcccacgagaaggggctcggcgacggcggcgagttcatcacgcacctctgggcgctgctgtaccacgcggggatcgatgacaagttcacctggtcgactgccactggcagtactgccggtggcgactctggcggcacggcggacaattctacgtttcagaatggcacggccatcgtcgaaccgcacacggttagcacagcctgatcgaggatcgagtttgctggagaaggattgttagctatatcacttggtgtgtgtgtgtttcagttagatggattcgagtatgcagatgtcaggtgttgtgtcttatgtaagagtgagtgaaaaggctaaatatccatttccgtgctatgaaaaaactgtgttgttcatttg

SEQ ID NO: 11187 - DNA, 837 bp, Oryza sativa
  ref <308>: DATABASE ACCESSION NUMBER: AK108535
  ref <309>: DATABASE ENTRY DATE: 2002-08-28
taggaggagaaggctatcttaactttatgggaaatgagttcggacatcctgaatggattgattttccaagagctccacaagtacttccaaatggtaaattcatcccagggaataacaacagttatgataaatgccgtcgaagatttgacctgggtgatgcggactatcttaggtatcgtggcatgctagagtttgaccgcgcgatgcagtctctcgaggaaaaatatgggttcatgacatcagaccaccagtacatatctcgaaagcatgaagaggataagatgattatatttgagaagggagatctggtatttgtgttcaacttccattggagtaacagctattttgactaccgtgttggttgtttaaagccagggaaatataaggtggtcttggactcagatgctggactctttggtggatttggcaggatccatcacactgcagagcacttcactgccgattgttcacatgacaacaggccctactcgttctcagtttattctcctagcggaacctgcgttgtctatgctccagcggaatgagaacaccaagaggcagcatgcaagtgtgtgcggctgctagtgcgaaggagcaagaaaaactagttgccagcaatctgtgaatggctttcctaggttctgcttcgatgaatgccggatagactagacagcttgcttttgtgctttgcgctcccaatttgtagttttagtttgtgagggaaagaaacgtttatttgtaattatctatggctgtcgaacggcgacgaaaccatgaaccccgtatatttgttggtaccgttcgaactgccagttatacatagttctgcacttctgt

SEQ ID NO: 11188 - DNA, 1082 bp, Oryza sativa
  ref <308>: DATABASE ACCESSION NUMBER: AK108536
  ref <309>: DATABASE ENTRY DATE: 2002-08-28
gcagcctagtagcttgcatcagagtttcatctcatctatcgatcggctaatttctagcttaattagcttgtgatccctttccttcccgccatggaggcctcgtcgtctccttgcaagcttcttcttcttcttcttcttcacgtcgtcctgctcgcgttcgcgccgctgctccaagcacggccactcggtcatcaggtggtggtggcgccgctaatgttgccgagcgacggcggcgaggtcgtcggaggtgtcgggcggccggaggatcacatcccaccgtcaccttttgcgcctggcgggccgatcacgctcgccggcggatggctggtggggaggccggtcggccccactccgccgcctccttcgcaccccgttgtgccgactccgacgcagctcgccgccgacgatgacggcggattgctgaggaggccgggcggccccactccgccgtctccttggcaccccggtgtgccgacgcagacgcagctcgccggcggcgacgacggcggcgtcggcggattgcttgggaggccgtggcctaaggctcccccgccgcctgacccgaacacgccgccggtgcagccgctctccaactacggcgtgtcgcggtgttgcggccggccaggacccgctccgccgacgccggccggaaacccgccgggtgaaaccaacgtcgccgtcgcgctcgcgccgccgatcccctgcgccgcttttctccgggtgatccgcgacgccgtgcagtacatggtcggcggcggactcggagcctgaaacgatcgagagctcgacaccgagaagaagagatatatacgagagagttgtacttgtacgtgtatatttgtacgcatacagaagcaaagctataggcaagtatgtatacggtataacgactgtataatcgtatatattgtatagtcgttttttatttaattataagtgtcgtagcagagtctaggtaagtagacaccagctgagcaaaaagactagctggctagtagctgcacgttgttgcgtcgctcaactacgaaaaatggagatgcagtaattataatctctctgtggccaattggcgcagtatatgc

SEQ ID NO: 11189 - DNA, 1027 bp, Oryza sativa
  ref <308>: DATABASE ACCESSION NUMBER: AK108537
  ref <309>: DATABASE ENTRY DATE: 2002-08-28
tttacaaactatctacgcttttcatacagaactggtgcataatctggctagtagtccgatgcgattctcgccagtgtttcacctggaggatttcttggatagataccctgggttgactatggatggagcccatgtactcctcgttgatatgggtgacaatacacttgcaggttcaagccccgttgatcaacaaagtcaattctaccaaaagaatatccctcctccagtccaaacccacgccctgtataactctgcaccaacgccacaatcatttctgtccatccaatctgctgattccggtcgggtgaatcctcattctcggccattgaatcttgaaacacccaacccatcctccgcatccccaagaatgcaattccaccaatcgcctaataacacttctcacccatcaccatctctatcttcattattcccagtccctgggtcgggtgatcttcacaacccaactgcaactcatgaaaacaatcatctcgtcccaccaactgccttttccccctctgcgtttggcctctcgcccactccatacctcggagactcgactttcaatatagcgcctacaccacctcctaacccacaatacgctatatttccctttgacaatgtaaactccaactttgatggcgctagccacttagcgggccagaacgcaagcgttgtgacgcccggtgcgcattcacaagcaagcggctcccacaaggcgcccagtgatgccggaaaccaagaaaaggacccattccttagtcttctcgaacaacttgcagagaatgaaaattctcaaggcggtcctagtgagctcgatttcctcttgacaggtgctgttgatcaggattccgacatgggcctcattgaagaaaagacagactctggacctacggcttaaatcgagacttcttttctcccgacatctttgtataaaattgatcttcaaaaaagcgacttgctactctttcttttagccagcaacgtcgatacccatagtacgtgaaataataccttgctgaaatcctac

SEQ ID NO: 11190 - DNA, 903 bp, Oryza sativa
  ref <308>: DATABASE ACCESSION NUMBER: AK108538
  ref <309>: DATABASE ENTRY DATE: 2002-08-28
aacaagctcgtgcatacactcatacagcccctaccaatggctgagaaagaagaatgcaaggtgctcatcgatcaagccagcaacgaagctggtgatccacaccaagacgacgactgcgaagacgaagacgacgacgatagctcgagcctcatcctgctgaccaacctcatcctgagcggcacggcgcggctcaacgtcctcctccccaccgccaccatcctcgccttcgccatcttcgcgcccctcctcaccgacgacggcaagtgcacccgcctcaaccgcgccctcaccggcgccctcatgctcctctgcgctgcctcctgcgtcttcttcacgctcaccgacagcttccgctcccccaccggccgcctccggtacggcatcgccacgacgagcggcatccgcacgttctgcgtcggcggccggcgtcgccggcggggcggcgggaaggcggggccgtgggagccggagaggtacaggctgcggtggtcggacctcttccacaccgccctggccctcgtcgccttcgtcacgttcgccgcgtcgcaccacgacatcgtgctgtgctactaccccggcgtgcccaggaaggtggtgaacacggtgcccctcgtgatcggcttcgtggtcagcctcctcttcgtgctcttcccgtccaagaggaggggaatcgggtacccgttcctgctcagcaccgaccttgtctacctacgccgctgatgagacgaaaggatcgcatggtcttctgatggatttgtattatgtgaaagtttgattttacatggttgtcttggggtaatttgagccaaaatgtatgtacattcttcattgcctctctcaagtgaagtacaaagcgggaaacaatgtgtgttggatgagatatatatcaagtaactttgtttc

SEQ ID NO: 11191 - DNA, 1072 bp, Oryza sativa
  ref <308>: DATABASE ACCESSION NUMBER: AK108539
  ref <309>: DATABASE ENTRY DATE: 2002-08-28
gtggatcataccttctttttttatggaagttgtagataatagctagctaattacatgtaaattagggatttgttcttgattaatcagtttggggaggatgaagtttgggaagaggctgaagaagcaggtggaggagagcctcccggagtggagggacaagttcttggcgtacaagcgcctcaagaagctcgtcaggctcgtctcctcctcctccggcgatgtcggcggcggcggcggcggcgaggccgaattcgtgcggctgctcgacggcgaggtcgacaggatcaacgccttcttcctcgagcaggaggaggagttcgtcatacggcagagggagctgcaggagacagtggagaaggtggccggcggcggcggtggagggcggcggccggcggcggcggagatgaggagggtgaggaaggagatcgtggacctgcacggggagatggtgctgctgcttaactacagcgccgtcaactacacagggctggccaagatcctgaagaaatacgacaagcgcaccggccgcctcctccggctgccgttcatcgagaaggtgctccggcagccgttcttcacgacggagctcatctcgaggctcgtccgcgactgcgaggccaccatggaggccatcttcacctcctccgtggcgacgacggcgatggccggcgatcgccggacatggaaaggatgctccggcgacgccgggatggctccgatggcagaccagcagggcatcttccggaacaccgtcgccgcgctggcgacgatgaaggagctccggagcgggagctcgacgtatgggcggttctcgctgccgccgatggcggcgccggcctcgccggagtccgacgtgctgcagtccatccgatccgatccccatctgaaagagaatggaagaattccaagtttacagtttttttatgcctaattgccggtactagattgtatgattacgaaacgagtcattgagagattagcaatgtgcaagctaaagttttctgtacttgtaaactcacatatgccgtggtagagaacatacatacacatatataaggaaaattctttagct

SEQ ID NO: 11192 - DNA, 1589 bp, Oryza sativa
  ref <308>: DATABASE ACCESSION NUMBER: AK108540
  ref <309>: DATABASE ENTRY DATE: 2002-08-28
ctctctctatcagccttctctctggactgggccggctggcaggcggatggagaggaggcgtcggcagccggtgacgcagcggcggcggccggggcagcggcgacgacgacgcgagagaaggtggtggcgtcgctgcgtgtgcgagctcgggaacggagcagcccaggaggcgggagaaggaggccgacgacgggcggggaaaaccgaacgagctccctctcgcctccgacgacgacgagctccgccaagaacgtcatccctccctatcggcggctgcgatgaggtgcgcggcgtcggggacggacgacgctgagcggcggaggccggggcggtcgcctagccaccgcgagacgtccaccgccacgggcatcctggcggcgccatgagcccacaatgaccagcaagaggatgggaggaggcggcggcggtggcgctaccacctcgaccggccgtcgtcatcttctcgacgatggcgcccggggagaaggcccggcaggtcggtgtgcgcgggcgcggacgggcgtcaccgacagatccaagtgaggaacacgaagagggagagcgatggagacgacacgacggcggggaagacggctatcctcgggttcgccaaggatgggtgggcggcgagctagtggtggtggttgcgcccggactcgaggaggaggtcggaggaggctgcagcaagggaggagctgcgtgcgtcctcctcctcctcgaacatgtcgccatcgtcgtcgtcgtcgtccgccaccgccccaccccgctctgcgccgccggcttcgcgcgccacagcctcgccggccttctccaacacggcgctccccttcccgttccggtctccctcgccgtcctcaattcgctcccctccccttcccccgccgaccgccgttcccatccacaccaccgccgccgccgccgcccacctcaccgtctccacgcccgacttcgacaccgcggcgggagccctcttcgcgcgccacggctgccgcatgcgtcacgcggttgaggagggtggggccgccacgctcgttttcgacgaggcgacgaggccgatgccgtgtcgcccgccgccgtattgtcgctgccgttcctctgcctcgtgggcggtggccggtgggggagcccgcgcgccgcttctccccccaccgtctgcgcgctgctcctcgccgcctgcgcgccacccctccccgccgaccatccgcgcgctgctcctcagcgcccacgcgccgcctctccccgccgcccgctcgcccgtagctcctccccccaccgctgtcgcgtcgcccatggccgccatcaccgccgtcgcgtcgtccgtcgccggccgccgacgcccttcttctcccgccggttgaggaagggagagaagaggggaaaagggagagggatgaggctgatgtggtagcctgacatgtggggcccacgtgggtgccacgctgactcagccaccacgtagaacaaaaccgggtcattaccaccaaaggactatttgtgaccggttttggttagttaagggacgttggataccaggttttgtggttgggggacgattttgtaactcgatgacaagttgagggaccttcggt

SEQ ID NO: 11193 - DNA, 1539 bp, Oryza sativa
  ref <308>: DATABASE ACCESSION NUMBER: AK108541
  ref <309>: DATABASE ENTRY DATE: 2002-08-28
tactttgaagaaattagagtgctcaaagcaagccatcgctctggatacattagcatgggataacatcataggattccggtcctattgtgttggccttcgggatcggagtaatgattaatagggacagtcgggggcattcgtatttcatagtcagaggtgaaattcttggatttatgaaagacgaacaactgcgaaagcatttgccaaggatgttttcattaatcaagaacgaaagttgggggctcgaagacgatcagataccgtcctagtctcaaccataaacgatgccgaccagggatcggcggatgttgcttataggactccgccggcaccttatgagaaatcaaagtctttgggttccggggggagtatggtcgcaaggctgaaacttaaaggaattgacggaagggcaccaccaggcgtggagcctgcggcttaattctacccctttggccctttcgcacagggcgcgcgcaggcggcggcggcggccagcgatgaggaaggcgagagcaaccgccgcggcgtccaagcccaagccgagggccacggctagggccaagcccaagcccaagcccaagacgaagcccagccccgcctccctcctctccggcggctcttcgccggcatccggcgacgcggccgacgacctcagcttcctctcgccctcctcgccggtggtgaagcccaagccgaggtcaccgctcgccgccccggcctcctcccccatctccccctacgcctcccccgcttccgcctccgtctccaccgtcgcggacctgaggatcctcgccgcgtcccacctcgactccctcaagcgccggctcgacgcgctccacggcgactccgcccgcgacctcgaggcctcccactcccgcatctccaagcgcttcaagatgcagactcagagctgcctgcagctggcggatgaggcggagaaggagcacaggaagatggccgacaagatctccgagcatgctgaggcagtgaaggcctcgtacaagaagtttgtggcggaggtgcaggcttctacatctcgtgtgtgcaaggtgactatccctgagatggcgaagtcggcagacagagctattgatggactgcgcagccgctacaacatcccagctacggcagcttagtttgcagttctggctgtgacctatgttcactgactaggtgtccatcactacatcaactagactagcaaattcttgggcttagtggaaggaacttgaacagttgtggataggagttacttgcacctgatatagttcttttacagtctcgttctcagatacatcgagacatcgagcaatcgtacgcacatatttctgtctaattgcattcactccgcagcctgtgttaatattgtcactctcttttggtatagttgtaagggtataagaacattccgaaggtgatacagtttattctagccctgtgaagcaaagaaaacagtttgcaaaacagtttgcaattatcatgtcttgaaaagtaacggttcactgcaataaaaaaagccagcccttcattatgacttctc

SEQ ID NO: 11194 - DNA, 1311 bp, Oryza sativa
  ref <308>: DATABASE ACCESSION NUMBER: AK108542
  ref <309>: DATABASE ENTRY DATE: 2002-08-28
gaaaccatctcaattataactaaacccaacaagctgtgcctagctccaacagctcagctcagctaagctagttgctagcagtggccggtgcgtgatcggccatggcggcggcggcagcaacggcgttggccgccgtgatactgctgctggtgctggcgacgacggcggaggcggcgtgctcggtgagcgcgatctacagcttcggcgactccatcgccgacaccggcaacctcctccgggagggccccgccgtcggcgccttcgcctccatcggcacctacccctacggccagaccctccgccgccccaccggccgctgctccgacggcctcctcatcatcgactacttcgccatggcgctgaacctgtcgctggtgagcccgtacctggagaagggggcgaggttcgagagcggggtgaacttcgcggtggccggggcgacggcgctggaccggagctacctgctgcagagcggcgtggtgatgccgccggcgagcgtgccgctcagctcgcagctcgactggttcaggtcacacctcaactcaacctgttcttcacaccaagactgcgcggaaaagctgtccggagctctgttcttggttggggagataggagggaacgactacaactacgccttcttccaggggagatccatcgaatccatgaagacctacgtgccacaagttgtgagaagcataatggacgttgcaaaggaggtgatcgagctaggagcgaccaagatcgtcatcccgggcaacttcccgatcgggtgctcgccgagttacctctccctcttctccacggcgatctccggcgactacgacgaccggggctgcctcaagagttacaactccttcgccatgtaccacaatgatcagctccgggccgccatagatgacctccggaaggtcaactcggatgtcgccatcgtctacgcagactactatggcgccttcatgcatctcctccaaaaggctgacctcttagggttcgaggaggactcattgctcaaggcatgttgcggcgcaggcggaaagtacaactttgacatgaacctaatgtgtggcgcagtgggaacgaacgttcgtgcagacccagcgcagcacattagctgggatggcatccacctcactcaacaggcgtacaaggctatggctttgtcccttattatggaagggtttgctcaaccagctgacattgtgcaaaaaatctggagttgctaggagcttgagcatgtatattgttgaatgttataagcattgagttcgtatgagccaacagttatacaacggtaactatacaagtatatag

SEQ ID NO: 11195 - DNA, 717 bp, Oryza sativa
  ref <308>: DATABASE ACCESSION NUMBER: AK108543
  ref <309>: DATABASE ENTRY DATE: 2002-08-28
gaggtttctcttcttccccagcgaaagcaaccttgacttcaccaacccaccatgttctctcaaaaggttgcccagcagtcgctgcgacggcttgccgtccaacagccactttccatgcagtggtccatgatgcgcgcctccccggccgctatggctcttggaaagggtctccagtcgagacccgctaccactgcctccaacactgaggacccaacccagattctcgccaagcagcgtctgaaccgccccgtctctccccatctggctatctacaagccccagatcggttggatcggatcctccctgcaccgtatcaccggcgtcgtcttgtccggtcctctctacctgtgggctactgcttatctcttttcgcccgctcttggctggcaccttgagtctgcctccatggttgccgccatgggtgctctccccgtcgctgctaagatcgccctcaagtccatcctggcccttcctttcacctaccactccctgaacggcctccgccacctgacttgggatctgggccgtggtctcaccaactctgctattatcaagtctggctggactgttgtcggcttgagtgttgccaccgcactcggccttgccttcatctgattcccacatacgtctcaattttccttgtgttattaaagtgactgcctttttttctctttttttttttggtcgagcaaattgtacgttgaacgtcaaagtctg

SEQ ID NO: 11196 - DNA, 818 bp, Oryza sativa
  ref <308>: DATABASE ACCESSION NUMBER: AK108544
  ref <309>: DATABASE ENTRY DATE: 2002-08-28
aagcgaaaaaccgagtttgtatactcgataaattaagccagaatggcggctgtgaccaagaaaggcggcaaacgcgaacccaaggtgaaggcggctccggcggcgaagaagctgccgaagaagcccaaccacgagggcggcatcttcgccacccccgtggctctcttcaacaagtggccgacggactccgtgacggtggaggacaactccctgcgcgactacctgccgattaaggacaaatacgccgtgttcgtcccgcacacggccggccgctacgccaagaagcgcttccgcaaggcgcagtgcccgatcgtcgagcgtatgatcaactccatgatgatgcacggccgcaactccggcaagaagctcatggccatgcgcatcctccagcaggccttcgagatcatccacctcgtcaacggtgagaacccgctgcaggtgttcgctaaggccgtgcagaactcgggcccgcgcgaggactcgacccgtatcggttcggccggtgttgtgcgccgtcaggccgtggacgtgtcgccgctgcgccgcatcaaccaggcgatctacctcatgtccgttggtgcccgcaacaacgccttccgcaacctgaagtcggttggtgagtgtctggcggatgagatcctgaacgccgccgcggattcgcagaactcgtacgctgtcaagaagaaggacgagatcgagcgcgtcgcgaaggccaaccgttaattgcacggtttacggattcggcgctgctgtgcgctgggtgtgtcccggggcggcggcgtcgatctaccgcttgtttttgatgcaatcgccgttct

SEQ ID NO: 11197 - DNA, 1934 bp, Oryza sativa
  ref <308>: DATABASE ACCESSION NUMBER: AK108545
  ref <309>: DATABASE ENTRY DATE: 2002-08-28
acctttggctcaccctcaccacctttccgccaaccatacccgacttgcgtgcgttcgaccaggacatcgcctcctcgtacgcctcacgagtcccacgccatacgagcgtagctcccaacccttcaaccgcccggccatcggcgatcgacagcgcgcccactctcgcaccatgtcggctatcgagctcatcaacccgcgcgccgagtcggtgcgccgcacccaggcgctccaggtcaacactgccggcgccatcggcctcgctcaggtggtgcgctccaaccttggcccgcgcggcaccatcaagatgctcgtcgacggctcgggcaacctcaagatgaccaaggacggcaaggtgctcctcaccgagatgcagatccagaaccccaccgccgccatgatcgcacgtaccgccgtggcgcaggacgagcagtgcggcgacggcaccacctccgtcgtcctgctcgtcggcgagctgctcaagcaggccgagcgctacatccaggagggcgtccacccgcgcgtcatcagcgagggcttcgacctcgcaaagacgggcgcgctcgactttctcgaaaagttcaaaaagagcccggacatggaccgcgccacgctcgtcaaggtcgccaccacctcgctctccaccaagctccactcgaagctcgccacgcagctcgcggcggacattgtggatgcggtgctggccatcaagcccgccacgacgacgaccatcgaggcacccaagcccaccgccgacggcagcagcgagagcgtgagcgagtggaacatcaaggaccccatcgacctgcacatggtcgagatcatgaagatgcaacacaagaccgacacggacacgcagctggtgcgcggcctcgtgctcgaccacggcgcgcgccacgccgacatgcccaagcgcgtcgagaacgcgtacgtgctcacgctcaacgtgtcgctcgagtacgaaaagaccgaagtcaactcgggcttcttctactcgtcggccgagcagcgcgagaagctggtcgagagcgagcgcaggttcgtcgacgccaagctcaagaagatcgtcgagctcaagcaggcggtgtgcgatgcgcccacagagggctccaacgagaagaagaagaactttgtcattttcaaccagaagggcatcgatcccatgtcgctcgacattctcgccaagaacggcatcctggcgctgcgcagggccaagcgcaggaacatggagaggctccagctgtgctgtggcggtgtggcgcagaacagcgtggatgacctcagcccggacgtgctcggatacgccgggctggtgtacgagcacacgctgggcgaggaaaagtacacgtttgtcgaggagtgccgcgaccccaagtcggtcaccatcctcatcaagggacccaatgcgcacaccatgacgcagatccaggatgcggtgcgcgacggactgcgctcggtcaagaacgccatcgaggacgctacgctcatcgcgggcggtggtgcatttgagatcgctgcatccaaccatctcaccacgagcgtcaagaaggctgccaagggacgtgccaagctgggtgtgcaggcgtttgccgatgccatgctcgtcatccccaagacgctcgctgccaactcgggtttcgacgtgcaggacgcactggtggcactgcaggacgaggtggcagagggaaacgtggtcggcttggacgtccagacgggcgaaccaatggacccagtctcgctcggcatctgggacaactacagggtcaagagacacatgctccacagctccgccgtcatcgcctccaacctgctcagcgtcgacgaaatcctgcgtgcaggaagaagctcgctcaagtccgaagcgcccatgggctaagtccttgaccacatctcatccagtgacgtctagtgtaaaaatacaatcctcgtttcccagt

SEQ ID NO: 11198 - DNA, 551 bp, Oryza sativa
  ref <308>: DATABASE ACCESSION NUMBER: AK108546
  ref <309>: DATABASE ENTRY DATE: 2002-08-28
aacttaactcgacagccaacaatttgaagctttgaacagatagcagatcgtacactccgttggtgtagaagccgggttttacaacttttcattattaaaagaagtagagcagagtagtctccgttcctggccgatccaccatggcccccttcttctggcctgggccgccgggagcgcagccggtgggcgacctgcaggtggcgaagttggcgctgctcgtcgccggcaacgggttcatctcgccgtcgtcctacctccgccgctgctgcgacgacgacggcccgtgcttcgtcgacggcgctggggagaggtgcttgcacctggccaacctcgtcaccgccatgctcgggctggccctcgtgctcggccagatggcattcttctcggcggcggcgttccggccgcaggtggcctcggtcactgttgctgcgcggtggattgtcagcctcgccaagctcgccacggttgggaccctccagctttgggtctatgttttctgcttgtgcctgaaaatgttgtgcatcagatactaattagcttctcgtccttgc

SEQ ID NO: 11199 - DNA, 1238 bp, Oryza sativa
  ref <308>: DATABASE ACCESSION NUMBER: AK108547
  ref <309>: DATABASE ENTRY DATE: 2002-08-28
ctgcgctctgctttttctctgctcttctcgatttctccggtgcaccgctcctctgatcggccgatggacttcgccgacgctccgtcgcacggagactcgctggtggtggtgagggacgcgctgctgtcgcagctccagcaggatcgcctccggaaggacatcatcgtcgccgagctcgccaagatagagcgcgccatggctctgcgcgatgtctcgcagtcgccgacgccccggcacgccgccgccgccgccgccgccggaaagactattacaactgtggctacaccggccaagaaaccatcgccttcagagaaatctgaaccggcagttcagaagtcgatgccaccctcggcatggagctgcgccgtgtgccaggttcgaacaaccagcgagcgcaacctacgtgatcactgcggaggtcagaagcaccagtccaaagtcgcagcactggagaagacaaccaaggccatggcgagaacgacggcgaaaccttctcccggtgcagcagcaagatggggctgcagcatctgcaacatcagctgcaacggcgagtgcgatttcgatacccacctgaaggggaagaagcatcaagcgaacacccaggccttactggaacaaaacaagaagagctcagtgaatccagagtcacagggaaccaaggcggcggcagcaacactgatctgcagagtttgccaagctaagttcacctgtcagtcagacttgcagagccatctcaaggtcatgaagcaccagctgaatctccgggcaccatcttcagatggctctagcttcaccagtgcaacctcggagagtttgagtttggaattgtattcttgcaaggtttgcagcgtgaagtgcaccttcgagaggatgctcgcgtaccatctcactgggaagaagcacctgaaacaggagaatttgcagttgtcctgcgagatctgcaaactgcagtgcaacagcgagaaagtgctctctgaccatcgttatgggaagaagcaccaggcgaagctcgagaaagtgcttcaggcaaagctcaatgcgacggaatgagatgcgtctgattctgattaaagatgctggcgttttgacttttgagcaacgaacatttaaattatcgacggcactgtatgattatttcagattattaatccttgattttgggacttactgctgctgcttcttttcaattgcttctatatactagtacaaaaataatctatacggtttaaaatgccact

SEQ ID NO: 11200 - DNA, 890 bp, Oryza sativa
  ref <308>: DATABASE ACCESSION NUMBER: AK108548
  ref <309>: DATABASE ENTRY DATE: 2002-08-28
acttcgatctacacgctgctttcaactctctgagagctagctagcatgtcttgctttggcatggcgagcgggagcagcgccgggtggccgctgtcgccgtcgccgtcgtcgacgagggggaggaggagggtgagtgtgaagccgtggcggttgtggtggcggaggtgcgctggagttgcggcggtgatccagtccaagatccatcgccgcgccgtgcggtggccgggcgggcatggtggtgggcgccggcgccgcgaggccgccacggcgtcgacacgggagcgggaggggtggtgccatcaccggagcttcgcgccggtctacgtcgacgagctctacagccatcccaagacccaccacgtcgccgtccacgaggcgcaggcgcagcagccgaacaccaccgctgccaagaccaacgccggcgccgccagcggcaaggcgcgcgccgtcgccgccgccgccgccaacaacaacaacaacgctgtagccgcgaccaacgctagcgccatgttcgccgccaagaacgctgccgctgatgctgcgaccaacgccgctgccggggccagaggcaaggggcgggtgggcggcggcaagaaagctgctgccgctggcgcggcgaccaacggcggcggcgccaaggcggcgcgcggcggcgtgaggagcttgctgatgagcccgctgagaggaggaggagcgtgtgggatgggggaggtggatgtgagggcggaggtgttcatcagaaagttcagggaggagatgaggctgcagaaccagaaatccgccgaggaattccaagccatgctcgcgagaggcctatgacacatcatcatcttagtttattattagtcatttgtataataatcataatctaagcatgattattaagagtt

SEQ ID NO: 11201 - DNA, 838 bp, Oryza sativa
  ref <308>: DATABASE ACCESSION NUMBER: AK108549
  ref <309>: DATABASE ENTRY DATE: 2002-08-28
ccaaacttaaccaaaatccacaagcattttcttttacccaccaaacaaacaaatcgatctcttgtgtctcatggccaccgtgcggccacacccgccggcgccaccgtctccggtgcaggcgccggcgccggcggcgccccctccggtgagcgtcgccgcgcggccgcaggcgccgtactactactactgccacggctggaaggagggcgtggcggagtcgcgctgcccgacgacggatgcggcggcggcggctgcggcggcgaacggtggcgtgatcgagctctcgtcgtcggacagcagcggcggcggcggcggcgccggccgatgggacgatgacgacgacgggtgcagcagctgcgtcgacggcgacgatggcgcagcggccggcggcggcggggcggggcggcgccgcgacgaggaggagaaagggaggagccagcagttcggcagctggtggagccgccatgacagcagcagcagcagcagcttcctctggccgccgccgccgaatgacaacggcgacgacgaggacccggcggcggcggcggcgaggcggcaggaggaggaccgcaagttctgggaggcgtgcctggcctcgggccttccatgaagcctgaaagggtagctatagcaatcgagtatcggatgcgacatacaaatccgtataattctagattgatatattatgatatcggaaaatccgtatagtcgtagattgatatattttgatgtagattgatatattttgatgtcggatgggacgtacaaatccgtatagtcctaagttgatatattctagctggagggagtacaaaactgaccagtaacgtatgtgtgc

SEQ ID NO: 11202 - DNA, 1963 bp, Oryza sativa
  ref <308>: DATABASE ACCESSION NUMBER: AK108550
  ref <309>: DATABASE ENTRY DATE: 2002-08-28
gtccaaacacgcaccaagccaccaaccgattccgatccaacgatctcgatcgcccgctccgcttcgcttcccgatcgatcagccccgccgccgcgcgcgatggccgacgaggcgaaggccaagggcaacgccgcgttctccgccggccgcttcgaggaggcggcggcgcacttcaccgacgccatcgcgctcgtgcccgacaaccacgtcctctactccaaccgatcggcggcctacgcctcgctccaccgctacccggaggcgctcgccgacgccgagaggaccgtcgcgctcaggcccgactgggccaagggttgctcccgcctcggcgccgcgcgcctcggcctcggcgacgccgcgggcgccgtggcggcctacgagaaggggctcgccctcgagccgtcgaacggggcactcaaggacggcctcgcccaagcccgccaggcgcgccgcccggcgccggcgtccggcgccggcgccatcggcaaggtgttccagggccccgagctctggagcaggatggccgccgaccccaccacgcgcccctacctcgaccagccggatttcatgcggatgctgcgcgacgtgcagcggaatcccagcagcctcaacaactacctctccgatccccggatggtccaggtgctcagcctcatgcttaacctcaggctaccgaacaatgacgcgcctccgcggccgccggcgcagtcgactccgccgcctccgccgcagcagcagcagcaccagccggagacgaaggcgagggaacctgaacccgagcccgagccgatggaggtgacagaggaggagaaggagcggaaggaaaggaaggccgcagcgcaggaggagaaagaagcgggcaacgccgcttacaagaaggattttgagacggcgatccaacactacacaaaagccatggagctcgacgatgaggacgtctcctacctcaccaaccgagccgccgtttaccttgagatgggaaagtatgatgagtgcatcaacgaccgtgataaggctgttgagaggggaagggaacttcatgctgatttcaagatcatctctagggcactgaccagaaagggaactgctcttgctaagattgctaagtgcttcaaagattatgatgttgccattgagacttaccaaaaggctctgactgagcacagaaacccagataccctgaagaaactgaatgatgctgaaatagcaaagaaggagctagagcagcaagagtactatgatccaaaaatagctgatgaggagcgagagaaaggtaatgaattcttcaagcagcagaaatacccagaagcagtgaagcattacagtgaagctctcaggagaaaccccaaggatccaagggtatacagcaacagggccgcctgttataccaagcttggagcaatgcctgaaggtctcaaagatgctgaaaaatgcattgaactagatcctacattctccaagggatacacaaggaaaggtgcaatccaatttttcatgaaagaatatgacaaagcactggaaacctatcaggccggcttaaagcatgacccgaacaaccaggagttgcttgatggtgttaggagatgtgtccagcggatcaacaaggctagcagaggggaactgagccaggaggaattgcaagaaagacagaacaaggctatgcaggacccagaaatccagaacattctgaaggatcctatcatgcagcaggtgttgaccgacttccaggagaatccgaaggctgctcaggcgcatctcaagaaccccggagtgatgcagaagatccagaagctagtaagtgcagggatagtccaaatgaagtagacatgctgaaagggccagggatagagtaatctgatcggtgtgcctggaaacttctgaatgcaaaattcgtcgtcgaatttttgtacagtacaatcgtgtttatgcaaattccgattggtcatggctgagccgaatttcc

SEQ ID NO: 11203 - DNA, 851 bp, Oryza sativa
  ref <308>: DATABASE ACCESSION NUMBER: AK108551
  ref <309>: DATABASE ENTRY DATE: 2002-08-28
gaaaccccaaaccgacccacctctcgccgccatggctgccgccgaccagcccgcctacggcgatcgccgccgtcccggcgcacgtacaagccggaccagccggagggcctcaccatctcgttccgcgagctctacgacctgccgacctcgccggagttcctgttccacgaggaggcgctccgcagccgccgcacctgtggcgaggacctcacgttctacaccggctgcggctacctcgtcggccgggcggcgggggcggccgcggggctgaagcgcgcggcggaggaggcggagcgcggcgagtcgatgaagctgcgggggcagccgcgtcctcaaccagtgcggctccctcgggcgcgcgtacggcaaccggctcggcgtcgtcgcgctgctcttcgtggggatcgagagcaccgtggggggcctccgcgacgccgacggctgggccaacaccgtcgccgccgggatcggtaccggcgcgctctaccgcgcggctgccggcccgcgggcggcgatcgtcggcagctccgtcggggggctcatggccggcgcggtggtcgtggggaggcaagcgctgacgagatacgcgcctaacctgagcttttaattccgaacaattaactgtattagctgcatatgttccaatgaatccaatctactgggttgaggttagcagttgttttagggatttatatctgcatgggttttatctgaatgaaacttgagagtaagaatctgttggattagctagcttgataatgtcggcttatggatatctagatgtgtattgagaatgattaaaagtttatgcctccatttggaacttcaagctcaatgttatgatgctatat

SEQ ID NO: 11204 - DNA, 873 bp, Oryza sativa
  ref <308>: DATABASE ACCESSION NUMBER: AK108552
  ref <309>: DATABASE ENTRY DATE: 2002-08-28
tggatcctaggactgctcaagttgctacagtggaccatattaaacagaaatgtacaaaattgaggccagctgctgatgaggagcttccttcagcatacattgaagatttcaggagtgccctggatgttgaattatccaaatatgttggtgaagcttatccaaaaggggtgtgtgctgtttattgtaccagcggaaaagatatagagggaccaggagttgattttcgttttgcagcagttatttctgctgctaaacgcagcccacaaaacttttgcaacggcaattggcgctcaatttggactctggaattcatagatggattacagcttgtcgaaattaaagggaaaatacaggtaggtgctcattattctgaagagggaaatgtgcagctggatactaacatcgattgcaaggattccaccatattgcagtctcctgaggaatgtgcagtatcaataactaacatcattcggcatcatgagtcagaatatttgtcatcacttgaggaatcatacatgaatttgtctgatgcaaccttcaaggatcttcgaaggaaacttcccgttactcgtactcttttcccatggcacaacacattagccctcagccttacaagagacctcaccaaagaactggctataggaaaatgaagcttgtggaggtcagttcattagattagctttgatatggatttttttttatctccatgctatgtgttgttctgtagatcctgcaattcatatcctgtagccagcaattctcttgttttgatttctgggcttccacatatcagtgtaaatcaagaacatgcacttcttgtgaggaagttacatttcaagaatatatgatatctgaatgttgactgtgtcaact

SEQ ID NO: 11205 - DNA, 1111 bp, Oryza sativa
  ref <308>: DATABASE ACCESSION NUMBER: AK108553
  ref <309>: DATABASE ENTRY DATE: 2002-08-28
gcgccgtccaacgcgcgcgccagagctaggtggttagcccaagctcgcgagatcgatcgctactataggctaaggacacgtacatggcgcagctcccgcccaagatcccggtggcggcgccggggcaccaccagcactgggcctcggccgggggcgccggcgacgcggcgtgggcggatgagttcgccgagttcgcggcgtcgcggcggggcgcgcaccgccggtcgctgagcgactccgtggcgttcgtcgaggtggcgccggcggggtgcggggcgggcggcgagttcgacaggctcgacgacgaccagctcatgtctatgttccccgacgagggcgggtcgtcggccccggggtccgacaacggcggcagcgacagcgacggcggcggcgacaagcacgccgcggcgcagagcgacgacgggcagcacgccgccggggagccgacgcaggagcaggcggcggccacctcgccgacggagctgatccgggaccccaagagggtcaagaggatactggctaatcggcagtcggcccagaggtcgcgagtgaggaagcttcaatacatctccgagctcgagcgcagcgtcacaaccctgcagaacgaggtatccgtgctgtcccctcgggtggcgtttctggatcagtagcggacgatcctgaccgtcggcaacagccacctcaagcagcggatcgcggctctagcacaggacaagattttcaaggatgctcatcaggaggcgttgaggaaggagatcgagaggctgaggcaggtataccagcagcagaacaccaagttgtccggtggtctggccgctgaccacgcacatgtccatggcggcccgccgcctgtgcgagcagagaaggagctcatgagctagctgatcaatttgcctactgtcccctgtgcagtctgccttagcattaactttggagggaacattgcatcatgaacctgtggatgttttcttcttcttcttctttttgtttttttattcttttacattgacttgtgtattcttgattcggatgttgattggagttctggtttacaatgggaattgtgggagatgtcaataagaaaatgtgaactgcaataagattaactgtg

SEQ ID NO: 11206 - DNA, 1364 bp, Oryza sativa
  ref <308>: DATABASE ACCESSION NUMBER: AK108554
  ref <309>: DATABASE ENTRY DATE: 2002-08-28
aatgacagaaatgactaccagtgccctgcatctgcaggtgcttgccttaaccgtcttcctcgtctgcgcggcggcagtgacaccagcggcgtcggctcagcagcagcagctgccgggctgccccgacaagtgcggcgacatcagcatcccctaccctttcgggatcggcgcccgctgcgcccgcgaccaatacttcgagctcgagtgcaaccgcgcctactcccctccgcgcctcatcgtgtctacccaccggcaacatctggtcaacctgtccctcgccgacggggaggctactgccctcatcaacgccagacgccagtgctacaacagcacggagggtttgatcggtgatgccaataattatgtcaacaaggatatcactcttgtcggcagcaatgcctaccgcttctctgcggcgaggaaccgcttcgtcgcgctcggctgcccaaacatgggctacttcgtcgacacctacggctactacgtcagcggttgcacgtccatctgccggccatcgcaggggaatggtgcgagtggtgcctcgaccgggggatgcaccggcgagggatgctgccagagcaggataccgaccaataccgactactacgagctgtacgttcaaactttcaaaccaggggaaggggaccccatattacgtggcggtacgactgcttgccggtacgtgtttctggcggaggacaagtggatcgacaccacctaccgcggccacccggacttcgaccgaaacgacgacttcgcggtgccgtcgtgctcaactgggccatccggaacgtcggtaactgcagcgccgctacccgtaacatgacggactacgcgtgccggagcgtcaacagccactgcatcgactccattgatggccccggataccgatgcaactgctcccagggctacgagggaaacccctaccttgacggtggatgccaagggcatcaggcgagtggaccggttttgaccaggcagactgcacagtttcaaggaatcctgggagccttatccagtatttttcaaacctgaaaaggttgcatttaggcctagaagggtttgcagttagcagcagaggacaatggtctgagaccatcgtagagatagctgaaagcaagcaattttggaacctttcttcccactcatgtgagcaaaacaccctgtcaatttttgttaaggttggtatttctgtttcgctggatcaggtgtatcgacggccatttagttttatttcaataacttccaacatgtttaaagccgccctaaaagactgcatcatgcccctgttaagattgctgttatttttgtcggagtcctggacaatgaggttgaaatcatctaagatcatccacttttgattt

SEQ ID NO: 11207 - DNA, 1193 bp, Oryza sativa
  ref <308>: DATABASE ACCESSION NUMBER: AK108555
  ref <309>: DATABASE ENTRY DATE: 2002-08-28
aagagagtcggccaacccacatgcacgtgtaccgatgtacatggcggcggcggctgcgggagcaagcacacccttcaatttttgccgccacggctcgcacgccgagtacgacgccgtcttcagcggcagctggatggcgcgccgcccctccgcggcgccgcacggtggcggcgcctccggctccggctccggcagcggctacggcgccgcctcgtacgttgctcccaccttcggcgcggcgtttaggcagcagcatctcgacctcctcgactacctgtccgacgatcagggcgttccggcgccaccaccagcggctgtgcccagcgcgtcgtacgtgacgccggcgccggcgatggcccccgctgaaccggtcgtgccggatgctgttgccgccgccggcggctatccgaggagcgtggctgcggcggcggcggccgtggccggcgagggaagagatcggacgacgacggacaagatcgcattccggacgaggtcggacgatgagatactcgacgacgggtataagtggaggaagtacgggaaaaagtccgttaagaacagccctaatccgaggaactactaccggtgctcgacggaggggtgcaacgtgaagaagagggtggagagagacaagaacgacccgcggtacgtggtgacgatgtacgaggggatccacaaccacgtgtgccccggcactgtctactacgccgcgcaggacgccgcctccggccgctttttcgtcgccgggatcagtcacccagaccttaattaagctaggatatgctttgccggcccagctgtggcttagcttgatgtgcagctctagttattgtatgggctgtacggttcagttatttgaagcgggttatacttatatgttgttaatgtttgcctactgattttaattaatttcttagagttagactcaatttggcggagggattcccttcaaaaaaagaaatcccttcaaaaaatttggcggagggacgactgatatatatggtgacattagctaggtttgctcacttttggcaaaaataacaagtttcctttcgtgccactctccgtccctaggtcagtgtttggcaaaacgcccaaaaaaatgtccgtgttgccaattaatttgtcgattgtgtacttcaatttcaagccaaatttcggcaaagctagtactttgtgtgttttagatgttg

SEQ ID NO: 11208 - DNA, 1300 bp, Oryza sativa
  ref <308>: DATABASE ACCESSION NUMBER: AK108556
  ref <309>: DATABASE ENTRY DATE: 2002-08-28
cactagctactccagtcagctaatcccttcccgaaaatatctcgccgtcgttgcgcgcggtagctagctagctagctgcgccatcgacgacgaagtctcatccatggaggcggcggctgcgctgacgacgacgaccggcgcccagtacagctgctgcttcggtctcgcgcatggcggcgccgcacaacggaggaggaggacggcggcgggtttcggggcggcgaggtgatcggggcggcggctgcgggcgctgccgccgcaggtgagcgagttcctcagccccgagcagctggtccccggctcgccggccgacaccggcgacgtctcctccctcatcccaatcagtgctctgatgctgttcttctacttcgtgtccaactgggtggtgcctgagttaatcatgaaggatttgcaggagcccaaaaaggctgaagaatcagaagaagctgcctcttcaccggcagcaaccatgtcggtcgccggcgacggccaacctgaagctaaaatcagactcaaggtgaagaagacaaagaagaacaagaaggctgccatgaaggtgtagtgcacacaaacatgcatcaatataatgcatgctagtatgttattgcccccctcatgatgataatagatagcatcatcagtcaaagatcacactaaagtgctaattataatcaaagagaagattaattctccatcagaaggggggggcttacatatagtatgtactcatcatgttctgaatctgtgagccattcaattgaaagataattattccattgcatatttgcatctatgcttagctagccagtactaagtatcaacaacagctagcactagctaataaagttttgggagaagaatgaaaggtggagagggcattggtacaaacaggtggggcttgtattgtggtagcaggcaaaagtgggcaaatcagtcggttatcagtgtggtgggctgaactccacaaaatcctctcatctcatcaactggttgttgttgttgttgttgttgccatcacacacaacagcatcaatgggaaagcttaggcatgctcagctcaaaagtaggaagggaccaagggcaggcaggatcatcaacttgcaaagcatgtgtaggtttcagtttcatggttcaattcaacaatcaacaccaaaaacacttcatggatcagagagattttttaatacgtgaaaatcgttcgttagcgcctttttaggaacaaattaggaatgacataggattatttgaggaattttttttcagggtatggaattctaagaatcttatggagaattttatc

SEQ ID NO: 11209 - DNA, 1019 bp, Oryza sativa
  ref <308>: DATABASE ACCESSION NUMBER: AK108557
  ref <309>: DATABASE ENTRY DATE: 2002-08-28
atcgtgttcgtccttagcttagctaggactaggagtagtagctacctagctgaagcttagctgcctagtggggagtagcttagcttagctagctagctagctataggcgagatgctgggctgcttctcccggctgcggcggccggcgtcggcgggggcggcgccggcgcccatggcgcagtctgacgacgcgtcgacgtcgacctcggctggcggcggcggcggctgcaccgcggagacctcgccgtgctcctcgtcctcctcgctccggtgcaagaactcgggcggcgtcggcggtgaagacgacgacgatggtgtcggcggcggcggcgccgtcgtcgctgagaacgcctcggcgctgtccgactccgggctgtcgtcggccatcgcgtcgcgccggttcttcctctcctcgcccggcaggtccaactccatcgtcgactcgtcggcgcacggcgccgccgtcggcgtgggcgcggccggggtggcggtgccgacgtactcgccggacccgcacgccgacttcctcaggtcgatggaggagatggtggcggcgctgcggctggacgcgcgccgccgcggcgacagggcgcggctccacgagctgctcctctgctacctcgcgctcaacgaccggcgcgcccacaagtacgtcgtcagcgccttcaccgacctcctcctccgcatcaccgccgccgccaacctcgacgacggcgagccgccgcgccatggccgccacctgcacgagtcacattgaacccttttgctttcttgatttcttaattctcttccatttttttgatttttttttgggtctcacttttctatttgaattgctgcgtacgaacagatttttggtacgagattcttcgaacgatcgactgaaaatctcgttgcatgcaaaatcgcaagcaaaatgttttgtactctaaaatgtcggggtcgtctagctagctgtaaatatgtctggaaatttcgtaccaaagttcagttcgtatgcaaaagcttttcactttttct

SEQ ID NO: 11210 - DNA, 1199 bp, Oryza sativa
  ref <308>: DATABASE ACCESSION NUMBER: AK108558
  ref <309>: DATABASE ENTRY DATE: 2002-08-28
atcacttcacttctttccatttccatcaccccacgtcgagctagccatggcggccgccgccggcgtccttctggtactgacggccgcagtattgctcctgctggtcgagggcggcgagccgccgtactcgtgcgggccgcggtcgccgtcgtcggggtacgcgttctgcgacgcgaggctgccgccggcgcggcgggcggcggacctggtgtcgcggctgacggcggcggagaaggtggcgcagctcggggacgaggccggcggcgtgccgaggctcggggtgccgccgtacaagtggtggtcggaggggctccacgggctctcctactggggccacggcatgcacttcaacggcgccgtcaccgccatcaccagcttcccccaggtcctcctcaccgccgccgccttcgacgaccgcctctggttccgcatcggccaggtacgtgtatgcctagctaagggtgtaaatggttaacccgagaacccacttagcttagacgttaaaaataaatccgtgaattcactaaaagatcaaaatatacgggttcacggtttattttaacctacaaataggttcgtggattaaccatttacaaccctacagtcttgctaccatcgtattactaacttatcaccacgacgacgatgagtatacatgttagtatgtatatcggtaattttaccatttttaataaggtactagctggagaagtaatatttttgttatgtaaacttaggtacatgtaaaattcatagctcgaagtatttttttcgaggaccatatgatttttcatgcgtataaacttcgtgaacgtatatatttatgtacttgcgtgtacttatacatgtactgtacgtagagcgcctacttgttagggactccgtatacgtacatcgttgggacaagtagacgaactcactgtaggtagtagtacattgtacagacactttacagctagactcgagtaacgtacacgtatgttgcaaattttgtgtaataagacattaaattaaacacacgggacctaatggagatatataaaattattcccgattttcttgttttaaaatacgtgtatatgcatatactgtatttatgtgtaaaatttgtatacgtgtatatacatatactatacattttaaaatacgtgtatactacatatactgcattatccagggaagaaagaattaagaggcgg

SEQ ID NO: 11211 - DNA, 2031 bp, Oryza sativa
  ref <308>: DATABASE ACCESSION NUMBER: AK108559
  ref <309>: DATABASE ENTRY DATE: 2002-08-28
aaaacccagttaagccctgcgtcctccgcgtccgcggttgttccccagctataccgcctctgactctgaggaaggggcgcagcaccaccgcccgatggggaagcccaagcccgcctccgccacagccgctcctcgagggcacaagaggcgcccgaagaggacaaggccctcggggaagggaggaggacccgagccgcgcgaggagaagcgcaagaggcgagagctcgatggtgtcggcctggcggaggagtcgccgccgccgggttccagcctaggcaaaatcttaagtaccgaatctggagcaataggcctagagcagagtgatgaagatgacatggaagatgaacacactgttcctggtgacgatgagacaaatgatatgataaacaataaagatgatgcttttgatgaaatggaggcttcatgttcatttcatcgccatgttagtcgcatcataacgaatgaagaagtcaatgcattactaaagcagaagtgtaaatttaaatgggaggtgcctgcagaggacattccaaaatccaaatgggttggaacaggtgaaaaaatggagggagcttatgttgatcttattggtggtgtcaaaggaaagttgagggatcattggcagaataccctctctgatcagttgaattctagattgaatttcttctcactttgtagtagctatcgtgacataatgcattgtaataagaagccattttatctaaaaggaggtagcactgtggattccagtacaatggactcctatcttatgcatgctttgaatcatattaacagaacgagagagattgttgtaaaaaatgatgcgaagcttaggagtgaccctagcaaagatattttggatgataactcattcctcgatcagggctttacacgtccaaaggttcttttcctgttacctctaaaaagcattgcgaggcgtgttgtgaagaggttgatccaactgtccccactgtcacaaaaggatatcattgcaaaattcgaagggaagtttggcgaatcagatgatgaagtagaggagcctgttcaaagtaataaacctgcagactttgacctactgtttgctggagatactgatgatgagttcctttttgggataaaatatacaaaaaaatctatgaatctgttcagcaacttctactcatctgatatcattgttgcatctcctttggcacttataaagttgaaccgatgggaaccaggtcaatcggacagtttatggtgaaaaccggcgaacagggcaagactgtactggcagttccttttatagtttggctatcacatgggctggcctagtaagactcacctgcttgccaaaacacaagtatgtttattccaaatatgtgtaaaaagatgcatgggagggggtcatactcaggatggtgggctgggaactcatgcgtattggagaggttatctatcgcctcaagctgccagcgaaagctcgactgtaggatgtgtttcatgttggactgctcaaaccattccggggtaccctgcctgctgcgcctcctgcttggccacccgtttacaatggacgctttgtggtgcagccggcaagtgtcgctcagaggagggtagcttgtggtcctcgcaaagttcttggttcagtggacagggcaacaacggtcgaaagcgtcttgggttcctctcgactagtctcgcatgctgttccctaatttccaggtcaaggacaagttgcttctccaggaggggagagatgtcaggtggggagttcactacaactgtcgccagaaggttacaccggcaacagaaggtgcataacgtgcatgaggataggacacatgaagctgcaattagatacacatgaagctgcaattagataaatttcagttgtttagatttgataaattgagattaagttaggctgtgtttgagaggataggaaaagagaagatagtttggactgtaaaatttactgttttcgaaccctaaaataactaggtgaaacaccgcgcgttgctgcgggagtttagtatgataacaataaat

SEQ ID NO: 11212 - DNA, 719 bp, Oryza sativa
  ref <308>: DATABASE ACCESSION NUMBER: AK108560
  ref <309>: DATABASE ENTRY DATE: 2002-08-28
aacccaaagcgacacaagctagatagcagccaagaacacttattcactgagtaacactagctcattcgatcccagacaccaatggcttccaaggtcatcgctcccttccttgcccttagcctcctcctcttcgccgtcattgtgcagggttgcacacccaactgctccggcgagcaggtcgtcccgactccacccattgcagtcccgacgccatcacaccatggtgggcacggtgagcacggccgttgcccgatcaacaccttgaagcttagagtgtgcgccaacgtgctaaacgggctggtcgatgcgaagatcggacatggcaccaacgattgctgctcgctgctatctgggatcgccgatctcgacgctgccgtctgcctctgcacggccgttaaagcgaatgtgcttggcattagggtgaacctccccgtcgatctcagcatcatgctcaacaagtgcggcaagacctgcccgtccgatttcacttgctgagctgagctgcatgattataatgttctggagtttaatttcgtgtgatttttggttgtcgattgagcctttttttcatgattccgcgtgaataagtcttgtttctttggcaaattgatgtgcggatctatcatccattaaattactttaattcaattgttgtaagttgattttttttttgagattgtaatatgtaaaacccattatatatattgttatctggagat

SEQ ID NO: 11213 - DNA, 1690 bp, Oryza sativa
  ref <308>: DATABASE ACCESSION NUMBER: AK108561
  ref <309>: DATABASE ENTRY DATE: 2002-08-28
ctgttcgtctctccgccgtgcgccgtccgtcgtccgccatggaggttgctggccctcctccgttgaccagcgcttcccctagcccctgccgctcaacaccaactgtggccggatctagttgtttggcggctcgcgagaaagaagttttggtggtctagatctggtcagttcatcctccctttcgagctgatctctcaccaccgagccttttccccacatcccttctcgtcgttcggtttgaggtggtcagatctaccggcggcaaagctgctggatgccctcacttcgtgtggctgtgagatcatcggggttagaactgccagaatcgcttggactcgaggaagaaggagagcgagcaagacgagggatgcaaatgggcgacgacctgggtgtggagcggtgaccccagctatcggatgcagcagtttgcacgcgcgggtgcaacacggagcacgcgctcagcctggctgagtagcgaagtttgcccgaatcgggcgttcctcgggagcctggctggcgaccgctttttgcacgcgctgggcctggctgggaggtccatgcaagcaaccaacaaggataattatatgaaagaagcccctctatatctggagttagggagcacatttttactagcagaaatggtgaacatggagtagtgccatattatgtcaagagttatcttaatctaacagaggatacaccgtcaactatatctttctccatcgcactctctaaaatatatatttatcaggtatatcctcttcatcacactctgaaatatatttggcttatttacataatcctatcatgctttctttcacaggaagatgtttgtagaacttattgatttgggtaatatttattcgtcgatgtcaaccatttcttgtccacaatgaatggttgatcgtattcaagatgacaaagccatatttatgcttcatagtttgagactactatatggtgagagaaatttatgtatgcctacaagagtgccttgtatgatttttgaaagatcaccaaaatggattttcctcaaaagattcttctgtacttcaaatgctacgtgtacaaagttcgcatataatgaactagaaaaaaaatgcaggtggctatgtctagctattactatagaccactgcctaacaacatccttatcgtacttatccgcaattttcattgagcctatgcccaatcaaccgtgctttttataaacataggaagtattactgttgctttcttgccctatacatctcttgcataccacccttgagagtttctgagaatatttgcaaaaaaatattgattaaccttgccattagcaggaaaaaacaaagcaatctgaacgcaacacagattcaacaggatgatccaatgacaacagtgaacactatgggttaaggtatccaaacatagcatatgctttcatcacctactgcaaacatcagtcaccttttacaccagctgtatgcaggtggtgcgccaagccgccaagggcgcgcgccccagatcctagtatccttcaacttcaagatgaaagacgtaaatgaacccatgtatgaacatgcctacatctaataggcatccaactatgcaaggaaagcctatttagcctccattaactcttgcttttgattgaatagtatctctcaactccaaaacggggtataacgtctacccatctttaaaaacc

SEQ ID NO: 11214 - DNA, 1131 bp, Oryza sativa
  ref <308>: DATABASE ACCESSION NUMBER: AK108562
  ref <309>: DATABASE ENTRY DATE: 2002-08-28
aaccagcaaagcaagcacacatttttttgtccgatcgacatacgttccaaacccgtcacatattttgctgtcgatcgatcgatggatggatcgatctagaggttgaacatgaccttgatggcgtcgcggccacgggcgctgacctcgaacgcctcctccacgtcctcctgcgagaacccgaatcggtgggtgatgagcggcttcacgtcgatcttgccgctgcggaggaactcgatgcagagcggccacgtgtccttgtaccggaatatccccaccacgtccacctccctgatcgccgccgacgtcagcggcaccgtcatctcgttgtgccccatcccgacgaggcacaccttcccgccgccgcgcgtcgcctccagcgccgtcgccaccgtcttgctgaacccggcgcagtccaggctcacgtcgatgtccccgcccatcgccgccctgatccgttccacctcctcgccgacgtcctccgcgcgcgccgacaccctcacggcggcgtcggcgccgagggatcgggccacggagaggcggtgttcgtccacgtccacgatcacgacgcgcgtcgcgccgaacgcgcgcgccgccagcagggtgaccaggccgatcggccccgcgcccatgatcagcacccccgtctccggcccgacgtcggcgcggcggcacgcgtgcacgcccacgctcagcggctcgcacatggcgccttcctccaggctcacgttctccggcagcttgaagcacagatcaccagggtgcacgatctgagtaccacgacattgatcagaattgcatcttcttcttggagagaaatcgaaatcgagctgaattgcttgcttgcctggttggcgagggatccgtggacgggaggggtggcgaagaacttcatgtcctcgcagaggttgtagcggccgcccttgcagtgcctgcagcgccagcagctgatgccgggctcgagcgccacgcggtcgccgacggcgaggtgcgtcacgccgctgccgacctcctctatcacgccggcgcactcgtgcccgatcaccatcggctccttcaccacgaaatgcgcaatgcgcatctcctgcacgcactcaaacaacaaacatatataagccacattatctttcattc

SEQ ID NO: 11215 - DNA, 1396 bp, Oryza sativa
  ref <308>: DATABASE ACCESSION NUMBER: AK108563
  ref <309>: DATABASE ENTRY DATE: 2002-08-28
gtacggataaaagtcgaaccaagcgtagcggaagaaccgaggttgtggcggcgcggcatcttcccagaccaccgaaatcgcctggtcctccatgccgtaagccatgatcttgcccggaattccgaagagcagcaagctaccgtgctcggcgacgtgcagcggccagagatccaggcagtcgactagcctagcgcggcgcggccagatcaggtggtgcttccgcgttttccgctgtatatccgggtacaactccttcatgcgcgtgaggtcgacgcggtacagcacgcgccactcgcggcagtctcccgccatccccaccacgtcgaagcgggcggcgagcttctcctcctccgtgtagccgatcatccggaggtggccccggccggcaccagctgactccccgaccccgaggtaaccgcagatccagcgattctccggctgcagatgcctcgccggcggcatcggcaggctgctcagctctccttccccgtcgtcgacggcgaagcggagcagggagcgcgagcgcgatgtcacccacaccagcgagccgttccagtgcacgccccgggagtggtggatccccgcgaacgggttgctgccgcgctcgtaacggagcgccgccctccatgaccgagcctgggaggagtacacgtggacgccggcgagccccagcgcgacgaccttgtacaccggcgacctggacgggtcgtaagccaggttcaggtggcgcccgcggccgtccggcggcgtgggtatctcgacgaacctcttggtggccgggttgcagacgtagtagcagcaccagcgcgccccggaggcgacgctgctatccatcggccggcggcagaggagcagcccgttgcacgagctggtgacgttgatcttgcgcgggacggtggagccgctctccgggacgaacgagaggtcgggagcagcgggatgcgtggcgctactgtcgcgtagaggattgtagctgaacttcttgtggagctcgttgctgaggaagaagccggcaacggagtggccgtctctgctcctcgagaagtttgtgtgcatgaaatggtgctccgatgtcacggcatgccattgcttgcagacgagccgcatacgagcggcattctttggaggaagccaggcgaggatgttggcgatgatatcgtcggagaataatatcgcctcccctgccatttgagagttgacacagggctgcaagaagcccaattaagaactcaagagggacccgaaaagagatgaagaggatgttgttctttaatcaaagcactttgtatatgtgattaagaggaacattttttttattagaggatgttgttcttatccggctggccggctcgcaaaattccttgctgatatcgataacttagatcggagctcgctc

SEQ ID NO: 11216 - DNA, 850 bp, Oryza sativa
  ref <308>: DATABASE ACCESSION NUMBER: AK108564
  ref <309>: DATABASE ENTRY DATE: 2002-08-28
attccattccatccatccatgcatattaatccttctcctctctgcgcagccgacgcctagtgatagcttccacgctactccctctctccccaagtctacggcggcgtacgttgagccgcgtcgtcggcgcggcgacgtccggcggcgctgggccaggatgagctactccggcggctgctcgacctgcctcgagaccatcttctccgtcgtgctcccgccgctcggcgtcttcttccgctacggcttctgcagctcggagttcgtcgtctcgtcggcgctgacggcgctgttctacgtccccggcatcgtctactccgtctgggtcgtcatcctcaagacgccgccggagccgccggggatcgacggggagcggccgtactacatcctcgcctgatcgaccacgcacacacgccaacggccggtgaaattcagttaggtaattggtcgttgagcgtttgcataatcaaattactcttctagctgtaatgatattgcattagtatactatgtggcgattgggaaaagctgtagctagtagttagtggaatagtggttggttcgggcctcacggcctcctgattgtagcaatgattattgtactgttctttgttggttcttcttatttttcttcttcattcgacgggtttgtgcctttgtggttgtttagattgttcgccatgcggcattgcggcatgctgtataaattgtaaaatatatagtgggttggtcgattcttgttttgagggacaaatgtatatggattatttgttagtgcatgtagcagctgctaatttgcagacttggatatggatgagtcatgtttgttaattagatgcatggatttattttt

SEQ ID NO: 11217 - DNA, 1388 bp, Oryza sativa
  ref <308>: DATABASE ACCESSION NUMBER: AK108565
  ref <309>: DATABASE ENTRY DATE: 2002-08-28
ctcaaccgcctcgccgccgccaatctcatcgacgacgccatccgcgcgttcgattccactgccggttccatcggcctgcgggatgaggcctccttccacgccctcgtcgacgcgctctgcgaccaccgccgcgttgacgaggcccaccacctatgcttcggcaaggacccgccgccattcccgccggtgacgaagacctacaacttgctcctccgggggtgggctaagacccgcgcctgggcgcgcctccgccaactctggttcgacatggatagccgcggtgttgccaaggacctccactcctactccatctacatggatgcccttgcgaagtcaggcaagccgtggaaggccttcaaggtgttcaaggagatgaagcagaagggcatggcgatcgatgttgttgcgtataatactgcaatccattcagttgggcttgcacagggagtcgatttcgctattcggttgtataggcaaatggttgatgctggttgcaagccaaatgcttccacttttaatacgattgttaaattattatgcaaggaagggaggttcaaggaagggtatgcatttgttcaacagatgcacaagtttgggattgagcccaatgtgctcacttaccattgcttcttccaatatttgagccggcctcaggaggtccttggactgtttgagaaaatgctcgagaggggttgtcggccaaggatggacacatatgtcatgctcatcaagaggtttgggcggtggggattccttaggccagtgttcattgtgtggaaggcaatggaaaagcaaggactcagcccagatgcatttgcttacaattcccttattgatgcattgctgcagaagggaatggtggacttagctagaaagtatgatgaggagatgctttcaaagggattatcacccaaaccaaggaaggaactggggactaagattccgggagcagagtctgacagtgataatgcattgagtggcgtactttaatagtttgattactgagagcagtggtattaacatgttctggttatcactaagattatgctgatcttcctttaaagataggcttctttgtgttgaaagtctgaaggagatctgatttgtggtgcacatgagtttaacattgaagtaaaagattgcatttcctctcaactattgcacagctgcccacaggaattatgatgatatccctcaataatggaatgtttgcccaagctgaggacacctgggaagtgggcactagtgtgaattcggagagctattgctcctcacagatctatatgattaccgtggtcaattgaaattacgacatgctgatatttctcaaagcagacaaccttgtctcagggggtcataaataataaattttgtgttgaactgaaatg

SEQ ID NO: 11218 - DNA, 1432 bp, Oryza sativa
  ref <308>: DATABASE ACCESSION NUMBER: AK108566
  ref <309>: DATABASE ENTRY DATE: 2002-08-28
gcggcggccggcggacatgtcaagtgcgtcaggctgctggtggcggacgccgccggcgacagagacgggtacgtgaacaaggcggcgaacggcggcgtgacggcgctgcacctggcggcgctgcacgggcacgtcgagtgcgtccacctgctcatcgacgagcgcgccagcctcgccgcgcagacgctgccctgcgccgcgccgcccatggcatccatcggcgccggcagcacgccgctgcactacgccgcgtgcggcggcgaggtcaagtgctgtcagatactcgtgtcaagaggagcagacagaacagccatcaattgcaatggtcaggtggctcccaatcgacgcagccagaatctggggctgcaactggcttgaacacgtcctctcccccaagtcgcatcttccgatccccaagttccctccttccggctacctctcccagccactccccagcctcatcgccattgcaaggtactttaactgatcgctgatcaccaatgcaattctgcaaattcaatgtgatctgatcagtgatattcagaacttgaaatgcactgagttggagtggtgttttgtgtgttgttttgtactatggttttgtttggtttggtgagatttgcagggagcaaggtctgaacttgtcttcggaggtttctgatggcttcgatgaaggagcagatgcctgcgccgtctgtcttgagaggccctgcactgtagctgctgaaggttgcgatcacgagctgtgcgtgaaatgcgcgatggatctctgctcggtgatcaaatcctacgactcggcggggatcgccggcgagatcccgtgcccgctctgccggaccgggatagcctccttccggacaaccgccgccccgccgccgccgagcctcgccgggtcgcccgcccgccgcagccgccgcaacaactccggcggcggcggcggcgagcacgaggcctccaactccggcggcagcgagaagggatacggcagcatcgaccccgacgccggcgccgtcgtccccctctactacgcgccgcccttcgcgccttctgccatcctgacctgatcggagattggagattcagttctgaagcaaaaatgtttgtctttgcaagagctctgaatttggcagagagatatgtttctcggtttctgaagagatgtgtctcgcaaaaaaaaggcagctctgaatttgggagaggtgtgtctcttctttgattcgtcaagcaaagatcattaaggtgataactgataaagattaaaatttgttgtatgcaatgtataattagttggggttaggagtgtacatgggtgatttgatttgatctgttttgtttggtttggtggtggcgttgatgacttgatgctggctgggggagtattgggttgtgttgtgttgggttggtctgaatgtatgtagggtgggctgtaggg

SEQ ID NO: 11219 - DNA, 1426 bp, Oryza sativa
  ref <308>: DATABASE ACCESSION NUMBER: AK108567
  ref <309>: DATABASE ENTRY DATE: 2002-08-28
aacgatcgatccgatgcgttcgccgcgtgatcttgtggtggcggtcgccctcttgcagctgtccgtcctcctcctcctcctctccggcgagccggcggcggcggccggcaagagcaaggtcgcggcgatcatcgtgttcggcgactccacggtcgacacgggcaacaacaactacctctccacgctcgtcaggagcgacttcgctccctacggccgcgacctccagctcgccggcgccggcgtcagcggaggcggaaatggccggcccaccggcaggttctccaatggccgcctcgccgtcgacttcatctccgaggcgttcgggctgccgccgctcgtcccggcctacctcgacccggccgtcaacatgagcagcctcggcgccggcgcctgcttcgcctccgccggcgccggctacgacaatgccacctccgatcttttctcggtgctgccgctgtggaaggagctggactacttcaaggagtacgcggcgaggctccggagcttccggggagacgacgacgcggcggcggcggcggcggcggcgacgctgtcggaggcgctgtacatcgtcagcatgggcaccaacgacttcctcgagaactactacgccgtggcgcgcggccacgcggcggagtactcgacggcggcggcgtacggcgactacctcctcggcgtcgccgaggcgttcgtccgcgagctgcacgcgctcggcgcacgcaaggtcgacctcaacggcctcccgcccatgggctgcctcccgctggagcgcgccaccggcggcgcgtgcaccgaggagtacaacgccgtcgccgggcgcttcaacgccggcctccaggacatgatcgcgcggctcaacggcgagctcggcggcggcgcgaggatcgtgtacggcgacgtgtacggggcggtggccgcggtgctcgccgacccggcggcgtacggggtggagaacgtgaaggccgggtgctgcggcgtgacgggggtgttcgagatggggtacatgtgcggcgccggcgcgcggagcccgctgacgtgcaccgacgcgagcaagttcgcgttctgggacgccatccaccccacggaacgcctccaccgcgccatcgccgacgccaagatgaacaccaccctccacgtcttcctatgaacgcaaccatgtgtttataggagatgtacttgatagttcagtgataaggggtgtgatttcaaccctaaagtctcatgttcaatttttaatatgttcatgatttcttcttaaaaaaatatttagagggatgtctctcccttcaaatcttgtttgtttttagcgcacaagcaagattctgcgtgctgtgaactactattcaacaagtatacccattgaacacgatgatgacaatgatcaaatagtagacatattaatgcaatatgctaaacatttttagtt

SEQ ID NO: 11220 - DNA, 1511 bp, Oryza sativa
  ref <308>: DATABASE ACCESSION NUMBER: AK108568
  ref <309>: DATABASE ENTRY DATE: 2002-08-28
aatcagattggaattggccacaaaagctactgctaactacattcacctcacatttcttcttcccctttccctcctcctcctcttcttcctcttcttctcccccacctctctctttaatacctctcctcctcctgttgctgcttctgcctctctcacatcttctttctttccttctctggatctcttccatcttcagaagagagagcactagttagcatacccatccatgatgaacatgatgaccgatctgagctgcgggccatcgtcgatgacggagctgaccgcggcagcggcgccggctgggtcaggatcgtcggcggcggtggcggcggggagcagcgagaagatggggagggggaagatcgagataaagcggatcgagaacacgacgaaccggcaggtgaccttctgcaagcgccgcaatggcctcctgaagaaggcgtacgagctgtccgtcctctgcgacgccgaggttgccctcatcgtcttctccagccgcggccgcctctacgagtacgccaacaacagtgtgaaatccaccgttgagaggtacaagaaggcaaacagtgacacctccaactctggcacagttgcagaagtcaatgcccagcactaccagcaggagtcctccaaactgcgccaacaaatcagtagcttacagaacgcaaacagtctaactcggcttgcctaaatatctctagtaggaccatagtgggggattctatcaacaccatgagcctcagggaccttaaacaggtagagaacaggctggagaaaggcatagctaagataagggctagaaagaatgagctgttatatgctgaagttgagtacatgcagaaaagggaagttgagctgcagaatgacaacatgtacctgaggagcaaggttgttgagaatgagaggggacagcagccactgaacatgatgggggcagcatcaacaagtgaatacgatcatatggttaataacccatatgattccaggaactttcttcaagtgaacatcatgcagcagcctcagcattacgcccatcagctgcagccaactacccttcaactcgggcagcagccggccttcaattagttttggtgtagacaccgtacgtacacacgtacgttagatgaaatctgaaggcgtcgatacccgcggctacgtaacagcgtgatcaacctgaagaaatcgatgcagtaattctatgtgttcgtcagatcatcataaccagtattgtcattaggcgttgtgaaaaaaaaatgtgtcagcatgcattgcaagctagcgtttgtggctgctcatcagctgcatgcgtaattgcgtacgtgcacaaattaaacagaccttgccaccattgtgccatattgtgtgtgttgtatgatatatatatatatatatatatatatatataaacagcacgtttgtgctctgattcgtgtaactgatcagcagatcaaactctaccactgccgatatatatgtgaggaccatggattgatgcattgtcgttgatcttc

SEQ ID NO: 11221 - DNA, 1553 bp, Oryza sativa
  ref <308>: DATABASE ACCESSION NUMBER: AK108569
  ref <309>: DATABASE ENTRY DATE: 2002-08-28
acgattcgtcgcgttcgcgtgctgccaaatcctcctccccctcctccgtccccacaacattctgtcgcgccgattcgaccgttgccgcctcgcccgctccgcgcacgcgcgcacgccgctcccgttcccctcgcgcacgcgcgggccatggcgatcgacctggcgccgctggctggggagttggaggtcgcgggggcggcggttggagggaagaaagaggagggggagggggaggagggcggggtgtgcggcggggaggccgtggtggtggccgcggcggacgcggaggtggagggccacccctacgacttccacgtgtccgggccgcggaacctgccgccgcccaactggagggagatcatccgttcgagctggaaggatcccaattacaaaaggatggtaatggcctgcttcattcaagcagtctacctgcttgaactggacaggcaagatgagaaaggagaagaggatggccttgctccaaaatggtggaagcccttcaaatacaaggtcacacagacattggtcgatgagagagatggttccatctatggtgccgtccttgagtgggatcgttcttctgctttgtctgaccttatcctcataagaccaagtggcgcgccaagggctgtgttagctctccgaggaacactgcttcagaagcccaccatcaagagagacctacaagatgatcttcgcttcctggtgtgggagagcttaaaaggatcagtcagatatattggcgctttagaagcactgaagacagcagttgagaggtttggtagcgctaatgtcagtgttgctgggcactccttgggagctggatttgctcttcaggtttgcaaagagctcgctaagcaaggagtcttcgtggagtgtcatctgttcaatccaccttctgtttcacttgccatgggtgtaaggagtatgagtgagaaggccagctacctgtggaaaaaagttaaggctagtctaccactgactgaagaagcattacctgacagtaccaaagaggagggaagtgcaaagaagaaattgcgtgctgacaagaaatgggtgccacatttatatgtaaacaacagtgactacatctgctgtcactacaatgcccctaattgctccaccaccaccaccactaccaccactgatggtgcttcagatgagcagcagcagcaacgaaaggcaagtgagatcgctggtgatgtggtcgcgaagctttttgtgacatcgaaaggcccacagaagtttcttgaagcgcatgggctggagcaatggtggtcggatggcatggagctgcagctagcagtgtatgacagcaagcttatatacaggcagttgaagtccctctacacagcaactgcaccgtcaccccctgcaaagtagtagaaactgctgagatcgctgtttcaactggcgttagaaatactctttctaatcagtttctgcctctattaacttgatatgtttcatcatggttgtgactgtgaactattatacagtaaaatataataaacggacatgtgctgataaatacattgatatttttcatgttc

SEQ ID NO: 11222 - DNA, 1522 bp, Oryza sativa
  ref <308>: DATABASE ACCESSION NUMBER: AK108570
  ref <309>: DATABASE ENTRY DATE: 2002-08-28
gatgcaaaaagcccctaaaaaggccaaaacgatcagccgagctctcctttccgcgctgtaactgcaatgcagcgttcaggctatcttctttcgggccttcccactatcctaactcacaagccgttggtagttcccttgatcgcttccaatagtcgcgggctgctagctccgtcaagcgtcaaccaaccgctgtttagtctgctcctcatgccatgcgttacctctacttccacggcaacgcaagccaggctcggcctatccgccaccacctcctcgcctacctcgacgcctgcgcctcgcgggcccacctggcggagctccacggccggctcgtccgggcccacctcacctccgacagcttcgtcgccggccggctcatcgccctcctcgcgtcccccgcggcgaggcatgacatgcggtacgcgcgcaaggtgttcgacggaatggcccaaccgaacgcgttcgtgtggaactgcatgattagagggtacagcagctgcgaagccccccgggatgcattggcggtgttcagggaaatgcgtcggaggggagtctctcctgataattacactatggcagcggtcgtgtcggcgagtgctgcctttgctggcttgaagtggcggtcaaatggggacgcaattcatgcgctggttcggaggattgggtttacatcggatgtgttcgtcatgtcaggtcttgttaattattatggtgcctttagaagtgttgaggaagcaagcaaggttttcgaggaaatgtatgagagggacgtggtgtcttggacgtcaatgatatcagcttgtgcacagtgtggtcactgggacaaagtgctaaagatgctttctgagatgcaagcagaaggaattattcctaacaaggtcacgatataagcctgctttctgcttgtggccaaacacaggctgttgatgaaggccggtgggtgtacaatcaagccttggtgttgtccctgatactgagcactatggttgcatagtagacctcctggggagagctggtatgttagacgaggcatttcactttatcaagaagatgccaatagaacccaatcctgtaatttggggatcacttcttgctgcttgtagagttcatcacagaatggatctaggaaaggtaattggacagcatatcgttaacgtagctcctaatgatgtgggagtgcatgtgctcgtttcaaacttacatgctgaagaaagtcaatgggatgatgtcgaacatgttagaggactaatgggaagcagaggtatagagaagacacctggacacagttctgtccaggtataaaccttcagagttcagactatgtaaacttcacttgaatacatgatctaccattgagtaaaatatagaaagtttgcaggagcaaatgtaagtatgtaactattcagtttcagttttcttcaaaaaaaataaataaagaagtaaactattcagtttcagttttacaagatgtcaggcatggcatgaccaaacttcactatctacaggacatgatttctgtctc

SEQ ID NO: 11223 - DNA, 2135 bp, Oryza sativa
  ref <308>: DATABASE ACCESSION NUMBER: AK108571
  ref <309>: DATABASE ENTRY DATE: 2002-08-28
cattaatggatgacaggcagctcatcaatgagctactagaattccttgataaaaagaggtacttgattgttattgatgatatatgggagacatcaacatgggatttgattaaaaatgctttgccagatagtaattgtgaaagtagaataatcacaactactcgtatttccaaagttgctgaacaggttggtgacatttacaacatacaaccgcttttgatgacaatgctgaaaaattattctacaccagaatatttggttttgatggaaaatatccaagtaatcagttgactgaggtatcaaagaagattttgaagaaatgtggtggtataaacccaacaatgaatggtccaaggtttatgactctattgggtttggacaagaagacagcaaggatgttcggaacacaagaaagatattgccttttagctattacgatctacccattcaattaaggacttgcttattgtatctatccatatttccagaagattattggattgagaaataccaattgatttggagatggatagctgaaggttttgtccacgaggaaaaggggctagtgttatttgagcagggggagagattcctcgacgagctgataaatagaagcttaatccagccatcagatcgttatcatagtggtattgtaaatggctgtcgtgttcatgacatggtgcttgatctcattcgttccttgtcgagtgaagagaatttttgtgctatgctgcataaggaacaaaccatgctttcacagaacaacattgtccgcaggttagccatccacaaaagaattctagagcataaccctaagatgaatgtgcgcatggcacaagtgaggtcattcaatgcctacatgtgcggtcatatggattgtatgcccccgctatggagctttaaagttgtgcgcgtgttagtcttagatttatgtaattttacgggaagtcctcatcttgagcctattgggaaattgcttcacctcaagtacctaggactagtgaacacggccattgctgagctccccaaggaggttgggaacctcacattgttgcagacgttagacatatggcgcactagtatagaagaacttccatcaactgttggtaagctgaagcggctgatctgcctgcgagctgacagcaacacgagagtgccagcgggggtgatagggagcttaacatccctacagcaactgcgccttcactctgctgacaagtccccgagcgccgttgtagagctaggtaagctggtggagctaagagtgcttgaaatccagttctgcaagatggatcagaactcacggagatctctagtggaatccgtgtgcaacctttgcaacatacaagttctcgaagttcactatgatcactctggacctacagagtgggcgtacctaggtagcagctgggaaggctgggtgccccatccacggctccgccagttcttgctgagagccatctctctgccatgactaccgctgtggatcaactcctcgcacgtcgcacacctttcctaccttcaactaggagtgggctttatagatgtccaggatctacacactcttgggaggttgccagcgcttcgttgcctctacatatctagcggtattctgctatcctacgtcgtcgccggtggagatggattgtttcaaaatctaaggcattgcacgaccaacttagagttcatgtttcaacagggagcaatgccgatgcttgcgcacctcgagttcagggtcagtgtgctgggcctgggcaggagggaggaccctgcaggcttggggttggggcaccttcctttccttgaacttgttacgctgtacttgcaatgctctggtgccagcattgtggaggttgcggaagtgaaggtaatgctgaggcatgaggtccatgttcatcccaaccatcctacccttaatttggaagaataccattgccaaagccaacagcccgaagatgatgacagcggtggatccgtataaaaatatttactagtcaatggactgggcgagaccagtgaccagtactgtacatagcctgcatttgttcaggtttgtttagctgtaacagaattttcattgaacatggttccaaaattcagaagttggtaattctacaaccaactggtatatgcttg

SEQ ID NO: 11224 - DNA, 711 bp, Oryza sativa
  ref <308>: DATABASE ACCESSION NUMBER: AK108572
  ref <309>: DATABASE ENTRY DATE: 2002-08-28
gatcgattgacacccatccatccgccgccgcgccgccgatctccatcacctgcggctgcgagcgagggagcgacggccgccggcgccctccgtcggcataacacgcacacacacttcttcacctctgggaaatggcggcggcggcggcggcggagggcctggcggcgtacagggcggtgctgcgggcggcgcggcggacgttcgccggcgacaggctgatgctggcggagtccgccgtggagatccggcgccgcttcgaggagcaccggggcctcgcgccgggctccggcgaggccgcccgcgccctctccgacgcccgcgaggccgcgcacttcatcacccacatgatcgtccaggcccagcgcgccccctccggatccttcgttgtaaaacctgagaaggaacatgctggagctacattggaggttccttctgaggaaatcctgtctaagttgaaatagagataaagagcagttgttgtacaagcagcacaagcttagcatcattgggctagttaataaatcagctctcatctgtcatattagtggctgaccttataattacagcagttgtgttttttatggtcagagcagcacctttttgttttttgcactatccagaacagctttagcgattgtaagttacgtctaaaaaaccacaacacaactctttagatgttttgatatgcaattttggggaacttatgagttt

SEQ ID NO: 11225 - DNA, 1591 bp, Oryza sativa
  ref <308>: DATABASE ACCESSION NUMBER: AK108573
  ref <309>: DATABASE ENTRY DATE: 2002-08-28
cagttgcctggtgagagtaagcctgactgcttgttgtctgcttgagcatataatgctggcttaaaccagtcaccaacttaatagtagaagtgatgtaaactgtaccagagtggtacagaatcaaatcagttcactgttccatttcctgttcttggcatgcatgtacatccactagatatggaacaggagcaagattcaactttaccgacaacaggtcgtccaccgtgctacccaccaagaattcttttttgcaggatgtatgcatgtctctttgaatattctctgaccaggagaccaaagttagttggttgagacttaagaattgacaatcaagaccatcacaagaacacagtataccaaaacaacaggggagaaagtgagcagcagagaagctaccaccatgcaacaactagaaataccggagctgagctaagctgagcttcaattcttcacctgtaatcacgatgtcgcggaggccgtcgccgtggatgaagctggtgtacctcgcccccggcagctccctcccccttccgtacgacggcagcggctccgccagcggccagctcctcgtctcctgcgtcgatgtcaacgacaccactcaccaccaagaagaagagaggaaaagaaaaacatggccatggcggtggcgaggtgagagtgagacctgtgtggccttgaggacggcgcccctggcgaggaagagggtcatgtggctggtgaggttgaagctgccggtgagccacgttccggccggcacgagcagcgtggtgccgccgcggcggcgctggtgctggatgcggtacactgccttgtggaacgcccacgtgttcaccgtccggccgtcgcccacgccgccgaactcggcgatggacaccgtctccggccgtggcctcaccggcaccgcaccggcgcacgtcgtcgcctccgccgcgtcacattgcaccaacaacaccaccagtagcacggtgaccgcgaagccatgcccatgcaacgcggccatcaaagaaaaaatgagaggaaattgtttgcggctaaactaaagagagagaggccaagcagagagctccaagaagagcttttttctaccggtgtttgtgtgatccctataggagaaaggtggccaaatcctgagcttaacaatgctgagagtgagggttgaagagaggaaggcaaagcaaagctatagcttgctcccaagtgcaagaatccaagggtggtgtgaggagagccaagcagatgagtccagaggatgggatggggtggctcagctttggagcaaacctgtgactcgctagctcacttactctcttgtgagtgtgagtgtgagtgaagagaagaaagaaaatggagaatgtcttgtgaaagagagccagttttggtctccagtgaaagcagtgaagcttttattcagatcttgcatgctcatatataatggctgctccatttcgcaattttcaactcaggtgtgtcagaatggtaaaaataaaaatcaaaatttctcccatgctgttagtaaggtaatctccttccttttatttgaaagctaggcaggtgttctaccgagatgaaatgcaaagggaatttcttgctt

SEQ ID NO: 11226 - DNA, 1404 bp, Oryza sativa
  ref <308>: DATABASE ACCESSION NUMBER: AK108574
  ref <309>: DATABASE ENTRY DATE: 2002-08-28
aagcctttaccaaaggatggcttacaagtcctccgccgcctcgcaatggccggcctagccgacggccgctgtccgaccaacggccgaaggtggaatccggggaggagggaccggccagcacccgcaccgccaccaccaccatccactcgctcggcgaggatctcctgctcgccttcctccgcctcccgtctcttgcggtgctcgtccgcgccgccctcgcctgccgcgcgtggcgccgcgtcgccggccttccgcgcccgcttccgcgcaacccaccgggcgccattcctcggcctcttcttcgcgccctccgccccgcgaccgggacatggccgccgccgtccgtggcggcgacttcttcctcacctccctgcaaccgggacatggccgccgccgtccgtggcggcgacttcttcctcacctccctgcaagatcgccccccacgacgagcagcaatgcagatctgcggcggctactgcctgctcatgaattgggatgatgggttgttcgcggtgctgaacccattgatgcggacaacaccggggagtggtcgtctctgccatgggtggacatcccagaacctgtcaggtcagatgacactagctgctggcttctgaattatgggtctacgagaatcggaggtatgtgctttcgcttgacaccgccacaatggcattctccgctgttcagcttccgcagtgcccgagacattgttcttttgatgttggcgaaacaaaggatggcgcgatctgcatcgtttacgcgcatcaattgaatgtcagcgttctgatgcacaccaagggtgatgatggtgctgctgagagatgggtgatggacaggtagttcccttggacaaggagctcgaacgagtccttcgagccccgctgcgtgacggcagtgtactgatgcattttagtggatgaccccagacaggtgtttgtgttagctgtccgcgacagctacgcgtatttagcaacatctccgatgttccatgatccctaatctccttgttggttcctgttcctatgtttggaaacgatgaaactggaaaggctgtttcgcaggacatttgacaatgatgttcagccgtacatcatggcatgacctccttctttagtcggtaactatgggaggtttgcagttgaagaggctccatgaaatgcagtactccttggtcattgggcattagaagaaaatgagcagaatctatgaaccacactgccttgctcgtgattaaatcgaaatgctgaagagatactagaaattgatttttttttttgccgggttggccgaaagaaagggcgaccaaatttcattaagattgggtgtgtgtacaaatactagaaattgatttagtttgaagctgtatcaaactgaagaatctagtcaagttgcatgatgttc

SEQ ID NO: 11227 - DNA, 1448 bp, Oryza sativa
  ref <308>: DATABASE ACCESSION NUMBER: AK108575
  ref <309>: DATABASE ENTRY DATE: 2002-08-28
ctcttcatttcccctcctccctcccctttgccccgccctctcgtccggccgtttcgtggccgtttccgtgggtcccatccacttgtcctcccgtgcaatttacgaaattgcccctatcatcttcgggtggtccccacactccacgactttctcttgccccctcccttttctccctccctttgtttattccccaatcgctatcgccgagcgattccgtctcgtctcgtctcgtctcgccgctgctctgctggcgtggcggcacgggggccgtcgagatgtcgatctgcgcgagggcggagccgccacgtggcggcgggacgctcggcaagcggaaggagcgggaccgcccgtcgtcggaggagcagcgggcgccgccaccgccgccgccgccgctgttcccggcgatgtccgctaggccccagccgcccaggccggctcaccccgctcggttcgtcaagcccatgccaccgccgccgccgccattccccaagggtggcggcgggagcagcttcaagctcatggcggggtacctggcgcacgagttcctcaggtccggcacgctcctcggtgagcggccggagtcgaacagcaaggcccccgcccccgcggcgagcgccgggccggcggcgcccgatccccgcacgcggtacgccgaggcgtcgctgctgctgatggccggcggagcccgcgtccccggcgtcgtcaacccgacgcagctcggccactggctccggataaaggagtagaaccgccggggccgtgaggcgcacggtcgccgtcgcggcattggcggggtgggtcgcttgcggtgccgcatgcacgtctcccgaagcgatcggagcgaaagaagagaagaacggatgcttcggacatgtgtatacgttttcaaggtttgatctcaaaattccgcgcttcttcaagatgaactttggttcatacacggtttcttctgtacaatctcaagctcaatttgaaacgagaaccggaaacattttcgcgtgaaaccagcaggagcaccaatagctattctcatttcagcaaggtgttgattccttgtggcgagacgattgcaatcgctgtacccaaagttgggcgatatcacattgggcaccgtccttgcgatctgatcataatcaacaaccattccacattagtgacgaccgttgcgcagaagtggttggcctcactgctgtgtcgacagcgacggagatacacgggagacgcgtactactggactaagaggtacaacacgccaggtgactgacagctgcgggcaacaacaaaagataaccgattggggcaaaggtagggaggcaggaattggcgccatcagaatacagtggttttggtgtgatataagtgcaacactagtgtttatccagatgcattccgtagacacacaaaaaatgaaataaaatataagtgtcacaggggcgaagtgtccacct

SEQ ID NO: 11228 - DNA, 1475 bp, Oryza sativa
  ref <308>: DATABASE ACCESSION NUMBER: AK108576
  ref <309>: DATABASE ENTRY DATE: 2002-08-28
aaaaccagcctccgtctccgtgtcacccctggctggccacatcccccaaactccggtgactccggcgatggagggcggccgcggggggaagcgatggcgcttcgcgaccccgaatctggccgtggccgcggccggggaacgcagcatccggcggtacctccttcagctgcacgcgtgcctggacgagaacgggccacggcccgtcatcccgctcagccacggcgacccttcctcctccgcctgcttccgcaccgcgcccgaggcagaggaagccgtcgccgccgccgtccgctccggcgactacaacggctactcctcccccgccaccagcctccctgctcgccgagctattgcagagtacctatcctgtgatcttccttacaagctttgcacagatgatattttcctcacatctggaggtacccaagcaatcgagattgttatgtctgtttttggccaaccaggtgccaatatattgcttccaaagcccgggtacccaaaacatgaagcacatgcggtgttccacaggatggaagtgcggctctatgatcttgttccagagagaggatgggagattaatgttgaagctgttgaagctttagcagatgagaatactgttgcaatagtgattactaaccccaataacccttgtggtaatgtgtacacttatgagcatctgtccaagattgcagatacagcaagcaagttcggtctgttagtcattgctgatgaagtatatggtcaccttgtttatggaagcactccttttgtgccaatgggtgtgtttggagagactgttccagtactcacattgggagctatatcaaagagatgggttgtccctggctggagatttggatggatagcaatttgtgatcctaaaggcattctgaaagaaacaaaggtcgtcgattcactcagaagctttcgaaacctaacaacaggtcctgcaacatttattcaggttattttatggactcataagtctcatatcaaattatcagtaccttggtagctagcttgcttacttttggcagattagcaaaatgcccttatgctttgataggggtaaaagaaaatatataacaatatgtcatggataaaatatatttttctgtattaccttaaaggtggagtcgttctcctcccaccgcgtacaccgcgctcgcatgcgtagggtgcgtaggtaaccactggatccaatgtcttatatagcacatccctacttatatgggggccgctgatctgcgcctgatcgcccagcccaccccatctagattctatacgtatacgtatatatacatatgtatataaagtgtatatatatatgtgtatatacgataaaatatgtgtaaactttgtatatatatctatagcaattttttgtatgtatacacatacatttttgacgtataaaaatatatatacacatatacaaaagtacaaactttgtatacgtacgtagaagaagaacg

SEQ ID NO: 11229 - DNA, 1531 bp, Oryza sativa
  ref <308>: DATABASE ACCESSION NUMBER: AK108577
  ref <309>: DATABASE ENTRY DATE: 2002-08-28
aaaccgccacacacacgcgcgcggaaaacactcccaatcccaaaccgaagcgagaaagagctcgagagggagagatcgatcggcggtgccggccgccggcgatggacgagtgggaggagctggcgcggacagtgccggcgacgctcatgcaagtcggctccgggatggaagccgtcaggaagatccaggtcgcccacaggaagatccaagggcgcgctggtttgatgcgcaacatacgcttcgggatgccggcggccatcgccatgagcctcttcgacgacccggcccccgtcggagtttgccccaccgtgaccctcgaggaggcccgctgcgagatctcgcggggcgccgctcgccacgcgatggccgaccacgtcttcgttcgctacgtcgagctcctcggcatccagcacgagccgccgtgcaccagcagggacacccaccaccgggaggccatccgcttcaccgccatggccctggagaaggtcagggaagccgcgtcgcttgcagaggcggccaaggacgccgtcgacatcgccgagacgctcctcccgcagcccgagctgaagatggagtgggcgttggcggcccaggacctcgcggaacgcgccgactacgaagccacccaggcgctggagtttgtgaaacgggcgcgcgacgtcgtcgctctcgagttcttcgacacctggaagattctgcgtcgcgggagagctcgatcggcggagatgaaggagtggagagagctagcgctgaaagtgccgggaaccatcatgctcatcggcgacgccgagctggaaaccctcgagttgatccaagccgccgtcagcaagttccagaagcatgtcgagttgctgcaagaggtacgccatgggacggcgacggccaccgccgtcgacaacttcaccgacccggaccccgagggagccttgcccaccgagctcctcgagaacgcacgccgcgggatgtccaagagcgccgttcgccatgcgaaggcccaccacatcttcgctcgctacgccgcgttcctcggcatccaaggcgacgaggagtaccgcagctgggacaacaagcaccaggaagccgccggcagcatggtcgcggcgctgaagaaagtcatcgacgccgtctcggatgctgaggcagccaaggacgccgtcgccatggtcgggatcctcccctaccagtgcccgctgtgggaattgtgggcgttgagggcgcagaaccagacctccttgtcctccttcaacgccaccctcgcgatactagacgtgcgacaggcgcgcgaggccttttttgtggaggtcttacgcgcctggttgattctgcgtcgctatggatctcttcaactcctggatgattctgcatcgctctggagttcctcgacgcctgcatgatacgttgacaccgcgtcgcgaagcacgcaggttacccgatcgagctagcttggtaatcgatcgattggtggactcgaaattcttgatcagtttgaaaacaaccacttggatgtttctgtttcttctggagttctact

SEQ ID NO: 11230 - DNA, 1136 bp, Oryza sativa
  ref <308>: DATABASE ACCESSION NUMBER: AK108578
  ref <309>: DATABASE ENTRY DATE: 2002-08-28
caggatatacaggaagtaccaggactaggtggaggtggaactaaaaccaagggagtgcatcccgtccctgacctgtaaccattatcaatcatgctcgatgggcaagagcactgaaatcctcctggagtgttgttgcagtactgtgtgaaggtgcaagggttctttccatgcatggtcttcctcttccagctccggaaacaagtaggagtatctatatatctgaaggtgcaatgcaaatgtctgaaaagaaggcgcttaccttggcacccgacatccaggtaaggattccctcaaagccctgacggcaattgcagagacagccctctccccgagcgagtcgaagcattcgccttgcatttatccggtggagcaagcttgctgctgcctcttgttgcttcctcgctgccgttgttaccgattgcctagtctaagctcaggtcgtgagctgcaggagtggctagcgatggcgtctgagctgccctggcacgcggtggcgcaggtggttatgcttgctgcagccgacggccatcagcgtgttcctcccggagaaggcgaacggcgtcccggcaaggtccatgagtccggttccgttggcctctgtgcggttgccgaaggggaggggagcattcaggcagctaacgttcgggtttagcggcagaggcagggtgtcgaccgccgccgacgctgctgcaggcgtcgacacgttgctctatcgatgatcgacggaggcaagcttggacgacgaacaagaaaggccgtgcgtgcatggccggacaatggttgggtccgtctcgtgtagtgtaactagtgaagcgtgcaacaccgtgcgtgtgagttgtgatgcgcccgttcactgacgtccaaattaggggccttgacgagatgactggggaatgtggaagtctttggcctgcgaggttgtcctggtctccaaggtctccacgaggcgccaacaggggctggttttaccatgtgcggatattgaagcatgttgcatgttttgttcaaatttgcttttctgtaagttattctagcctggctttgaactcatcgagacttatttactctgagatccagttgagttacatcgtcgaagagcttataagttataagcaatgctcatacgtttaatagcc

SEQ ID NO: 11231 - DNA, 1397 bp, Oryza sativa
  ref <308>: DATABASE ACCESSION NUMBER: AK108579
  ref <309>: DATABASE ENTRY DATE: 2002-08-28
acacgtcgcccccatcgctgcatgggcaaagcgatctcccttctccggccaccgcgagagccacagccacgagagagcgagggcgagggcgagagggggaggatgatggagctgaggaagcgcccgaggccgcggcgcgtcgaccccgacttcgtctcgtcaccgccggcttcgctgctgctgccgccgccgaggaagcgggcgaggaggcaggccgcgccgccggcggctccggctccggctcctgctcctgcgcgcccatcaccagcggcgaggaggcggccgacgtgcgcgcgggtgatcatccagagccccgtcgctgggcttcagccatccgtgtgctgcccgtgcgaggcgccgctccgggcgtgcaggcttccgcgcgcctccttcctcgctcgccgtcgccctcccttcgactggtacgaggcggacatgtggacggaggtggccaagtacctgttcggcgcggagctggtgcgcctctcctccacctgccgctggttccgccgcctcctcgccgacgagttcatctggcgccacgccttcctccgcgacctctccctcctccccgccgccgccgaccggtaccctccccgcccgctccaccgctcctggcgcctcctctacgccgccgccttcaacggcgcccactcgtactggttccgccggagcagcaggcacattggggcgtaccggattggtgggttcctgctcgagtcgccttacatgctcctgacggcgaagctggcggtgccgcagtggctgccgccgcaggaggacggcccgcagatcgccatcgagatgaccggcgcgtgcgtgctccccaacgcgcgccctggcatctggatcaccgacttccatcttgtgaggtgtcccaattgcaccctcaacaagtgcgcaggggtcctgcaggttctggacgcgcgacactgcgagctgttcctggagcagggattctggaatggcacctgggagtacgaggacctgggcgaccactacaacgacgaggagacccccaccgcagcctgcgccatcttcaacgccagcacccgcgctcatgagtccatttcatgtgttctccactcgaagtcttgggtcaggagatgcgacgacccacagcccaaggcacattgccgcccatacgctgttgccctcaattccaacctcctgtccaactccaaccaggggttggtgtcaaggttccaggcgatgcgagacacgaccgggaacgggcagatagtgtctatccggatcatacagcagatttactgattcaagtgcctggttcgtttctggtgctgggttcctgctctgttgtttaatgtgttaatgccttgtttgcgatgatataagttctgtcagggataaatcatgagagggagtacagttatact

SEQ ID NO: 11232 - DNA, 1596 bp, Oryza sativa
  ref <308>: DATABASE ACCESSION NUMBER: AK108580
  ref <309>: DATABASE ENTRY DATE: 2002-08-28
accaatctggatgagtggcgcacaaagacggtaggcaatcctgacctccacgcaggccacatccatcccgggcacccccaccgcgccgccgccgccgcgccgggcctactccatctcctgctcgtcgccgcctctccgccgcgaccccgccgtcccgaagaacatctcccagacgctctacctcgcgctatcctcccgcccagcctgcgcccgcgtccccgagccccagccactcccccctaccaccaccaactcctcctgcccggcctacttccgcttcatccacgaggacctccacccatggcgagccgcgggcgggatcacccgcaggatgctcgagcgcgccagggacacggccaacttccgcctcgtcgtgctccggggccgcgcctacgtcgagcgcatcgcgccggccttccagacccgcgacctcttcaccatctggggcatcctccagctgctccgccggtaccccggccgcgtccccgacctcgacctcatgttcgactgcgtcgactggcccgtcgtccaagccgatcggtaccagggggagaacgccaccgccatgccgccgctcttccggtactgtggcgacgacgagacgctcgacgtcgtcttcccggactggtccttctggggttggccagagatcaacataaagccgtgggatgcactgcagaaggatttggatattggcaataagagggtgaaatgggtggatagagagccttatgcttactggaaagggaatccagatgttgcaactaaaagaaaagagctggttaagtgtaatgtctccagtaagcatgagtggaatgcacgaatttacaaacaggattggatcaaagagagtaaggcaggatacaaacagtcagatttggctagtcaatgcacacacaggtacaagatctacattgaaggatcagcatggtcagtcagtgagaagtacattctagcgtgtaattcaatgacactggttgttacaccaaaatactatgatttcttttcaagggtgctgatgcccactcagcattattggccagttcgagatgacaataagtgcagctccataaagcacgctgttgactggggcaattcaaacaagaaaaaggcacaaaaaataggaaagcaagcaagcaacttcattcaacaagagcttagtatggactatatatacgattacatgtttcacctgttaactgagtatgctaagctcctacggttcaagcctaccaaaccacctgaagctattgagatctgtccagagttattggcatgccaagctataggccgtgaaaggaagtttatggaggactctatggttaagtctgccaacgatgcaggcccatgtgatctgccacctccattcagccctgaggaattcaaagaattacaacagaggaaagagaagtcaatgaagcaggtggaaacatggcagcaaaaggcttcgcaaacctgaggatagcaagcattgagagttcactgtttttcctttcctaacgacatgcatataaagttttggtcaattatttagggtcaatggtctatacacatattctgtagtggtaataatcaagagtttttcttattcgattg

SEQ ID NO: 11233 - DNA, 1946 bp, Oryza sativa
  ref <308>: DATABASE ACCESSION NUMBER: AK108581
  ref <309>: DATABASE ENTRY DATE: 2002-08-28
agtagaaaattcatagagaaaaataatgaacttctgaagaaactgccacccaaacaaaacaaagcagaagtctcaactctcaagccggcaacgagccaacgaccatctcattgcggttgcaccttcctcctcctccaatgatccccctctccctcctcgccgtcgtcctcgtcttcggcatcgccggcgccgccgatggcctttcagggtaccagataagttgcggtgcgacgtcggagaaggtggtcggcgacgtgacatgggttcccgacggccggttcgtcagcgtcggcaacgtctccgacgtgcggtcgccgggggtgctgccggtgctctcctcgctccggtacttccccgacacgtcggcgaggaagtactgctacgtggtgcccgcggagaggaagaggaagtacctcgtccgtacgacgtacttctacggcgggttcgacggcggcagcgcgccgccggtgttcgaccagatcatcgagggcacgcggtggagcgaggtggacacggcgggggactacgccaggggcctcgccacgtactatgaggccgtcgtgctcgccaccgagaaggaggtcagcgtgtgcctcgccaggaacgccgccaccaagtccagccccttcatctccgcgcttgaggtgtcgccattggaggactcggtgtacaactccaccgacttcgagtcctacgctctcagcaccattgcgcgccacagcttcggccacgacggctcagcggccgtcagctatccaggcgatcgtttcaaccggttctgggaggcgcacagcgacgggatgccggtggtggagagccaggcgagcgtgtcgcaggcggcgttctggaacaagccaccggaggacgtgttccgccgaggcgtcacgacggccggcggccgcggcgagagcctggagctccagtggccgccggcgccgctccccgccgcgagctactacctggcgctctacttccaggacaaccgcgcgccgggcccgctcagctggagagtgttcgacgtcgccgtcaacggcgagacgttcttcgccggcctgaacgtgtcgacggccgggtcgatgctctacggcgacaagtggccgctctccgggcggacaaagatcacgctgacgcctgcgccaggctcgccggtcgggccggtgatcaacgccgccgagctgatgatggttgtgccactcggagggaggacacatcccagagatgtgatcggcatgcaggcgctagccagaggtttcgacaacccaccggctgactgggccggcgatccatgtttgcctcaggggaactcatggactggtgtcacctgcacccaagaaccacttgctcgagtggtttctctgaatctcacgaattttaaagttgggggatcaatatctgacggcattgccaacctgacagcgatctcaagcatttggcttgtgggaaacaatctgaccggaccaattccagatatgagcctcctacatcatttggtttctctgcatctggagaacaaccgactgacagggcagattcctccatctctagggagcatgccaaggcttcgtgaattgtttgtgcagaacaatgcactgcaaggggcgattccgatcagcttcaagaacaaaacgggcttcatgttccaatatgcacctgggaataaccttagctaacacaaattcaacgagtataagcttgttcaggttgagatcatccggtgttcatgagatgaagaaaagagacattaaccgttgacgacacgctggaacacattaattaaacaccattttttcccttttattttgtttctttttgccgttcgattctatccgtatttttgttcctcctttcctttctttttggcaaacatgaggtgatcctgaatgtatttaaccctgcaactgtgtggtacctgattcaatttatttgtatgtatatttttaattact

SEQ ID NO: 11234 - DNA, 1394 bp, Oryza sativa
  ref <308>: DATABASE ACCESSION NUMBER: AK108582
  ref <309>: DATABASE ENTRY DATE: 2002-08-28
aacgaacgaactagcaccaaccccacagcaccagccaccaccatgtcgtccgaaaccgccgcttcgccgccgccgccgccgccgaatccaccggccgccgactccacccattccagccccgcctccatgaccgacgagacgcacggcgcaggagcccatcccgacgagtcccaaccgcatcgctcctcatcgtcgtcctcctcccctcccgtggccgtcgacggcgagacgcgcgtcccactcccagtccggtccctgccccaacctagccacccatcgccgcctccttcgggggaggacgaggatgacgtcgtcatcaccggccaaatcgcagtgggtgacgccgcgggggcggcgatggaggagcgggtgaaggggccctggtcctcggatgaggacacgctgctgagcaatctggtggagaaactcgggccgaggaactggacgctgatagcgcgcgggatacccgggcgctccggcaagtcctgccgcctccgctggtgtaaccaactcgacccccaagtcaagcgcaagcccttcactgaggaggaagaccgcattataatggctgctcatgcaatccatggaaacaagtgggcggctattgcaaagcttttggttgggagaaccgataatgcaatcaagaatcattggaactctaccctgaggcgtcggcactgcactggtggccgatgcacacaaggtggtgttatgaagagagctattccggagaggcctaggtcggtttcagaagaaccttggccattgggcaatcttagttccttaaatgttagggaagcaatggaagctcccgcacaaacagtatctgaaagttatgttggggcatggcaaatcggggatcagagttgcaaaactgaagttgttgatccaccttatcttgcccgaccagttgcaaaggttggtgcattcaaaccatacaatgtaggacctgctcaatcatcacaaaaggaaatgctgagctttgccaccaagtttgactcaaaccttcatcctttcaagcctgaaaatggggtctgcaagtttgttgatcctacaagttttgctgctgaggtgccaaataaatgtgggcatggctgctgcagttctcatgggcaacttcgtaagaactcattgctgggtcccgagtttaatgagtttgaagatcatccaccaatttcagatagtagttttgcttcgttggtgtcagaaattagcagcattgcctggatgaaaagtggtttgcaaagcagtgacaccttagcgcggtctgttccaccagcttaacagattaggataatgtaaattagtgagatgaaacttttggagtcaatttttatatattaaggtgtaatcaagtcaaatcatggttattgttgtatttttggtagatggac

SEQ ID NO: 11235 - DNA, 1280 bp, Oryza sativa
  ref <308>: DATABASE ACCESSION NUMBER: AK108583
  ref <309>: DATABASE ENTRY DATE: 2002-08-28
attttcgtccacgccgagacgagacgagacagtcgggcgacgggacagcagctgcagcctgcactgcagcacagccgtcagccgcctccccaacctcccgccgccgccgccgccgccgcatccgcatggagcccgacgccgcagcggccgcggccgccggcgagagggaggcggagatcgagaaggccttccgcgcccgcctccccgacttcaggaagcaggccgactccttaaccctcgaaggtgtaaggagagcactggagaaggacatgggcttggagaaacattcacttgacgcccataaaaagttcataaagcaatgtgtagacaaggttttttctggttctgatgatgacaatacgaataataatgcaccagagaaggatgaagctaaagatgaccgttcttctaaagaagaatcagaagatgcccaaccaacatctgactcgaacaaaatttcctccaatgctgatgagccggtggcaaaatccagtgagacagatagagatcaggagggagacaaagatcatagttctggcagtgacattagtgaagctacgataaaaaatgctattgtcaaaagggcctcatattttagagagaactcagaaactattactttacaaggagttcgccggactttagaagaagatctcaagcttcagaagaaagctttggatgcttacaagtcttttatttcgacggaattagacaatattcttcaagaacctgcaaatgggacaaagaaaactagtaaaactgaatctcataaggattctggccagaagacaagcaaaaactctaagagagctcgtcaagactctgatacttctgaaataaatgatagccattgtgagaggggagacagtgatgaggatgcaaggccaaaaaagaaaaaggctgaaaagggcaaagctgtaaaaaggcagaaaaaaactacagtggagaaacaactgtcaaattcaaaggctaaaaaggttgccaaaaaagatttagataaaagtaaagagcggagtggatcagaagaagataattcaaattcatcagctgaagaagataataagaaaaaacgacaagtagctccagcttacgggaaacgggtggaacggctgaagtcaataatcaaatcttgtggaatgagtatcgcacctactgtgtatcggaaggcaaagatggctcctgagagcaagcgtgaagcctgtttgataaaggagttggaggatatacttgaaaaagaaggattgtcaacaaacccctctgaaaaagaaattaaagcagtc

SEQ ID NO: 11236 - DNA, 1162 bp, Oryza sativa
  ref <308>: DATABASE ACCESSION NUMBER: AK108584
  ref <309>: DATABASE ENTRY DATE: 2002-08-28
atttccagcttcacacattcaccagcctcactctcacaactcatactcctccttctgaacctatcttgtttgtcctctggaagttgagtagaggaagagaggaacagacaacagaaacaagcaagcatcttggtggttgttttggatacatatacaagcagggtgcaagtgcaagaattggtgatctgaatcctgaatcaaagttgagggaatcactaggatcaatcaatcaattccaagaggcttagctgaagcagatgatgaggatggacaagcttgtgaggcaatgtgacatggaggtgatgaagatggccatgctcaagcatgaggagaccttcaggcagcaggttcatgagctgcatcgcctgtaccgaattcagaggcagctgatgagcgacctgaccatggccgagctgagctccggccaccgccgccggcagcctcgccggagcagcaagcaacctcgccgcgcgctgaacctgcagctccccgccgacgagtacatcgtcagcgccgacgccgccgacgacaacgacgacacggccgagctggacctcactctcgccgtcggcggcggccgcagctcccgcaagtgcaacgccgccattgccgccgccgccgccgcaggtggctcctcccccttcgcctccgactgctccggcagcggcctctcgtcgtcgccgtcgtcggccgagtactccgacggcgccgccatgttcctccacgcgccgccgcccatgccgccgccgtgccagcgtgcaatggcgttcgacctcgccatgggcgacgccatgaagcagcagcagtcgccatggctggttcagtgccagtatctcagcctcaggatgacatgaacagcaagagcaagctcaagctcaagctcaagctgtccatgatcacactgtgctactactactctagcttaattatcttgtgtttgtagaagaagaagagaagaagaacaagaagaagctagccactagcttaatcatttcctctcccactgttaattaatcaattatttgttctagctaggtgatcagtgcagtttgggcaggggggattaagtcctaatcctgaattcctgatcccaaagtgtccattgatcatcatttgatcgatcttggctaattaatgagtgcatgctgattgatttgtgtct

SEQ ID NO: 11237 - DNA, 1247 bp, Oryza sativa
  ref <308>: DATABASE ACCESSION NUMBER: AK108585
  ref <309>: DATABASE ENTRY DATE: 2002-08-28
atcatctcgctctgggtctccccgcgaacctctttcccctgctccgtttttcttttttcttctgcttcagctacatttttcttcaagatggtgtcgatctacgacgccgtggtggcggcgatcccgcaaaacatcaagaacgacacgcccgtgcatctgctcgcgtggatcccgggcaagtcgcccatctcgaccgtgcccgcgctggtggctgccgtgatcacctacctcgccgtcatctttggtggccgtgagctgatgaagaaccgcgcgccgttgacgacgagcatcaagctgcccttcctgctgcacaacctcgcgctcacatttggctcgggtcttctgctcgcgctcatgctcgaggaaatcgtgcccatcgtgcgtcgcaacggcctcttttacggaatctgcggcgagggcgcgtggacgatgaagctcgagacgtactacatgatcaactactactttaaatactgggagctcatcgacaccgtctttctcgtgctcaagaagaagccgctcgccttcctgcacgtctaccaccactcggccaccgccgtgctgtgcttctcgcagctgcacggaaagacgtccgtgtcgtgggtggtcatctgcctcaacctcgcagtgcacgtgctcatgtacttctactacgcgctcacctcgctcaagatccgctgcccctggaagaagtcggtcaccacggcgcagatcacccagttcgtgatcgatctgttcgtggtctactttgcctcgtacaactacttcgcctacacctacttccccaacgtcccgcacgtcggcacgtgcgccggcaaggaacacgccgccttctccggcatcatctgcctcacctcgtacctcttcctctttattgccttttaccaaaagacgtacgcaaaggacaaggcgcgcaagctcgcagccaagcagaatggcaaggccaacggcaaggctgccaatggcaaggtcaacggcaaggcgcaatgatccgcgaccgcctctcttgtccttctctaccaatctcaccgcgcgcttctccgcgtcgaggcactcgcctccgttgaccgtccactctggacgcctctcagcgtcgggccattcgcgcctttctccgcctctggcggcccccatattctacattccgctgcttctctctgggcgtctttgacgtcgggctctggcccctgtcatttttctgatggactctgcattctaccttaatcgcaacggctctctcctatccc

SEQ ID NO: 11238 - DNA, 1500 bp, Oryza sativa
  ref <308>: DATABASE ACCESSION NUMBER: AK108586
  ref <309>: DATABASE ENTRY DATE: 2002-08-28
ccgccacccgcaatccgccggccttgcccgtcacccacgacagccgtcgacggcccctccgcgcctccactgcctccgtccaagcggccaccgccgcgcgggcggacggggatcgcggcggactacggggacgccgcggccttctcctccctctctccccccgcgggaccttcccgtccccgccgatccgccgccccgtacgccgatcgccatctccgccgtccagtccgcggccccctacgccgatcgcgacgcacagcccccctctaacaaggggtttgtccgttgccatgaccgactcgaaatacgctgtggcactccgattggcatctgatttggactcgtcccaacccttcccaatttccccctcctcgcctatataagggagccactacggtggcagatcccacgaagaagagaggaatagaggcttgacaacaccacgcccacgaagaagagaggaatagaggtttgacaacaccacgccgactatgggaggccgtgtccctctgccttgcatcgccctgaagcatggcgccgactcagacaagccggcgtgaccaacagcaacgcctggccgacgccgcggggatggatcctgatccgcgacgacaccaccacgtttctgcagaacccacaggattccgacggaaagattcagctgccgcacctgccggaagtcgtgcacaacagatgcgcatgcgtgctctccggcaaaccgacgatcccaggctgcatcgtgcttctcgtcgagcccgaagacaccatcatctggtactgtcacgtcggaggagaagatgaggagtgggctagacatgagtatgatattggaacacagcccttgcttccactcgtggatggcaagggccacgagaaggcgccgataacctcgatcgctgcttgccaaggcaagttctacttcaatggcagattcaacagcatccgcgtgctggagttcaccccagagccgacgttcagcttcatcgcaatcacggaacccttggatttctggggcgcagctagcgtattcttggtggagtcagagggcgaactatacatggtaagccagctgttttactacaacctcgagtacatctgcgatgtcactgttcataagatggatttctccaagcatcaatggtgcacagccgaggacatcggtggtcgtacgttcttgatagctccatgttatttcggtgcttcacgttcggccaatgagtgtgggctggagaaggattgtgtctacgctatttttgtgcgttataaatattttgaggtatccaaggtagaggatggagaaaccgaagagtatgatctcatcgaagctccaaattcagatatagggatgtggattttgcccaccgtctagtttcacaattgggaattttatcatcttttttgcatggaaagaaacatgttttttttatccagtgtaaccgtagttaattatttgtatttccaactttagtaagctatatatatgaaacagtattattggtc

SEQ ID NO: 11239 - DNA, 1475 bp, Oryza sativa
  ref <308>: DATABASE ACCESSION NUMBER: AK108587
  ref <309>: DATABASE ENTRY DATE: 2002-08-28
atgcatactgagatcgatcgatccatcaggttgctactaccaagaacaaaaaccctagctagctagttaaacatcatcgatcaccattagactaatttagagctcttgctcgatcttacgatacgcaacgtagtgatcacactgctgtgctgcatcgtatagtagctagctagctaaacacagagcttaattagctgattaattaaggtagatgatggcagctcaggcaagcagcaagcgcggcatgctgctgccacgggaggcggtgctctacgacgacgagccctccatgccgctggagatcttgggctaccacggcaatggcgtcggcggcggtggctgcgttgacgccgattactactacagctggtcggggtccagctccagctccagctcgtcggtgctcagctttgaccaggcggcggtcggcggcagcggcggcggctgcgcccggcagctggctttccatcccggcggcgacgacgacgactgcgccatgtggatggacgccgccgccggcgccatggtcgagaacacgtctgtcgtcgccggcggcggcaacaactactgtcatcgcctgcagttccacggcggcgccgccggtttcggactcgcgagcccaggctcgtcggtcgttgacaacggcctcgaaatccacgagagcaacgtcagcaagccgccaccgccggcagccaagaagcgcgcatgcccgagcggcgaggcgagagcagcggggaagaagcagtgcaggaaagggagcaagccaaacaaggctgcttctgcttcttctccttctccttctccttctccttctccttctcctaacaaggaacaacctcaaagcgccgctgcaaaggtaagaagagagcggatcagtgagaggctcaaagttcttcaggatctcgtgcctaatggcacaaaggtagacttggtcaccatgctagaaaaggcgatcaactacgtcaaattcctccagctgcaagtgaaggttttggctactgatgagttctggccggcacaaggagggaaagcaccagagctctctcaagtcaaggacgccttggacgccatcctatcttctcagcatccaaacaaatgatgttgtgctgctgacacaaaatgcatcaaatttcacaaagctaatattaagtttgatgcatgtaagatctttagaacagaggcaatgtaacagggcttctgctctgaaaagatgagagaattgttctattggactttcagagttggaaatcagtcgtgcatcttagatgttttttttcactcttttttcctagatcaattctttcttgttttgttgccaaagcctgagtaatgtacttcagtcatcagagttctttcactttatagcaaggatgtagtgtaggtatcagttagaaaacaagaatctgagcactgcaaattcgcttgctactgtaaattacactgcaaattccaataaatgaatcctaaatagatgc

SEQ ID NO: 11240 - DNA, 1437 bp, Oryza sativa
  ref <308>: DATABASE ACCESSION NUMBER: AK108588
  ref <309>: DATABASE ENTRY DATE: 2002-08-28
ccgctcgactccaactccggcgctgctccattctcggcggcgcgagctgcgaggcgtgggcggaatggaggggcatcgccgcggcgaagcggacgacgaggaggaggagctggggctgcgtctcggcctcgctagcgccggcgcttccgccgcggcggcggcggcaggcgagccgccgtcggtggggatggagttcccgacgtcggaggcggccagggagttctactgcgcctacgccgaccgcgccgggttcgccgtgcgcaccgacaagtcccgccgctcccgccgcgacgactccgtcatcatgcgccgcttcgtctgcacccgcgaggggttccaccccaccaggcacgacgacctcacggagtcggaggccgccgccgggaagaggcggcggaagcgcctcatcatccgggaggggtgcatggccatgtgcgaggtcaccaagaaggagccccccttgcgctgggtcgtcaccaagttcgtcgcccaccacgtccaccccgtctcgctcccgctctgcccccgccctcctcccgccggtgagtccgatggtctcgccggagagcacgccgcagcattggatgaacctacccaagccgccaccgaaccctcggacgaacccaccggagctcctgctgcagtgggcaatggggcgcccaatggagggccatccttctgcaataggctcgtcagagcgaatccagctggggtgcgtgccgaggtgcaagatttgctcgattacctcaggaagatgcaggccgagagcccgggattcttctacgcgatgcaggtagatagcggcaattgcgtgaccaatgtgttctgggctgatgcaaaggcaaggatggcatacaagagctttggagatgcagtgacatttgataccacatacaggaagaccaagtacatgatgccgttcgcggtgttccggggaatcaaccatcatttgcaggggatcatattcgggtgctgtctgctgatggatgagacaaagagttcatacacctggttgtttgatacatggcttgctgcaatgggtggccgccaacctgatctgctggtgacagaccagtgtaaggcgatggaagcaggaattgcgagggtgttgcccaacacccgccatcgtttctgccagcggaacattttgagcctatgtaagcagaagttgtctgctgtgtatatacagcacatcaacctgaaagctgatctgagggaatgtgtctttgaggctgagacaattgaggagtttcaggctcggtgggactatgtcatccataagtataatctcgaggagaacacttggcttcagtcgttgtatgacactcggcagcaatgggcttgggtgtatcagaagggacccagatgaaaaaagtacggccaaaagatttttctatgttatgttattggtaaagaagtataagtaaaaaaaaaaat

SEQ ID NO: 11241 - DNA, 1523 bp, Oryza sativa
  ref <308>: DATABASE ACCESSION NUMBER: AK108589
  ref <309>: DATABASE ENTRY DATE: 2002-08-28
atccgtttccagtagggctcccggccgcctccggcagatccgtcgccatggaggaagaaaccgccgttgcagactggtcggcgctgccggaggacatcatcatcaccgtaatggggtgtttgtccgtcctcggcgacctcgtccgctccggcgccgtctgctccacctggcgcgacgcgtacgccacgttccggcgactccacctgccgtccacgacggcgcagccgccgtggttgctctacgcctgtgacgcccacggccccgccgccgccgcgctctactgccctgccaccggcaagtccctccgtgtcccgctcccggccgccctgctcgatggccggcccgtgatcggcgcgtcgcaggggtggctggtcaccgtcgacgaggcgcccaacctccatctcgttctcgtcaaccccatcaccggcgccacggcggcgctcccgcccatcaccaccctccacaacgtcgagaggttcacgagcaaaaagggcaagacaagatacagggtgtacgacgacatgggatacagcgaggcgtcccttgagtactcgccggcgcaggcgagggaatgggtgtaccaccaggtggtcctctcgcgcagccccgccgaggggagcgcctgcgtcgcgctcctcctgcaccggccggacggctatgtctcgttcgcgcggctcggcgacgagcggtggacgccagtcgcgtacccgggacaggactgctccaccggctgtcgccacgccatctacgatgacgccgatggcctcttctacacgttgcggtacgacggctccgtctacgcgatcgacgtccctcgcgccgcggccgcgtcgtcgccgccggcgacgagagaggtcatgcggagtgtgacgaacgcggacaacggcagcaagtacctcgtcagggtgccatgttccggcgatctcctgcaggtctggaggttcgtcgactacgacgacggcgacgaagtcgaagaggatgaagacgctgaagatttaccactcggcaccaagcacctgcagatcttcaaggtcgacggcggcgagcagaagctcgtggaggcgtcggcggcgagcttggaggatcatgtcctcttcctcggtcacgggttctcggcgtgcttcccggccgagcacttcccggcgttgaagcccggctgcgcctacctcgccgatgaccacgaactcgtcagcgtgagtaagcattgccggcgagacattggcagatgggacatgaagagaggtcagatggaaaggctctccggcgaagatgacgtggcggcgccgtctcagccttggctcaactggccatctcctgtctggatcacgccaacattctactagcgcatctcgtgcctttagttagcacccacacattttatttattttgtcaatacgaattattgttctcttgtgaagcatcaagtagtttctcgtggaatgatggccaattcggtcttttgagttttctagtatctgtgcacatgcaacatacgttctaaatgtcatgtttaaatgtcagcc

SEQ ID NO: 11242 - DNA, 1602 bp, Oryza sativa
  ref <308>: DATABASE ACCESSION NUMBER: AK108590
  ref <309>: DATABASE ENTRY DATE: 2002-08-28
actccccaattaggaagactctacgcactgactcgttgctccaagtcaagctggtatcaccgtgcgcaccgacgccggccggccgcggcggcgatggctggctttccgctgatcacatcagcgatcacttgcgcagtgggcatcatcttcttctccgtttgctacctgcatccggcaccggtcgccgccttgtacttcaactactccaccttcagccaggacgacgggaacaccatcagactcgaaggcgacgcctccttcggcgacgggtggatcgacatcagcgccaacaggtacggccacaggggacacagcaaaggccgggcatcgtacagcgcccggccgatgctcctctggagcagggacaccggcgaggttgccagcttcaccacgcgcttctccttcaacatcaccccgcccaaagaggacggcggcatcgacaacaagggcaccggcatggccttcttcctcgccgcctacccgtccatgctcccgagcggggtcgatgagctcggctacaacatcggtctcaccgaccaaggcccggacgccgtggcgactggcgacagccggttcgtcgcggtggagttcgacaccttcaacaacaccatggtgcacgaccccgacgccacctacgaccacctcggcatcgatgtcaactcagtcgtgtccaacaagaccttgaccttgcccagcttcaccctcgtcgggaacatgaccgccgtcgtcgagtacgacaacgtctccagcatcctggccatgaggctgcacctcggctatgggcttagtggcccccgtcaccggccggattacaaccttagctacaaggttgacctcaagagcgtgctgccggagctggtctccgttggcttctccgcctccacgaccacatcctttgagctgcatcagctgcattcatggtatttcagctcatcgttggaaccaaaggccgcggtgcgtggcagagttgtagcgggagccaccgttggcacggtaatgttcgtcatactcctcttcgccatggtagcagtccttgtacgacaacgtcagagcaagaagagggagacagaggaggcaaagaacggaggcatggatggcagcgacgacgacgatgacgacgacggcgagaccatcgtagagatcgagatggggacggggccaaggcgatttccatactacgaacttgtcgaggcgaccaagagtttcgcggcggaggagaagcttgggcaaggcggtttcggcacagtgtatcggggctacctcagagagcagggcctcgccgtcgccataaagagattcaccaaagattcctccaagcaaggcaggaaggagtacaagtcagagatcaaggtcataagccgtctgcgccaccgcaatctcgtgcagctcatcggctggtgccatggccacgacgagctccttcttgtttacgagctcgtccccaaccgtagcctcgacatccatctccacggcaatggcaccttcctcacatggccaatgaggttattaactcttgctaattttgtcttaatctttgtagtgtcaacttaattggcgaacatattgtcaaattttactcaggtttacgaacttgctaagtgc

SEQ ID NO: 11243 - DNA, 2033 bp, Oryza sativa
  ref <308>: DATABASE ACCESSION NUMBER: AK108591
  ref <309>: DATABASE ENTRY DATE: 2002-08-28
acgccactcgccgccgcccatgccgccgccgctgccgcattccccgcccccaccggctgccgcggatgcgctcggccagatcttgcaggctctgctcccggcgctgctcttggctgcggagtccgtgaaggcgctccacgcccggtggcgcgcggtccacggcacgctgctcgcgctccagacctctctcgccgcagcaccggactcggccgtctcccaccctctcttcgccgacctggtggcctcgctcctcccggcgctccgctccctgcaagcgctgtccgcgcgctgccaggacccgtcactccctggcggccgcctccgcctccagagcgacctcgacatcgctgcctcctcgctctctctgctcctccacgacctctcgctgctccttcgctcggggatcctctacgtcgatccgtcggcttcgtcccccaacgccattgtgctgcaggtgcccgcgccagccgcgtcccgggcggacaagtctctcttcatccgggacgccttcgcgaggctccagatcggggggctcgatctcaagctcaaggcgctcgcctcgctactggacttgcttgccaacgacatcgccgcggagtccgcgcacatcgttgccaccgacggggatgtcgccgcgctgctccgcctgctcgacgcgtcgtcccactccgcgctacgggaccgtgcggcggctaccgtggcccacctcgccacggcctgcgtggcttcgcggaaggttgtgttcgacgagggcggccttggcccgctccttcgcgtgctcgactccggctcagcgccagccacgcgggaacgcgccgtggcggccattgaagccatcaccgcggacgtcggcagcgcgtgggctgttgcggcatacggaggggtacccatcttgattaatgcgtgccgacctggctccgggtcccctgtggtacaggctctcgctgtagcggcgctcaagaatgtggcttccatcgaggatgtgcgctcagcactggttgaagagggtggactgccaattcttgttgatctgcttgcaagcggcactattgacgcacagaagggttctgctctctgcatatggtctctagcatccttgggagaccatgagatacaataccagattgtccaagcaggtgcattgctgccactactgcaggcgctgcacactgcttctggcctagatctccatgacactgtcttacgcgctatccacgcactcgcagtggtccctgctgctgctagaactctctgctcatcgccgctcttcttcgcgcaacttacagacctcatgtgccgtggtggtagcatcttgctgcagcagatggccgctgatatggttgctgaacttgcacctggcgtgagcgacgacaccaagcggtgcatggcaccgtgcatttgcatgctggttaagatgatggagacagctaagccagctactgtacaggagtcagctggccgtgccttgcttgctttgatgaccttgaagtttaaccggaaggaattggtcagggatgagaagagtgtgactaggttattgcacatgcttgatccgaggaatgaagagattgataaaaagtatccagtctcagttgttctagctctagccttgggtggtgggaatgggacacggaggcggcttgcggattctggcatttgccagcatttacagaagttggctgaggctgaggtgcctggtgcaaagaaggctttgcagaggatttctggcaatcgactcaagagcttactctctagaggatggaacaactagtcagtctgccatgttggggtaaatatagaactttctacatctctccttttgatcatgattatattgtatggttgtgaactttactaactactaccaattttgctcccaaggccagaaattttactccctctttaagaaggatgaatttcacatacaatttttttttccatactggaactacgcatattgccatgttccaagataggacttagtgactgttttagttgtttaaatcttgcaaaaatattatagcatagaggtt

SEQ ID NO: 11244 - DNA, 2284 bp, Oryza sativa
  ref <308>: DATABASE ACCESSION NUMBER: AK108592
  ref <309>: DATABASE ENTRY DATE: 2002-08-28
caatcaaccctcctgacaccaacaatggacgaagaaaagctcaagtggtgtgagagtggatgcaaggggtgtatgcaagtgaagcaagtgccaagagggtccccttcctgctggtgggggagtatacccaccaaaactagttgttggggtcgaaatcgccaacctcagttgcctgccagtcagatcgcccaccaatgttactgtgcacttaatgcacgggcagcagctagccagtcagaccaccatcggctccagtcaaaccgccggcggcccggttagaccggcgttagctctagcggctctagatcgtcaagccaaggcacacatcccggctcaccaaccgcccggttagaccaaccaagaaatgctagttagaccagcatgaagccctcggtcagaccgtcctcaagcagaaaatgatgtatgaaatgaactcgaaccaagtgacaatgcaaatgacctaatgtggcattttgatcaactctttacctaggtcattacctctcttgatagtgcgacaaagctagaaataaacctagcaaaatttgatcacctaacacttcgatcaaattaaaataaaatgctagatttaccatctttgttccattgctttgtgccattaattttaatccgcggtgatcatccatggcatgtacatcatgtggtcctaactcaaatatatcgctcaatagaatagttagtccacaattagcgcttgtcattaattaccaaaattaacaacgggggctatgatgcttcgaagtgctatatataatatgaccgtagtacattgaatattttatttcattgcactcaaatataatcaatgttggcctattttacaaatatattattctggcatatcactacaagatctaaataatactgacattttgatccatgtgtgctttgcagacaatttttgtaaattggtacgatctaagaaattaattatacttgacctcagggtctaaagaaattaagccttaacaacattgtgaaatgcagtgagactgaatcttggagataaattaccgaagaactgaacttttattgtgagtataatttactttttgatcttttaacaaataaggatattgtttgttagtggttctagatttggttaccctggtcttttctcatgagtgcaattagggccgaacttttgtgtggccttgtcagagtgataaaaaagtacataggcacttaggcagtgcatcacttatctgaaaaattggttctgaattttccttctctatatccctcaggaatgatactaaaatctgatttgtgtactgacttatttcagtcatttgaatttgctatgatacagtccatttttaataaaatctggaatacattttgaggttaagataatccagttgtttatagactcaaaaacagtatatgtgctctagaaacatcaaaactattttatcatatcaaaacacagatgttcgtatggtataatttttaactctccaaaatttaccatatttgattataatttaaattgcatccacgtgtttaataaaaatattcgagcatccattttgctattttgcacacttgcagttaggttttgagatatataatgatatttggctgacatgctcattggacatttttccttaagctatacttctgtcttttaactgaagttgctttctgtttcgtaagatcagccctccagcaagtggaggtaatccagtaggagtcctccatttctctatatatctctttgattgctttaaaacctaacaaaaaggtttaaagaaagcaaaagaagcgaatgtgtccatttatctttcgaaacaatatacttctttcttggtgcatggaggaccagacaaccatatagagaaatggagactatcagagttgtatgttcagcaaagatgaggtggctgattaagagttgtctaattacaaccagtgcattgttgacaatattgattttttttaatccttttgtgcatctggggcaaagttatttggtaaatttgaatatgattttagaatttggtgaagatacctgatttttaactgatttcggatgctacatgcaatgcattgtgcttctgtaatatcaaaattcacgattgtatatttttattttggtgatatatatgccctcaatagacttttaaactttgacatgttgatcactccgtaataattgtgtgccattctatttcttttatattatgtttttccaccgttcatgttactaatatgtgaaaaccatagaaatggaatatagctattgtctgtgttaacaatg

SEQ ID NO: 11245 - DNA, 1646 bp, Oryza sativa
  ref <308>: DATABASE ACCESSION NUMBER: AK108593
  ref <309>: DATABASE ENTRY DATE: 2002-08-28
actcgatcggtgccgttcacgattaggaaacacgagctccatccaatctgagatatccgggctccatttctttctccgatctacgcgtcctcacgttcgcgtcgaagcctcgctggagccgccagcgacggccacctgccctgacagcggcggcgatccatccagtgattcatcgatcctccctcatttcttcagatccagaatgtcctggatacaatttcttcagattattcagtgacaagagtagtacagttcatggagaggtggagatgcgtcagtgtgttggctctggtgctcttgctgtcaaatgcttcccatgggagagatatctctgtccagcactctcagcaaactttgaactatagccatactcttgccatgactcttgtggaatatgcttctgctgtgtacatgacagatttaacagctctttatacatggacgtgctcaaggtgtaatgacttgactcaaggctttgagatgaaatctctaatcgtggatgtggagaactgcctacaggcattcgttggtgtggattataatttaaattcaataattgttgcaataagaggaactcaagaaaacagtatgcagaattggatcaaggacttgatatggaaacaacttgatctgagctatcctaacatgcctaacgcaaaggtgcacagtggatttttctcctcctataataacacgattttacgtctagctatcacaagtgctgtccacaaggcaagacagtcatatggagatatcaatgtcatagttacagggcactcaatgggaggagccatggcatccttctgtgcgcttgatctcgctatcaatcttggaagcaatagtgttcaactcatgactttcggacagcctcgtgttggcaatgctgcttttgcctcttattttgccaaatatgtgcccaacacgattcgagtcacacatggacatgatattgtgccacatttgcccccttatttctcctttcttccccatctaacttaccaccacttcccaagagaggtatgggtcaatgattctgagggcgacataaccgaacagatatgtgatgatagtggtgaagatccaaattgctgcaggtgcatctccacatggagtttgagcgttcaagaccatttcacatacctgggagttgatatggaagctgacgactggagcacttgtagaatcatcacagctgaaaatgttaggcaactccaaaaggatctcgccagcaacatcatcgtctccaagcactctgtcgatgtcactattgtagaacctagttcacaaacatattgaaagcaattatggatagtctacggtatttcttttatccgatttagagcaaaggatggatccttcctcttttctcgaagatgaaggcttgattagaaattcattcagatttggatgtacatacagggttcttttcatagcttgtgaatatgtagagatgtacataggatgatagattcatatttcataggtgttagttttttattttttccttttctgatgcatatgcttatgcattttgtaaatgcaataaaaacaagaatagttccacccatgtatgaatatccatacaattatctgtatctgccactgtgtaagtaaaagatatatgattatctgtgactttaggcatg

SEQ ID NO: 11246 - DNA, 957 bp, Oryza sativa
  ref <308>: DATABASE ACCESSION NUMBER: AK108594
  ref <309>: DATABASE ENTRY DATE: 2002-08-28
actcttctccctttcatttcttttctttccccacctccccgtggcatggcagcaatagatgggcagcggcgtcggattgctaggggtgggggcggatggcggcagcggatggccgacggtggctgtgtggcggcgcggggaggcttagaggagcggcggcgcggggaggctgagaggggcggcagtggatggcggttgggcggcggtgcggggaggctgaggggcggcgccggcgttaggaggcggggaggagccacgccggaatcctctcctcgaggaggtgcgatgccggcgtcccattgtcattgatcttgagcgcgggcgagccatcgacggcgagctcgggcggaggatgcgagcgagcgacaacactcctccttcccatggcagcggcaggcacgagcggagggagaaagggcgcagcggtgataggcggagggacttgggctcgtcaccgccatccaccgcagctcgggctccgtccccatccgccgccatcatccgctaccgccgccgccactcgggttcgtcgccgccatccgggctcgtcgccgccactcgggcttgtcgccgccatcctctgtcgcttgggctccgtccccattcgtcgcagctgttgccggcggtagctgcagccggctcgagcagagcaggtagtacggggcgagagaaaagcatctccaacgtggggcccacgaatggcaaggcaatttgggctggccaaaattggccattgagggaggagttttgccagtcatttggcttagcccttctagtagagaggctgttggagtgagatttttttttgctaaaatggctaaattttaacttggaaagtctattagagagtctgttggagatgctctgaaatttgggggataagagagagatcgaggtagaaacaggttctaaacacccttgaaatttcaaggaaaaggaatcaaatcatatttgaat

SEQ ID NO: 11247 - DNA, 1459 bp, Oryza sativa
  ref <308>: DATABASE ACCESSION NUMBER: AK108595
  ref <309>: DATABASE ENTRY DATE: 2002-08-28
agtacatcttcttcgacctctccggctcgcacctcagatgcttctgcccaccagctccggtcatggagcacaccggcgtaccgtacgacagtcaggtcgtcggcttgcaggcgcttcaccggacacggttatcgcgggccggcggcagcagcaccatcgtctcagctcgcccggctaaccaggttgacaaggcgatggtgctctgtgatcgtgctgctcaaatcggcgacgacgatgacgaccccgacaccgtgtcggacgcaggcacgtcgggcgttggggtggtggatgaggaggagacggccggcgacgacgaggaggacgaggtggcgagcttggatgagctcttctgcgacgaaagaatcgtgaggaagatcgatgcactggcgcagctggtgggcatggatggcgccgcctgccagcccgccgctgtgctgggtgaagtcgtccgtttgatccaggaaacggagaggaagaatgggcgttgcgtttgtgcttctggggccgttcgatcttgatcggaccgttatgggttttttcttgcttattatttttttcttggcctttttagggctgtcactaatgtttctttaggttggtttggtttgaggcctatattggccttaccaatatttggcaatttcaatagtgtttattgtctattttgtttggagccaaattttggcatgcctaagaaaataggtcatttcaacagttaatttaggctattttggcttcaatccaaacacaatttttcctttgccaaaattagccatgccaaaagttaccaaaatttgacattgacaaaaattggtaaggccaatttatgccacaaaccaaaccagacgtttttgccgataaggctgccagcctgccactaatgttgttggttcaggttactgtttacagtttaaacgaatgtttgttggaataagaagtgtaccaaatgaacaaattaatgcaacttgaaccatactccctccatataagctatataacgccattgattttttaaataatatttaaccatttatttatttaaaaatttagtaaaaatatataaaattataagttaatattgtagtttttttcatgataaaacaagtcacaatgaaataaataatatttatatattttttaataaaacaaatggttaaatgttatgtgaaaaaccaatgatgacatcatatattttgtgacaaagaaagtacatatatagcaagtttcagctttctttttctttagaactacttagcgagtttcatcttctctaacttttttttggaactactcagcaagtttcacctatgagtgatgtggagggaaatgtgaatgtagttcatgtcactctccaggagatggattttcatctctcgagggaatattctcttttcttacatgtcatctaaataatcattaaaattcttttttaaaaaaacaacatagattaatgaaaaac

SEQ ID NO: 11248 - DNA, 884 bp, Oryza sativa
  ref <308>: DATABASE ACCESSION NUMBER: AK108596
  ref <309>: DATABASE ENTRY DATE: 2002-08-28
ctcgcttgtcttctccttcctctcgcctcgcctcccttgcactcaaccacgccttgatctcccacacgcgagccaagaattcgcgcgcccagatgagctccccggccgccgcgccgcccggcgacctcgtcctcccgccgctgccgccgatcaagacgacggcgccgccgccgccgcctgcgcggacgtcgtcgtcaacggcctcgccggcgccgtccgacgaagcgagggcgcctctgaagaaggaggaggaggaggagccgacgacgccgacgtcggaggagagcaggctgcgtgcgccgaccgtgtgcccgccggcgccgaggaagccggcgcggacggcgaagaggaagtcgccgccgcctccgtcgtcgtcgccgtcgccgtcgacgctggtgttcttccccgtgcagcgcgacctcgccgccgtgttccggtcgctgccgcccaagaagcggatccgcgccggctgatgatgatctctacccacccacacatcgccgccgccgccggagcagcacaattgggcgtaaattatggggctccatggttcgatccatccacttcctcggtgaattcttggagttcttgtgatcttctcttccttctctgccacttttttttcttcctctctctctctcctctggttcttgcatggttcccacggccatggtataattaatttctggtgcaaataatgtgttgttttttttagttcttttttcttctttttttagaaggcttgtgtgaagaagaaactgtagaattatttataggtgaaatggggaaaaaaaggagaaaggagttgtaagagaaattcccggagatcttgttaattatttattaagtatagttaaattcacagctctaagatttacatgctc

SEQ ID NO: 11249 - DNA, 410 bp, Oryza sativa
  ref <308>: DATABASE ACCESSION NUMBER: AK108597
  ref <309>: DATABASE ENTRY DATE: 2002-08-28
ctccctctcctctccactactaataccaccaccgccgcgccggaggtggaagacggacggggtagagttggggtctcgcggtgagccgattcctctctagtggtcgcgcctggtgtgttcgccgacgacgccggcgtcgcgtcagccatgggtgggctcgaggagatcaagaatgaggccgttgatctggtaagaaaatcactcgccgccaccagctacctactacttcttcttcctcgcttcctccctctcgcgtgttgggttgcttaggctttagctctagctttagttcttaccatttttgactggcgatagaaatagtctgagaattgaaaattaatgataccggctagctggagctgagtagatttctgatacgcttaataaatgaaaaggaaaattttccatgt

SEQ ID NO: 11250 - DNA, 1660 bp, Oryza sativa
  ref <308>: DATABASE ACCESSION NUMBER: AK108598
  ref <309>: DATABASE ENTRY DATE: 2002-08-28
atccacccccaagctcgcgctcaaccaaacacactacagctagcttatagctaagctgtgtgtgctagctcgatcggtagtaacaacgtcccaggcagccatgccggccatcgcggattgcgcggccgacccgccgctggcggacagctactacacgctgctccgcctcggcggggacgacgacgacgacgcgtgcacgaaggtgaccacgacgccgcagcccgtgtcggagtgcgagctcccgatgatcgacgtcggttgcctgacggcgccgaccggcgccgccgccgccgccgccgtggggcagcagcatcaagccgaggagagggcggcctgcgcggcggccatcgcggcggcggccgcggagtgggggttcttccaggtggtgaaccacggcgtcgcgcaggagctcctggaggcgatgcgccgggagcaggcgcggctgttccgcctcccgttcgaggccaagtccagcgccggcctcctcaacgactcctaccgctggggcaccccgaccgccacctcgctccgccagctctcctggtcggaggccttccacctcccgctcgccggcatctccggcaaatcctgcaactacggcgacctcacctccctcagggacgtgacgcgggaggtggcggacgcgatgtcgaggctggccagggcgctggcgcgcgtgctggcggagagcctcctgggccacgccgccggcgagcgattcccggaggggtgcgacgacgcgacgtgcttcctccggctgaaccgctacccgccgtgccccttcccaccggacgacgccttcggcctggtcccgcacaccgacagcgacttcctcaccgtgctctgccaggaccacgtcggcggcctgcagctcatgaagggctcccgctgggtcgccgtcaagcccatccccggcgccctcatcgtcaacatcggagacctttttcaggtacacccattaactccaacgttgtataaacatctcaacacaaatccctaaataccatatatgcataatggtactaagatggaagagagaaaacaaaagagaaaaagaggatgagtcaccccctcataaagagaaaaatatggcgctgattggatgaaaagtgcatgaaacaaatagttttcttgtattggagctagtatattagagataatgtgtagtatattttacctcctaataattaattagttgatgatgtggataatattaagggtgacaatcatccctactataaaacttgctgttacacctaatcatgcataccactcgtgctatatatagtgctatatacccaatcaacaactactccatattctacgaagctttgcacgggagaggagaaaaaaatgtgcataattattttggacaaggcgagtacaatacaggctctcgtggctggccggccggctggctggctggctggctgcggccggcaatgctttccaacctgtagagtcaaagcctgcatctgcctatggtaggtggtttgtctgtctgcgtgaaaaagtacagattccgtgaacatattccgggcctccggctctccaaaaggcggacgttgcagcgtcacgctttgcgtacttgtgcttgtgggcatgtcgtgcctatctatcagcagccttgcctgcgtgtatcgctgtaccgccgctagcg

SEQ ID NO: 11251 - DNA, 1438 bp, Oryza sativa
  ref <308>: DATABASE ACCESSION NUMBER: AK108599
  ref <309>: DATABASE ENTRY DATE: 2002-08-28
atcgctagtgctcgcggaggccggagcggaggaggagacggacgcggcggcggcgccaccggcgacggcctctccttcgtctcgttctccgctctgcttgacgggaggcggctcctccgcgcgtccccctctccgccgcggtgaccggccgaggggtgctccgccctccgcttctcccaaccccggacggggcgccgccgagccagtgctccccgacggcggcggcggcggcgaggaacccgtccccgacagccgaaactcggatcccaactaggaggagctgcagaaagccggcgtctcctacctccaacggcttcgacttgactgcaaaatatggatctttctcctttcaagttggatattgatgagctactagcggattataccgaggcaaattgcactgcattcgctgatttcaagagattgtggatggcaaagaaattttcttatatctatgaaggaagacctaagacaaactctggcgctttcatgcagtcgctctttttgcattgtattggtcatatgacatctcagagttgtatgcctcaaagattggctggactttactgcctttactgtctttacgaatcgcaaccatacaagccacatttcaagatctatttgtctcttgaggagttgaagaaactcaaggattttgttgttgaggctaagcaaaatggaatggctgttgtaccgtcacttgtcaaaagaatgctggacaaaggaatgattttgtttggattcatcaatctacttggtgactcaggggtgaagcaggtcaatgagttaactgcatctcagaataagagagtgaaattcgcatgtgacaagttgtttatgaatactcagatagacagttatatgcacatggatttggattcggagcttgaacttgataagatcaagaaatcatcgttggattatgccaaagccaaggaattggcatttgcagaggcaagcaatattatcgatgttgaagatgctaggcacattgttcagaatgacaaactgctgggcgacagggtagatgaaatcgtcaaagaatgggatgcacagaaggaggccttctacgagaagacgggagtacgtcgcgatgaactagcagtagttgaacatgacgaatcaggagtactccctcatgaaaacgatgaattcgatgagattagacagctgctgctagagtgaaagtagtgtacaacagcatcctcctaaaaaaacagatgaaatcattcattggcttactggagtctctcagtttttttttccttttgtcactcatatgctctttttgagtgttttactgccctgctgtacgttgcaaacaaaaacaacttgtacatagtagtgatatgttggatgaatgttactattaccatattgcgtagttgtacattgcaagattcatttataagacatggatttcataaaaattttgcag

SEQ ID NO: 11252 - DNA, 1515 bp, Oryza sativa
  ref <308>: DATABASE ACCESSION NUMBER: AK108600
  ref <309>: DATABASE ENTRY DATE: 2002-08-28
tatgtctcatgtttctgttaattatctcctatcccagtccactttcatgggctttaaagctgcactgccagtaaattgaggtggtaagcagccatcgaatcatccgctcctaaaattctaagcattcgtgacaagttaatagatgctacactaagaccttgactttgcaaccttcagtctctaattctctgcatgcatcatttactccagagttctaattaacaggatttcaggtgaaggccatctgtggatccaaaatatattgttctttggctaagattttaggtctggctgtttttctccatttcatataagctttttgaaaatatcccatattaaatatttctatttttgattaatgtaacatcccggcctagggcttaataggattaatagaatactcatatcaacaggttgcaacttcttttccggaagctgatctctaaagaactccgaggttaagcgtgcttggcctagagcaatttagggatgggtgaccgatcgggaaattcttcccgagtgcacatgagtaagcacaaagtgcgccgaaaagacttgtgttgccctgtgagggcagtctatgacctataaaagcctgggagaggcgggacgttacaaaatggtatcagagccgggcgcgtatgtcgcagttgcgcaggcatggtgcgcatggctgttgtggacctggagtggtcacagcatggcacatgcgctggcactggacacacggacatggccaagaggggacgttcctggcctggggttgatcgacgggggcgtcgatctctcttaagagggtgagggtgtaacatcccggcctagggcttaataggattaatagaatactcatatcaacaagttgcaacttattttccggatgatgggtttcgtgtaatttttgccttctttttttccactatattcaatgaaattgacacaccggtgccagttcattaaaaagaaaaaaaaatctgtgacgggttttatactttagatctttttctgttgcagatgagctgaaaaactcttaaaattggatagctcaaatatatgtaatatgtaattgtatttctaaagctagagccagatcaatctgcacatatttgttttatgctattccatctaatttgtaactgcttttgtttcatgtcatatatgcagttggtaaggtggtatacaatttgagctatgatatttcagacagactgagggcatatagaaagttaagctttcaggtgccatgatcccattcgcttttcaattgattaaatggaattattttgttggtaatctcttaacaaatactatgagtgatccggatgtcaagtgcccaactcctatgtatgcttgatgcttccctcaatgctcatatatataattgggtcatcttttagattttgaaccatccacattaggtgaaggtttatttttgctaaggtatgcagcaatccatgatctggaagcatacaattttatgaattatagtaatgatgcctaataaatatataatttttc

SEQ ID NO: 11253 - DNA, 1402 bp, Oryza sativa
  ref <308>: DATABASE ACCESSION NUMBER: AK108601
  ref <309>: DATABASE ENTRY DATE: 2002-08-28
cgtattcctctcgagctttgcgttcttgcaagcaggaagatttcagcatgtcgttggagtcgttgtacaggctgaatatctttactgatgagaaacttctgatcagcttgtgccagtaagaagtgattaatgggcgaccatctggcattgcttgtggatcggctgctgacggagtcgacgctggacgcggcaatcaggaagcaggtggccgatctgcaggcggagacggtggcgatcgactactgctgcgacggcgacggcgatggcggctcggcgaggaagatggtggagtgcaggatttgccaagaggaggattgggataccagcatggaggcaccctgtgcttgctgtggcagcctcaagtatgcgcaccggaaatgcattcagcgttggtgcaatgagaaaggcgacaccgtttgcgaaatatgtttgcagcaattcaagcctggttatactgccccacagcaactgtttcactatggaagtataccgatgaacttcagaggaaattgggagattgctaggcaagatctccatgattcccagataataacaatggtgccatcggagcgcgacttcatggatggttatgaggactacttacccattaggacgagaagcagcaccctgtgttgccgaacagtcgccataattttcatgtcactcctggttcttcgccacactcttcctcttatgattggtggggatggggagtactcgttggccttattctcgcttcttgtcttgaggaccgccggaatcctatttccaatcttggtcatggtgagagcattggcaaccttccatcgtcgtcgtcgccagcaggaaagacgggaaatgtatatgacttcgtcagacagcgaagaggaggaggattattcagataccgatcctgcacagccaattcattctcagacacgcctggtaccaatctactgacacgatcaagaacgatgccaaaaaaattcaaaaaaagaagaaaaaaagaagaggaaggtgaccatatgtgacatagtaaatgaagatagtttgaagccactcgcttcaaggtgcccttgcaagaatgtagtggctctgtacatatgagaaaggaacagatcgctaactaacccaagatgctgtaacttgagcttctctagtactgcaagcaagttcagctacccactataagtattgaaaaggttgttattattcagattacttgcaaatggaaggaaatacacgtcgttttctggatccatccacttgcatttttcattttacaatcgcaatcattttcgtctataacagtagagccagaatggcaattaggcattccatggctatcatcaactcagatcgtcaacccatgtacgttattgcctgatcgattggtgaattgttgattcagctttcatagcag

SEQ ID NO: 11254 - DNA, 1663 bp, Oryza sativa
  ref <308>: DATABASE ACCESSION NUMBER: AK108602
  ref <309>: DATABASE ENTRY DATE: 2002-08-28
aagcaataatcagaccaagaaatttttcctctcgatcttcttgccatggaattgcctgcagccaagaggcagttcagcaccaccagccagggcaaagaagtttcagggatcagttcttgcaagcctacttaccagagataccaatcatgccctcctgaggtctaccgtcgtcaggcttcctcttacagcgttccatcttcagagatcagcaggagctcggttcgcagcagcggctcgttcagggcggcggcgcagagtctcgccggagttttcagttgctttgtgcccaggaagtccagaaatgaggatgaacttgagatttctcggacgacgatttctcaagggagcagaagtacaggttaccaagtctcgattgatccagggacagggtatccccaagaaagcacagagctcacagttgcagagatatttaaggcaacctcaaacttcagtgacaagaacataataaagcagggaagttatagcagcatctacagagggaagctcagggatgggtctgaaattgccatcaaatgtgccagaaagttaaacagtcagtatgcatcagctgagcttcggagagagcttgaaattcttcagaaaattgatcataagaatctagtgaggttcctaggattctttgagcgcgaagatgagagcctgaccgtcgttgagtatgtcagcaatggttccttaagggaacacttagatgaatcctgtggaaatggtttagaacttgcgcaacggctcaacatcgcgatcgacgtagctcatgctatcacatacctgcacgaattcaaagagcagcggatcatccaccggaacgtccggtcatcgaacgtgctcctgacggacacgctgacggcgaagctggccggcgtcgggctggcgcggatggccggcggcgagagctcggagtcggaggacacgcaggggaagagcgccgccgggtacgtggacccggagtacctgagcacgtacgagctcaccgacaagagcgacgtctactccttcggcgtcctcctcgtcgagctcgtcaccggccgcccgcccatcgagcgccgccgcgacctcgatccccgccccaccacgaaatgggcgttgcagaggttcaggggaggggaggtggtggtggccatggaccccaggatcaggaggagcccggcgtcggtggcgacggtggagaaggtgatggagctcgccgagcagtgcgtcgcgccggcgaggaaggagcggccgtcgatgcggcggtgcacggaggcgctgtggtcggtcaggagggaataccaccgccggcaggacgcgcccgccgccgccgccgccgtcgccgcggcgccgactcaagacaggagctccgattgggttaaggtagtttagcatgcaacgatgtgatcctaagttcctacttaggttgagattttgagatgaattaattattgttggtaattaatttatcatctttaagctaccatgccgccatgctttgtgaatacaaaatatgaggggttgggtctaacaatctttcttatgaaagttagaaagattgttctgtactataggttgattatattatgtaagaacatttgtaatttgtaaagttaacttgaaaattctcagttcttggaaggcttgcatctatcatgttatgtacctatgttcaatg

SEQ ID NO: 11255 - DNA, 1941 bp, Oryza sativa
  ref <308>: DATABASE ACCESSION NUMBER: AK108603
  ref <309>: DATABASE ENTRY DATE: 2002-08-28
gtgtgcccagaagaaagagtcatcttctccggtacgggcatggcattccgagctctcaagcacttgctgttcaggtgtcataagccattcctggacttcaaagcttgttctatgcccaggttacagaagcttgagctatggcttgatgcaacgggatggtagaaatgcagcggcacttgcttacctgttggcattgatcacctgccagcatgcctaagagaaattcacataaaccgggattatggtgctgacagacgtgacatagaaactgcaaaatctgcgctgagtagcttatttgccacacatcatcctggtgctggcttgatttttggaggtgcaccttggaattatccttctaatgaccctgaccagtggtgactacttgtgaaagaaagatgcggtttggaaggcttgaacagttgaacccattgacttcacttgataaaagtgtccgagctattctctaaccggaaacaagttgctaagattttgttgacgagaatgcacaagagagaggatcaatgagaggagagagtgaacagagagcaagcatttgaatgatgaacagcgatgaccgacaagttaagttgaacgccagttcaagtgaatgaaaatgaagtgtgctttgcagcatcctggaaaaccataaatatagtggactgcagtgctagagaggaagaatgcttctagactgtagaccagcaggaaacaagaaaaagggtttctcctccttgtttatccatctgccgccgctcgcctatctacgctgccggggcacgcaccgcctccgatctgccggattcagatgggtagttgggtcatcgggcctgctccggagatttctgagctagatgagcgggctgccatgtaccgtgataagaggaaggccatggattacgtcaggaattggatttgccccgggtgtaggaaggagtacgagcctatcaagaatatgcttgtagacttgcctccattcgggtgtgttgactgtggtttgaagaacgatgcagcttacgagtggaagataactcaatgtacactcaatggtatttctttggattttaagacctatgatcaaaaacttgaaccacattgtactctatatgcaattactgcggtaattgattgtacccgtagactggaaggagcacaaaagggatttgtgttttctgctccatttgatataaatgagatggttgagacatataacaaaaggactggttttaaactaggaaatgaacctcaagataagttatatgagacttatgataattgtccaattgtcatggaagttctaaaaagtgatgggattgctatattgattggagcttctgatgttacaacaactccagtcccacgccttaagattcaaagttattttcgtgttgaccctaaggatgttctttatataactagattgttggcaggaggcttcccattagtagcagggattcgtcacggtttgctatttaattacttaagtgatggtcagtattattgtgccccaacatgtgagaacactagtgatgctcatgcagttgctttgatcggatgtggagtagggtctaatggcaacaaaacagaaacattttacaaggttagaaattctcacgggataaaagctcattctcattatcagaagagagagtttggtggagacttcattgtgtggtcatctgacgttactgatgtctggggtttgtatttagcccagcatgaatgttgatgttgcgtgactctaccaagtgtatggggtttgtatttagcacaacataaatgtttgatgttgtgtgactatcaagtgtatgactgtatcgcttgattattagtttgagaaactatgtctatgtctgggggggtttatgaatgttatgttgtgtgactactaagtaagtgtttgactgtatgcttgattatcttgaagaacaaattatttgtctt

SEQ ID NO: 11256 - DNA, 997 bp, Oryza sativa
  ref <308>: DATABASE ACCESSION NUMBER: AK108604
  ref <309>: DATABASE ENTRY DATE: 2002-08-28
ttgttagagctcagtataggaaacagtcttggagtcacttctctgacataaaaactgatagagcagttatagacccagcgaagaagcatatcttccttcacaaatgacaatgccgatggagcaagtcttcgagcactacgacaaagacaccctaaagatggccatgctgaagcatgaagagactttcagacagcaggttcatgagctccatcgtctgtacagaattcagaagcttctgatgagagacctgaagagggagctcaagaaccagagcaacatgtcaacctcctccccgaacggattcgccgagtacagcagagccgcactggacgccatgcgctcctacgagcaatgctacggcgcggccactcgccgcggcgccgccgtccaccacgcggcggcggcggcccgcgcggcgctgagcctcgtgccggcggtcgagtacgcgcagagccccgaggaggaggacgcggaggagaccgacgacgaggaggaggcggcggcggcggagctggagctcacgctcgccgtgggcgacgccgccagtgccaagaagaggtacagccgcaacgagcaccactcccccgggcagagcttctcgtcgtcgtcgacggagtccgacgtgctcgtcacaggcgtccgggacgcggacgcggcctcgccgccgtaccaccacaagcggaggccgggtccggcggcggcgttcgacgtggtgcaggtggacgacggcgccgtgcaggcggcgccgccgccgccgccgctgctgttccactggctcagccttcggatggcgtgagagagagagagagaggaaggagaagcacggacgcgtgcatgcatgtactgtctcatggccggccgggcgggcagtgtcagccagcacgcagctgacttcttgtcgtcgttgagttgtactccaccatgcttctttgctttgcttcccgcttggttaatggatcaactctagaaaaataaagttaacttgtagttgagggac

SEQ ID NO: 11257 - DNA, 1615 bp, Oryza sativa
  ref <308>: DATABASE ACCESSION NUMBER: AK108605
  ref <309>: DATABASE ENTRY DATE: 2002-08-28
atcccctctcctctctctctctcttctctcctcctccactctcccacgccgccgacgacgacgatggccgacgagcacttcttccccgccggcggcaggctgtcccgtgtctccagcagcaagtccctcggcggcgccgccgcggcattggacagctccgaggccgacatgaaccccaccaccgccgccgccgccgaccaaccatccaagccctccgccgccgccgccgcccggaagcgcaagtcgtcggcgaagcccaaggcctcgtcctcatccttacccacggccacggcgacgacgaacgcgagcccgaagcggtccaaggtcgccgccggcgccggagacgacggcgacgccgacgccgacgcggcggaggagaagccggagccagccaaagactacatccatgtgagggcgaggcgggggcaagccaccgatagccatagcctcgccgagagggtgaggagggagaggataagcgagaggatgaagcttctgcagtcgctcgtgccaggctgcaacaagatcaccggcaaggctctcatgctggacgagatcatcaactatgtgcagtcgctgcagcgtcaggtcgagtttttgtccatgaagttggcgaccatgaatcctcagctggactttgacagccattacatgccttccaaagatatgagccatatgccagtacccgcatacccgtcaagcgatccgaccaccaccaccgcgttctcctacaccggctcacccgccactgctgatccattcaccgtctacaactgctgggagctcgacctccacaccgctatgcaaatgggagccaccaccggactcagccaagacggtccaatcgcaacgatggcaccctctccctcgccattgccgcaccatcctcctcttcacggcttctacggggggcagcagcagcaggggacgacagtaaaccacatgaaggccgagccataataaatgcggcgacctctccttctgtacatacgcccagccgccgtacgtgtactccgcttttctgctcccatcctgcagcatcagcatcaccagcagcagcaaacccaagctcacaatcattgccatcaaagaagaaagaagaggatgttgtgtgtgactgtgtgtgtggctttgatcatggctttggcttgatcctacaaaagccactatctttttttccgcttttctacccctctgccgtctgtcactgcaggtggggcccagctgcacagggaaggagaaggttttccaaggcttaactttttccagatgcagtgtcatattgtttaggcaaagaacttgttttgatgttgtgatgcttgtaggacagaggagtatatgtgtagtatgtctggaaatggcaaggcaggggagctgtgtgacctttgtgtgtgctggttgcatgccctaactgtagaaaaaaaaaagaggaggattgtgctagtgatgttagtagtggtagtggctttgtaggatttggcatgcatggggatgtatgtactatgtatgtagagattggagaggattttgaaaaacaccttccttttttgtggacattgttttgtatcaagagtactggaatcatcatgcatgcaagaaatgttctttgaacaat

SEQ ID NO: 11258 - DNA, 1496 bp, Oryza sativa
  ref <308>: DATABASE ACCESSION NUMBER: AK108606
  ref <309>: DATABASE ENTRY DATE: 2002-08-28
gtttgttccttattgatattcaacattttacattcagcaagtgcaatgacattcacctgtgatgatgatgcatggcttgctcttaccatgaagctattggattgtttcaattctagtcttgcttatacatcaagtgagcaagaatggaagatattaattgggatattgtgccttattttaaaccattcagcaaacaaggtgcttattgagcctgcaaaagccataatcttgaataattgtttggctttgttgatggatggtatagttcaagaagcttgtgcaaagggcccatctttatttcaacacaatcaggagacaacctttggggaattattgattcttatgcttttattgatatttttctctgtacgaagcctgcaagcgatcttagaggcaagcattgactggcaggaattcctgcaatattcagatgacactgagtcttcctctgttcttggcattccgtgccatgatttgtgtcgtctcatgcactttggcccttctcccgtaaagcttattgcttcacaatgcctgttggaattgcttaacagaatttcagatcagaggagctgtcttaatgctgagttaagatgctctgcaaagtatctgaagtccatgattgcagtgacagagggaatggtcttcgatcaagatagtagagttgctgaaaattgtggtgcctgtctcacggtgattttaggttgggagagatttggaagcagagagaaggcggtgatcagagaatctaaatggtctaggttaatattggaggaatttgcagttgccttgactgctcctggttgacatccaaatccttcagtaatcagcagaagattgcagcaaatatagctctttcattgctccaactgagccaagtaccagattggttgacatcgttgttcagtgattctttgatatctggtatagttgctaatctttctgctaggaatgttaccgcggaaattgtcactctcttcagtgaacttatggccaaaaactatctcaatcaagaacacattgctggtctacacaacttgttccaggtctgcaggagacaggcctatgagggaggcggcggctcgaaggcgcagccctcggagcagaaggctgcggcggcgagatgcgccgacgacgtgcgtgctttgctcttcggcatgatgctggagcagcgggcgtgctctcgcgccaccgttgagatggagcagcagagacttctccgtgagatcgactctttcttcttccaggagtcgagcctgcgagaacagaacagcgtgaagtaacccaagtctcaaggtcttaaggccagcccccggccaacaaaccaggcacctcgtacagctcccccctaatccgtatagtttttttttttttttttgacattcctaatctgtatagatgcttataagtaattagggatactcacatcttccttgttgatagtgtttaaagggcgcaaaaattaatttgcccctcaatcatgaaaattgttgaagctc

SEQ ID NO: 11259 - DNA, 1505 bp, Oryza sativa
  ref <308>: DATABASE ACCESSION NUMBER: AK108607
  ref <309>: DATABASE ENTRY DATE: 2002-08-28
gcgtcgatcgtgctcgtccgtgcgcgcagcaaaacgccaccaccaccaccaccgcatccccaacacctcacctcacctccttacaccataggcgtgcgtgcgtgatgaacaccacgtccgcgaacgagctgatgatgcaccgccacgtccaggccgcgccctacgcggcggcgccgcagcagcaaggaggcaagcagcgtgcgccggggctgccaccgacgcctccacctccacctgcggcggcgagctcccactcctctcacggcgacgtgtgcatggacgacacggcgcgcggcgggctgctgccgccgcgcaaggcgcaccggaggtcacgcagcgacgtgccgttcgggtacttccagccgctgccaccgccgtcgcccaagatggaggccggcggcggctgggcactccccgggtgcggcggcgccggcgacgtcgacctgctcaatgcgtacatgagcttggagggaatgggcggcgccgacgggctgaacaactccgacggggacagccgcgggagcagcatgcggacgaacggcgccgacagcagcgagaacgagtccgaggactacgtcggcgccgacagccaggccctcctctggggcggcgccggcggcggcgaggctgcgggcaagaagagacggaataacgctgccggcgagaaggcggcccggcacgcgaggagcctttccatggacagcctcatggggaagctcagcttcgccgccaatggtgagccggccaagttcagcctggagttcggcagcggcgagttcacccccgccgagatgaagcggaacatggccgacgagaagctcgccgagatggcactcgccgacccaaagcgcgtaaagagggtgctcgccaataggcagtcggcggcgaggtccaaggagcggcggatgcggtacattgcagagctggagcagaaagtgcagatcctgcagacggaggccacaaccctctccgctcagctgactcttttgcagcgcgactcgtcgggaatggccacgcagaacaacgagctcaagttcaggctgcagtccatggagcagcaggcgcagctacgcgatgcattgaacgaggcactgacagctgaggtgcagcgcctgaaactcgcggcgaatgaggtctgcgacacgagctcgtccagcaacctagcacaccaaatccagctccgccgtcagaaccagatgcttgatctgcacaagcagcagcagcagcaggttgagcagataccattctatcaactggaactgccagagcagcagaatggcgcggcgaggaatcacgagtccaaatgattgttcgcggggactgcgtctaggtgctcatcagggccatacagaaaaaatgtcactagtagaaatttagacgatctgaagaaattccttttcctaacccatttgttttcagcattgatgtctccgtaaatttgcttgtgtaacttgtatgtccgggcaaacacccagtaatattctgaatgttcttcgttctttcac

SEQ ID NO: 11260 - DNA, 1225 bp, Oryza sativa
  ref <308>: DATABASE ACCESSION NUMBER: AK108608
  ref <309>: DATABASE ENTRY DATE: 2002-08-28
tattggttttttttatgcacaaattagttcggaatttactagtgaatttccgggcgtgacagtggcgctgtcggcgtttattggtttttttataataaattatgggtgtggcttttaaagaaaaacagcatttattgtattgatgtcggttttagttaagaaccgacacctatttcttcacaaagttgctggttctagctgacacgcgcttatgtgggctggaaaaatattataggtgtcggttttaccgcttctagcacttatagtgtcgtgttctatttgcttttatgtagtagtgggtggccattacaagctattgtcacggacaaacgcgtcttttctaaatatctctttctatttagcttggaaatgataaaataatagttgtggtgtcctatagtcatgtcacgttatttaggtgtctagcacaaagaccgtaaattttttcatgtgatgtactggtaaatttgcttttacgaccaaatctccacggaacaaatttgcgtagaacttccgtgagacgacctagaaaaatgcccaccttaaatgaacggtacgtagggagtgagaggatggtctttagataagatgtcaaaattaaacgacatcacatacataattctcatggatctactttcgtaagactacggaccaaattctcaggaaaaatgctttgtcccgagcgtctgattctgcgactcgcgtcggaccctaaggggcaccaacatccaccgtccatctctttatccattttaccacttgttctcagccactccttttctcatttctctctcgcaatggaggaactcttcaccacgcgtatgaggaagcacatataaactcgatcatgagaaagactgtcactggaggagcggaggttagggccctaagctcgccgggcgacagcggcagctcaccgcgggcagcagcggcaatgccgctaggagatgcagccatcgccggttagggtcctgatctcgccggtggcagcagggccacgaggaggtgggggtggagcttgaggcgccgccgacgaaggtgaggatggtgggagcatcgagttagcaaggatttgttgcaattttcatttctatatgctgcagttcatttctttggatgttgcgtatgttttttgttgttgaagactgcattctttaagtgttgcatccgattgaaacatcttcggtaaaacaacggaacattcttccatgaaggatgaaacatc

SEQ ID NO: 11261 - DNA, 749 bp, Oryza sativa
  ref <308>: DATABASE ACCESSION NUMBER: AK108609
  ref <309>: DATABASE ENTRY DATE: 2002-08-28
aaaaaggttgggttcgatccccaatcgcgatgtgctagggtttggaggcccgtgctcagtcctcgccgccgccgggcgccatcctccccccctgcacctgctaagcccctttttttttcttataagcagcaagcgctcgccggaaattccaagcagagagacgcacggatcagatcgccgacatgtctaggcgtttcttgtttcagaaattttcagtgctgtccggatcgatgcctaatcgtcctacctccgctcaaggaggagacgtttctgctatccacgatgctctccgtcgttttagcacggtgcttcccaattaccatggccttcctgtctctcaagcaaagtgcctgaattctattcaaagccctcacgcagccaccaaattaaaccacccaacaattggtgtggttccttttgccagccggactttcttctcttatacaaaaccctaccacctgccttctctgggtgaaaccaattaccctgattatgtagcagcagacattaaagcgtttgccttgctaagcaaagcctaaaactctaccaatgttaagtgaagggaaggagctaaatatgaaggtaaacaataaggaagtagcattatttactgggacacagtatagtttacagatgattcttctttttgtctgtaatacatccattatgttcatcctaccatgaaaaccaaagtgataggacaggcaaaatagaagtaactattgacgagctataggaaaagagaactg

SEQ ID NO: 11262 - DNA, 1444 bp, Oryza sativa
  ref <308>: DATABASE ACCESSION NUMBER: AK108610
  ref <309>: DATABASE ENTRY DATE: 2002-08-28
ttattttaaagagcaggtaagtaatctcctaatatcgtttaggggtaattttggcatgggatgttttcttctgttcgcatcgtatcaggtctgaactccgttgcacgcagtcacctcgctattcctcccccggcctagccgccttgtccgccccctccgtcgccatccgtattccccgccgtcgccgccttgtccgcttcctcagtcgcatcgtccgtctgggagcggacgagtgtggtggcgtccgagcaagtgacgatcttgagcaggagttctggcggtagtaaaaattccagcctaggcttcggcggcagcgtcacgcacgcacgcaatgtcatttgcttggcagcgtcgtctcggctcattcgtcttcttgccgtttccgatcactgtgttgtttcatggattacatggatcgattaagatcttgcacgaccaactccgacgaggatgacatggtgatcgatctatggatcggaaaacaataataccccttcgcgaattatttttcctagacaaaaacacccctccacatttcacttccactaattctggtaggagtaaaactagatcttaaccctacaattaaatatgatcaagggcctagattactttttactccgagtagaaagcaccagagtaggactctattcttcattcatggtcaaatcatgacaagggtttgagatcagcagagcagatatatctttattaatttttggtggtaactatatataatttcagctaaaccggccaagtagttaattactgtgccttttttttttctcttctgtttactttatgatccagtagctaccataaatgctgtagaaagaatatactgcaaagggcacgtagatttttaccttctaataaatgaaatggaactgcgggaaactattctaaactctcgagtggatgtcttctcgttgtgcatatatacgagatcatgatcttaccaaacaataacaagttcatatataagatgtgcatttctatgacaatatatatactacatattgattttttatattaatttgcaagctacattcatgctgatcatgatgatgagatttaattttgttcattcaattcttagaacactaatcaaaagtaaacatcggacttttgattaatctgaaaacttaaatattatcgatatagctacagtatatgtttgtcagggcactagctagctgattctcgatcagctagctgcaggggagtatatttgacaccagtgcattggtgttggtgtaaaccttgttgttatgtatcaactctgagttgtttcctgtttgaagccttgagctctagcttccccatacagtactacacccattattttttgtgtcgagatgctcatacattgagttatgtagtgcgtgctgcatgtacaaaatggtgtttccagtgatcccaaatccctaaagattctcttgtt

SEQ ID NO: 11263 - DNA, 1338 bp, Oryza sativa
  ref <308>: DATABASE ACCESSION NUMBER: AK108611
  ref <309>: DATABASE ENTRY DATE: 2002-08-28
aagcaccgccgcggccgcggccgcctcctcggcgtcccgccgttgcgccgcgcgacgccggcgggtaaccgggcgccccgcctccccggagatgatggccgaggtgcgtacgcgatcctttccagaagcttccgttccatctgtggagtcccacaccgcccgctccatcccatttggtacccgccggctcgccgccattgttgcccctaactaaatccgagaaccggggggatcattctggaagtcttggtcctgcgttgtcaggggtcatcagcgacgcggaggctgcgaagagggggatgattattgcaggagggtgtggtcgtgtgcggtttatcgatctgcggcgtttgttggcttcaagtgttttgagtgccaaaggggacgatacactggtgcctctgagaaatttgtgaagtactacagatcactttaccatggagaatgggacatcacgactttgcggttttagcccacggacaccgcacgaagtgacttttgggaaagacattctcaaaagttggatatttgctggtggacaccgcacccattaaaataataattttcaggtgaggaggagagagaaatcgcgtgaaatgtcaaaagtgcccttgggcccacatgtcagatctgctattcctctttctcagacagtagcaacagggaacggccgtggcgccgacggcggaggaggccatcacgcacgccacgtacggccgctgctactactccagccgcgtcgtgttccgcatgcaggcccgcctcatggcgttcgcctccgaggccttccgcaaggtgctcatcccgggatataggttcctgccaaccaagaacaggatgtcatggggcatggacagggagatcaagcgcggcctggtccggctcatcggccgacgcagtggcggcgacagcggcgaggaagacgagaccaccactgagctcaaagacaagcaggacaacggcttcaacacccgggccattgtgctgctcgccgtgcacccagactggcaggaccgcacccgtggctctctccaaggcggagcagtggggggtttccgtccgctcgggcgacacagcaggtgtcgctgcggcgtccctgcacgcgttcctcctcgccgcggcctccgctcgggcaacgcggcggccatccccgcacgcgttactcctcgtcgccttcgcagcgaaggtggcgctttggctagagtgtgagagggagtttgttgagggagaaagaatatgacaagtgggcccaggggtattttagaccttttacagtgttcatctctcctattgacccaaaaattaatattttaatgtatgcggtgtccatcggcaaat

SEQ ID NO: 11264 - DNA, 1582 bp, Oryza sativa
  ref <308>: DATABASE ACCESSION NUMBER: AK108612
  ref <309>: DATABASE ENTRY DATE: 2002-08-28
gctgtcgcccgaaacaacacaccaaattaacccattccctttccgggctccggccgatcccctctgccgccggcggcggctcagtttgatggggaagcgaaaaacggccacccgagcgcagacagcggacgcccctaggcgggcgaagcggcctaggagcctcgacgctcagctccgctcctgttccggcgccggcgccgtcggccaggcccagatccgctcccccttcgcgaaacgaaggggcgatcacctgctggattgctgctccaagcggccgccgccgtcttgggggtcaaagcgagcgcgctcggccgctccaagctgccgcccgccgccgcacggctcctcccccgttcccgatccttcctggagagactggcggaagggccagccgggttgatcgcggagcgcttgctcgccgccgacgtggccgactacgtccgcttccgcgccgtgtgcggcccgtggcgccgctgctgcgccagcccgcgcggcggcggcggcccggttgatggccgcttcctcccccggcggtggatcatgatcgacaaggcgtcgcccgccgccgccaccgcttcctcaacgtcgccaccggcgagtgcatccacacggacctgccggagctcgcggagcacgacctgctcatggtgacccccgagggcctcctcctgctgttccgcaaggacgccccccacggcgtccgcctgctgaacccgctcacccgccacctcaccgagctcccgccgttcgccacggtcctgacgccggagcagcgcaacgacccccaccagggactgcgcggggaggatttccgggtcagaggcgtcgccattgccgactcctcctccacctccacctccaccgtggtagcgtatctcaaatcccccacgacactcgccgtcgccaagcccggcgacaagcgttgtaccaagatagacttcgaccacaggctcatgctctactcgacggtgcccttcgccggccgcatctaccatgccaccgccattggtatcatgacaccggagaccaccaccagctcagatcagccaccgcgcatgctgacggcggtcgacacgacgatcgacccgccattctccttctgctcgatgagcgacagccttcacctggtggacaatggcgggcgggagctgatcctggtgtaccgaaccgtaagccacgacgaattcaggagggagtacgcggtgtaccggatggatttggactcccggctgctgattccggcgaggagcctgagcggccgcgccgtgttcatcggattgtctcggtcggtgtcgatttctccgagcacatttccctccgtcaccggtgatacggtctacctgggtttcgactgcggcgaaagaacgaaaatcagcgggtaccatgttggggatggaagcatcgaacattcccagttgatcaagcatgcgtcgtggtttaagccgtctactctcgtggactgcctctcctggtgcatcaagagcaacggcaagcaacttggttgagtcctgagctgaccacttgatcacgacatctctattcccttgagaccctcgatccttcaaatcctggcatttgaaac

SEQ ID NO: 11265 - DNA, 1983 bp, Oryza sativa
  ref <308>: DATABASE ACCESSION NUMBER: AK108613
  ref <309>: DATABASE ENTRY DATE: 2002-08-28
ttttgagtttgatttgatcaagtgggaggcaaccttcttgttgtttgtaggagacattcttctccatcactactaaaagttttcttcagattgtttcttcgtgcaccatcaactacgggaaatcttctgatttggcttcatgagatgtcttctccagagcaaccaagagggcagaacacaaggatgaggaagatgacagcgagtgcaaatggggataccgatgaaacttcaggcttaacaactccccggagctgtgaagtaccgctgtgttcttcatatgaaaatggtatcacccgtatccctgaagaaactcggttgcgcgacccagaggcttaccatcctaaggctgtctgcatcggtccctacttccattcagggagaaattcaccaagcttcaggcgaatggaacaacataagcactggtgtgtcaacagattgctggagcgtagcaaccacagccttgaacctttggttcaggccttcctgcttagactgtcaaagacaatcaaaacaaagtctttccagcagctatacgcaaaaccagttgatatgacagaggagggaatcggcatgatgctgctgtttgacggctgcttcattctgcatttcttgctgaggcatgacccgaacaaaggtgcggagcatgaatactggacaaagctggatgctgggcttctcgatcatgagtacgagacactccagtgggagagaccctgggaatggagcctggtcgccatcgacatgctcctgctagagaaccaaatacctttcgtcgctgtcaggatcctgtttgacattctgaagacggagcatgacaaagctgttgacctgacggcatgcgcgaggaacatgttcaacaagtacctgccagctggaatgtgcacatcaacacgcccaatccgctgccaggacgtgcgctgccttctgcagctgctctaccggtcactccttccaaatccaaagctacacagtgatctgatgaagacaccaccaaagccaccaagaaccggcattgatcctgccaagaagcttgacaccgatggggttcgcatcaccaggaggcagcaatggtattggtggccgttgagccatttccaggagcccttcaccttccttgacatcgtcttcagccatggcaaggtgcggatccctcagctggaggtcagcgatgccagcatccagctgctgcagaacctgatcgcgttcgagaaatgctaccagggcaccacgtcccatgtggccaactacgctgccttcatggacgctctgaattcggatcaccatgacacggaattgctgcgtaagaggagtatcttcgacgtccagttcacccctgcccagcctgagctctccctgagaaggcggtgcaagcaggacgtcgatccgtcgtcggagaactacctcagccggatgatggtggacgtagtcctgtacaaggaggcgagggccagcaggaagaagacgcagacgccgatatcggacaccgcgttcttcgcggtgctggctgtgacggcgtatgttttgctggccttctgttggtacatcgtttcttgatgatactatgaaagtggatggtggttttctaacttttgctgttgttacgttctgttggctgttaagcgggtcctttgctccttcacgaaacaagatagtaccaatgttgtgcgaaattgtggattgtcacgcatctgttgaagaggacttgattggaggtggagggacagagaatctgcacagtttcgctgtgttatctttgtaaacagaaagaggatgtttcagagatttcagtatggtgtagcctttgccaatctgactccacaatgggtcatttgggatcagtaaggtcctttggggaaagcaccagtggtgtatgatggatggtgtatgactccaaccattaaaatatttaaccttggtttctatagatattacatacatgtaaacatgctttcaataaaaaaaaaatagcaagtttaaggtgtg

SEQ ID NO: 11266 - DNA, 1388 bp, Oryza sativa
  ref <308>: DATABASE ACCESSION NUMBER: AK108614
  ref <309>: DATABASE ENTRY DATE: 2002-08-28
aagctttcgtctcggcagctcttggctccgcctcctatcctctcctcttcccctactctcctctcttctctctctccgcctccaccagtctccccctctccctctccaaaccctccatagctataggcagcagctgggggtgctggcggcgttgaggcattcttgaatccggcgtggtcgcttccccagatccatcttttttggatcgtttcttcgggcgatttggaggagcaaagaaagccctcccaaatcgcagaaaggagccgcctttgcgaagctcctgctgccttctctgctcgttgttcctggcctgggatcacatatccccgcaaggaaaaaaaaggagccgcctttgcatttattcttttggccccttgggagatcgccctcgtcaagatttggtgggaagtgggaacccaattcgctcgcggttctcacttctccttgtgtggaaaggcgccgctttggctcctgtttccccccaccgctcgctcccgcgccgctcctctccctatatatctatctctctgactatcttgttcacatacgcctgcgcgcctgcctaactttgttttacttcgatccatccaccggttttcggcatcccccgtctcggcatttgatcgttgcttagtcgcttgttgatttgacgcaggccagatcgctgtctggcgcttgttttattttgagttgttgcggtgtgtttgctgttcttggttggaggcatggctgcggcggcgaacggaggtggcgcggcgctgttcagcgaggaggagctgcgggacgtcagcggggtgcgccggtgcgaggatttcgtggaggtgacgtgcgggtgcaccagccaccgctacggcgacgccgtgggccgcctccgcgtctacgcttccggcgacctcgaggtcagctgcgagtgcacgcccgggtgtcgcgaaggtccgtgctcgccactgtgcatcatcagtacaccacgtcctttttgcttgcttgcttgtttgtctcgttgttcttgatttcatgtcagcgcgcgcgtcggtgcacgggtggtgtttgatctctttggttgtggcgtcttgctcccatgactggacctgcatgcaatgccggctcatgcgcctcgccgctgcctgcgcccagcgtcgcctgtttcttgtactttgtaccatgctcctgcccatgcattgctagtctggctcgcgggactgtcgatttcggcaattaaatcatccccttttctgcaatctgcatgttcatgatgtatctttttttttagacatgtccatgatgtatctgagcgtaatatcgcctgcatcttacctttggtttaggaccattaggttcctcttcttctgtggtacctaatgcacgtaagttgaattttgacattgtgt

SEQ ID NO: 11267 - DNA, 1384 bp, Oryza sativa
  ref <308>: DATABASE ACCESSION NUMBER: AK108615
  ref <309>: DATABASE ENTRY DATE: 2002-08-28
gactcccatggcgagggggaggcggcggcgccgtcgccagcgcaggaagagggcgtcgacgaagcagctcacggcggcggcgaccgtgcaggacgtccccgaccacgtcctcgagatgatcctcctccgcgtcgactcctcggcctgcctcgtccgcgccgcggcgtcgtgcaggcggtggcgccgcgtcgtcgcggacgccgcgttcctccactccttccgcacgctccacggcgcgcaccgcgtcgccggggtgtaccgcaccgtcgaccccgcctacgggcgcccgctgcccggcggcaacttcgtcttcgtcccgtccacgccgctcgccgccggtgacagctgttgcttcgccctcgacttcctcccttacggcggccgcaactcctgggagctgctcgactgccgcggcggcctcctcctcctctccaagaagcgaccacgattcggcggcgtggcgacgtcccgtcgattcaccgatctcgtcgtctgcgagccattgacgcgacggtaccaggtgatccgttgtccggccaacctaaagttcttcatgtgcctcggggtcttcttgctcgacgacgacgccgcgaccggcggcgtgtcgaatttcagggtcatcgccgtgctcttcgatcaccacaggtggctcgactaccgtggcatgccaatgtccatgatgttctcctcctccggctccggcggcgacggcacatggcaggtggtgcagtgggagaccatcgacgacgtcgatctacctcattggatcgaacacatcaccttcgtggggcgcgccaatggccgcatatactggggaatcgacaacgaagacggcgccacgctcgtcctcgacgagagcaccaccgaattcgccatcacgatgttcccggagaacgtctgggcgccctatgacaagtacaccttccgtgtcatcggcgacggcgacgacggtgctctgcgtgtcgtccgcgtgataaacaacgatctcaaggtcttcacgcagctcgccggcggcggcgagtgggtgctggagaagacggtgagcttgccggaggcgacacgtgggctgccggggcgcgaggagggactcttcttccagcacggcgaggcgatgatcgtcgcggcgagcgcggcgtacgtcctcgtgacgccgcgggagaaggcgtggatgttctccgtcgagctggacacgatggaggtggaacgcgagcacgacaggaattggtatcccgggccggcttatcagtacgagtcgttgccatggccacccgcattgcaggtttgcactgatggataataaacatgttgtaattatcagattattctgctcgagaaatcaatcaagctatatataatggtcagtcaccgtgcaaattattcggct

SEQ ID NO: 11268 - DNA, 1732 bp, Oryza sativa
  ref <308>: DATABASE ACCESSION NUMBER: AK108616
  ref <309>: DATABASE ENTRY DATE: 2002-08-28
cgggatcacagatcaggacattgagaagaacctggacaaaatgatgtctgagagggctttgttaaaggaacggtaccaagaggtgttggacaaacagcggcaagtagagaaccagctgcaggtgcagcttaaacagctccagcagcggagggaagaagagatgaagaaccaccaggagattcttaaagcaattcaggccgttacgatcaaacgggaagagacaaagaagaagatggagaaagagaagaaagaattcctgcagaaagagcaggatctgaaagcagaaatcgagaaactctgcgagaaaggcagaaggttgctgaaggagcaggaggagaaggaaaacaagattgcttctctgattgcagagcagtctgacgagaagcagctatgggagatggagctagataagctgaagaaccagcacaatgaaatcaacaggaacattctcgaggagacagaacgggcctggaaagcagagatcctgtccctggagagccgaaaggagctgctggtgttgaaactagaagaagcagagaaagaagcagagctgcacctcacctacctcaagtctgcaccaccaacactggagaccatgaggccaaagcaggagtgggagatgaggctgaacaggatacgaatgaccaaggaaagtgtccgagatcagttcaatgaccacattcagatggtgagaaatggaacgaagctgagcagcctcccacagatcccaaccccaacactgccacctccaccctcagaaacagatttcatgctgacggcattccagcccaacccatcccttactcccaggctcccgtttcccataggaccagttcctgttcccatggtcatgccaagcgctgatcctcgggcactctcctttcctctcctgaaccctgcaatctccagacccaaccagccttccccaccgctgcctgcatcccaaggaagaaacagccctgttgtggcatcgcttattggcacacacagtcctcacatgactcctgcagcctccatccctcctccaccaggcctgggaggagttaaggtcactccggagtttcacaggccacagccagcagataagctggagaaactgctggagaagttgttgactcgatttccacagtgcaacaaggcccagctcaccaacatcctgcagcagatcaagactgctcggaggacaatggcgggtctgactatggaggagctgaaccagctggtggcagccaagcttgcagagcagcaggagcgggcagcagctggggctcagcctctcagtcgaatcagggcacccatgttttctgctccactgcctcagatcagcacgccaatgttcctgcccccagcccaggtagcttaccctggaacagcatcacacaccccagctgcctgtaagctgtgtctcatgtgccagaagcttgtgcagcctagcgaccttcatcccatggcctgctcacatgtgctgcacaaggagtgcatcaaattttgggcacaaaccaacacaaatgacacttgccccttttgtccaagtctcaaatgacggctactcgaacaaagtggtcccacgggaggagttgctgtgaatagacaggatcagttctaagatttctacagttctatatttatacgaccatgtatacacatgtacatttttattatataggtaatgtgtgtatagaaagtctgtatacatacaaattcataaataaagtgtgtatattatgcagtg

SEQ ID NO: 11269 - DNA, 1447 bp, Oryza sativa
  ref <308>: DATABASE ACCESSION NUMBER: AK108617
  ref <309>: DATABASE ENTRY DATE: 2002-08-28
taacagataaacttcttgggccaggccttcgagcacgctccgctcctccgctgcttggtcaccgacccctcggaacgccgttcatctgagaaaggatggcggtcctggcggagatcgccggcgacgagtccccgccgccgcttcctccttccgaaggcggcgaagcttccggagccccgtccacgtcttctccctccgatgccgacggcggcggcaagccttcgccgcgcacgtcgaagcccggcaggaagcgcctcgtcctcaccgcctccgtcctcctctcgttcctcatcgggctgcccttgctgctcaagtccaccgagatccaccgctcgccgctgccgtccgacgcaatcgccgccctatcccgccgcctccactccaacccgccctcgttcccctgcggcctccatgcggtcttcctccgctccggccgcgacccctccgaggcctccgtcgcaaatcgcatcgagcgggaaatctccacccaactcgtcgatctccctgacgcttccaccgccggtaaaatctccgtgtcagtcaccgttgagtccgctggtggctgctctagtagcagcaaagtcgcctcgccttggcgatgtggtgctgtgactaccgcggacttggggcgcggcgatgaggtgtttgatgaattgcttgactcggcattgggtgatggaggcggggatgggatgagggtttacactgttgtcttcgtggacagtgacgatttgaagagaattgtcattgggaaacaccggcatgcttgggtggtcgggaaggttgatgaggctgaggttgtgtccatcattgggaaggtattcgtcaagtatttcatgaatggtggtgtcgaggagggcgaagcaagcactgtgaaaagagagttcatgccagttggatcagatggcaatatagttctttcatttagcctgctgaatgctgatccaagtgattgggtgtatgattgggagtttgaaaatattggtcaaaggatgttgactcctgttattgaggcgttacgaccgattgcgaacattaatatagagagtcaggttttgtaccacacaccaaaatcatcctattcttattctgatgataaacttggtggcaatgtccttagcgtgggagacattcctttctttgtatgtttctgaattcctctgtagaagtcatgtagccatgatggttgctgcatactacagttagctgctgttagtgtttatgacatttaactgttatagatgcactaattcaatatgcaatgaaattgataggttaattcaaatgagtggcacttggatacatccatttcagctacaggacgatcaaaagttcttcaatttgtggtgtatgttctttagaccagattggcatctttgtatttaatcttacagttcactcatcctgaacagataatggaaaaaaaagcagaataacctttcttttc

SEQ ID NO: 11270 - DNA, 1500 bp, Oryza sativa
  ref <308>: DATABASE ACCESSION NUMBER: AK108618
  ref <309>: DATABASE ENTRY DATE: 2002-08-28
gagcagcggcggagcagcgacgcggcggccatggagaggaccgcggcggaggcagcggctggggggaagggggcgtggagggacggcgccgtgacgtacctccacctcctcttctacatcgccatctccggcggccagatcttcttcaacaagtgggttttatcctcaaaagagatcaacttcccctatcctgtggcattaactctgctgcacatggttttctcatctgtagtgtgcttcgcaattacaaagatcttcaagattgtaaagattgaggagggaatgactaccgatatatatattagttcagtcattccaatcggagcaatgtttgcaatgacactctggctagggaacagtgcttacctctatatatctgttgcatttgcacagatgctgaaggcgataatgccagtagctgtgtttctccttggagctgcctttggccttgaagaaatgagttgtaaaatgcttgctatcatgtctgtcatcagtgttggggttattgtggcctctgttggtgaaattacaatcagctgggttggtgtggtttaccagatgggtggagttgtcgcagaagcccttagactgatcttcattgagatttttctgaagaaaaaaggtgttaggcttaatttgatttccatgatgtactatgttagcccttgcagtgctttgtgtctctttattccctggttgttcttagagaagcccaagatggatgaaagtgcctcatggaacttcccaccattcacattgttcttaaactgcctgtgcactttcatcctcaatatgtcagttttccttgtcatttccagaactagtgcactgacagctcgtgttacgggagttgtgagggattggtccgtggtgttgctgtcagctgctatctttgctgatacacagcttacctttataaatataattggctatgccatagcaatagcaggtgtggttgcatataacaatcgtaagctcaaaccgaaaccccaagggaatgagcagcagagtgctgacagcaaagccaacccaggaagcccgcaagatgttgagacatcgatctcgactaaagaagcttcatagcactgaaagctgtgaggttttgaacagatttttgaagaaggagaaatgagctctcgcttttcctttgagttggtcagctctccttggatacattttttgttctcttcctacttatcagcagggaagacattttgtacaacaatgcttaaagaagcgaagtgtatacgttagcgtaccgttttgttcgctcgaaaaagtcagagcacgccatacatatcaactaggttctgtagatgtattttgttgtcatttgaacttgctgtagcaatttatcaggttcttcacaaatatgcaacctgattcttatacaatgttttccttacctaggaggtcctgccaatggaggactgcctgtgtcaagtatgtgcaaaattttcaaagatcaatagtttgatatgtaacctccaaaaactactt

SEQ ID NO: 11271 - DNA, 714 bp, Oryza sativa
  ref <308>: DATABASE ACCESSION NUMBER: AK108619
  ref <309>: DATABASE ENTRY DATE: 2002-08-28
atggcatgggaggtggcgctggcggaggcggcggtcttggtggtggtggtggcggcggcatgggtggcggcggaggaggtggaatgggtggtggcgccggtggaggtttcggtggtggagctggcggaggtgctggtcaaggcggcagcggcggtctaggcggaggcggtggcggtggcctaggcggaggcggtggcgccggtggtggcttgggtggtggtgctggaggaggccttggccatggcggtggactaggtggcggactcgggcacggcggcggccttggtgggggcggcttcggcgtcggcgttggtgtcggcgttggcgttggttttggtggtggtgccggtgctggtggtggcgcgggtggcggcggacgttaagacatcgacgtggcgcacgcacggtctgctagtgtttaaacactcttttttcctaaaaattaaagaagcttatggtattcagtattagtgtgcaatcgtgtggtttgtctatgaattagggggtgtctaattggtggtgattattgctgtcctgtacttagggcgaactcaaaagttcttcgtctcgttgattggataaaactccaactacatgtaataataatctacgtaaaagagatgcaaagtctaataatagtaaaccgtactattcaagtgtaatattcggagtacagtttgggcattgtccatgctaaagtattcaatttgaggt

SEQ ID NO: 11272 - DNA, 1405 bp, Oryza sativa
  ref <308>: DATABASE ACCESSION NUMBER: AK108620
  ref <309>: DATABASE ENTRY DATE: 2002-08-28
acacgctggcaagcggcggcggcggcaagcccctcgtcacggccgtcaccaaggacggcgccaccaagctctacaccatcgccgtcaaggacggccaccccctcgccctcgacctctccggcgagctcgtctggtcgacctgcgacgcctcccactccaccgtcctcccctacgagcgcgagtgcgtggaggccaaccactacacgccgccgagctgctggatgcagtacggcggcgccggcggcgactaccgctacggcaacaaatgcacggcgcacccgtacaacggtgtcaccgggaggtgcgcgccgggggacctgacgcgcacggcgctcgccgcggacgccaccaacggcagcaacccgctctacccggtcaccttcccggccgtcgcctcctgcgcgccgggctccctcctcgcctcgctccccgccggcgccgtcggcgtcgccggtctcgggcgatccgacctcgcgctgcacgcgcaggtcgcggcgacgcagaacgtcgccaagaagttcgcgctctgcctcccgagcgtcgccgtcttcggcggcggcccgttcgtcctcatcttcccctactcgcggccggacatcatgcagaagctgtcctacaccgcgctccgccgcagcccggagctcgccggcggcaatggcggcgggtactacatcacggccaagagcatcgaggtgaaccaccaccaggtgccactacccaaccacggggcgccactcgtcgtccagctgagctccatggttccgtacaccgagctccgccccgacgtgtacggcccgttcgtcaaggcgtgggacgagatcctgcaatggccgaagaaggtggcgccgccggtggcgccgttcgagctgtgctacgagagccggacgatcggctcgaaccggctcggctacgccgtgccggacatcaacatcaacctcgaggacggcgcggcgtggtacatcttcggcggcaactcgctggtgcaggtggacgacgccacggcgtgcttcgcgttcgtcgagatgaggccggagaaggtcgggtacggcccggcggtggtgatcggcgggcaccagatggagcacaacctggtggtgttcgacgaggagaagcagcagctcggcttcagtggcctcctctttgggctccagaccacctgcagcaacttcaacttcactgtcgctgcctaatggtttacagttagtacatagttagtactaaaattgaataagagaaccatgtgtccactgtgatcggccctctagcaagaacttaagttatagaggtcatagattgttgtgagccatttacttgagttatggaggtcgtgctggtttgcatggatcaagattcattgcgatttttcctatcagataaaattcaatgcgatttcgtatttgctcat

SEQ ID NO: 11273 - DNA, 1399 bp, Oryza sativa
  ref <308>: DATABASE ACCESSION NUMBER: AK108621
  ref <309>: DATABASE ENTRY DATE: 2002-08-28
agcacttcctttcccctccctttcacccactgaatcactcgaagtcgtcgtctcgtccacggccctgctgcctcgtgcgctccggcagctttgccgggggtgggtgggggagcgcgcgccatggggagggcgccgtgttgcgacaagaaggggctcaagaaggggccgtggacgccggaggaggacaagctcctcgtcgactacatccaggccaacggccacggcagctggcgcctcctccccaagctcgcagggctgaaccggtgcggcaagagctgccggctgcggtggacgaactacctccggccggacatcaagcgcgggcccttcaccgccgaggagcagaagtccatcgtccagctccacggcatcgtcggcaacaagtggtccatgatcgcggcgcagctgcccggccggaccgacaacgagatcaagaactattggaacactcacctcaagaagcagctgcgccggatgggcctcgacgatccgccgcccgggccggcggcgggctgcccggcggcgcgtcacatggcgcagtgggagaccgcgcggctcgaggccgaggcgcgcctctccctcctctcctcctccggcgtcgcggcgacgacgacgatcaccgccgccaccaccaccacctccgcctcgtcgtcctccaccaccgcggggcccgtcgccgccgccgcgacgtcacccgcggacgtgttcctccgcctctggaactccagcatcggggactccttccgcaagctagccgtggtggcggcggggtcgtcgtccccttcgcgggcggacgtcacgaaggacgctgtgaagcaggaggaggaggcggcgccggccggggacgactcgtcggcggcgtccaacgaggtggaggcggcgaccatggcggtggacgagtaccagatgttcctcgacttcgccggcgaggagctgggcctgttccacggccggtacggcggcttctcgctcttcccgccggtcgacttgctcgaggcgtcgctggagacggcgttcaagtgacccgtacgtcgacgacgaccttgctcgccgcgcgccatgtacgacgtactacgtactccgcagccgcagcagcagcatcatgcctcgacgtaggagtatgtatataagcaagtgttctggggcgtccggacagtaggcgcgtccgtgtgaagggtaggacacacgtacgagacgtgggagaaaattttggggatcaattagggttctaaggataatctgtagcttggggtttaggcatggggggaacatcatggtgtgtattagtattacggccttttggatggcattctctggggggcaaggggcttaccggagatgctctaatacattcaatgatgttcgatctttcagtgttggatatggagctggttttatc

SEQ ID NO: 11274 - DNA, 1631 bp, Oryza sativa
  ref <308>: DATABASE ACCESSION NUMBER: AK108622
  ref <309>: DATABASE ENTRY DATE: 2002-08-28
ttgcctctctgctctgagtgtgactgtcaatctgtgagcttagctaggaccaaacgaaatcttctcccgtcggtgactgacaggtgggccccacctgccaaccggtcaagccaagagacaggtagacacacacacgacgcgatccccccaactctcccccgcttcaacggaaaaaaaaaggggtcgcgtctcctcgtctcgtcgcctcttcctccttccaattcatctcgtcctctctctcgtaactcgtaaagagatctcgtctcgcctcgggaatccaaccattgccggcgaagtagagatcgggagggcggcgccatgaacaggggcggcggcgtcggcgtcggcgatgagagcggaagcgactacgagagcggcggcggcatgcggaagccgctgctgatgcacacggggagctggtacaggatggggtcgcggcaggggagcctcaccggcgcggggacctcgtccatggccatcctacgcgagtcccacgtctccgccttcctctgcacgctcatcgtcgcgctcggccccatccagttcggattcacggggggcttctcctccccgacgcaggacgccatcatccgagacctcgacctcaccctctccgaggttgctgcccgcttcttcttcttcttcggttcttcccattaccccccccccccttttttttgtcccgaatctgaacgacgcgctgctgctgcagttctcggtgttcggatcgctgtccaacgtcggcgccatggttggggcgattgccagtggtcagatggccgagtacattgggcgcaaaggggtgagaattttttttctttttttgggtacacatcgtatgcagttattagttgcgctttcgtagggttaccagtctctttctaaaggacaataatggtggtctcggtcaacgtcacctgctgtgctgggagagttttatgtaattagtacaaataaaaaattattattttagtttttaagtaatacaaatgtgggcaaaacggatggaactttctggaaataaatgttgatcattcttcagtagattattgagctaccgaattgctaggatggctttttgggggtttgacattatgtctgttcatgagtttggtagttgcatacttctgtttcatacagatatgaacatatggtactcaagaaatcggtatagacgaaaatgtatggatgaagtatttttcatgctcgtgttctggcatgacttacagtagataaacatactttagggtaattttatttaatgtcctgtttttggcatggttgcagtagtcagttgtacttcaatggtctactcttttaagctaactgaattgtttggtgaattttccagtcattgatgattgctgcaattccaaacatcattggttggcttgccatctcctttgcaaaagtatggcattacatggttcagaatcttactttcaccaccttgttgctttatacaatttaagctcgatgcctttgctttataggactcatcgtttctttatatgggacgattgctcgaggggtttggtgttggtgtcatctcttatacggtttgtatgagaaaacttccttcctcccttttttatgcgcacttatagtttgagtacttaacttctttgttc

SEQ ID NO: 11275 - DNA, 1258 bp, Oryza sativa
  ref <308>: DATABASE ACCESSION NUMBER: AK108623
  ref <309>: DATABASE ENTRY DATE: 2002-08-28
caattcatacagaattcttcctgcatcaacgatcatccctgccttacacagtagcttggctagcaggctgtagttcctgttcactgagcgcctgtccctggtgctcatagcactgacatatctgcaagcatcatctattcttccagcgtataagtaccccttgatgaaggctgtgtgaatcgtaatcctcggtgtcaatttctccaagaacatctgatcaagaatccgcatggctgaatccatcctccccgctttgcacgcatggtatgctagaatctcgtaggtcagcgagttcgggatgtcgttgtgttcagacctctccatggcctcaacaagctcacaagcttctgcaaccctgccgttcttcagcaggcacccgaggaggtagttccaggagttagaattcgggccgaagcccgacctcctcatttcgtcgaacacctcgcgggcgccatggaagtccccagttttgcacttcacggcgatgagggcgttgtagtaacgtgcccccctcgccgtctcctggatcacagacatcgccgcgtcgaactcaccgatcgaagctagcgccttgacgagcgagaacacgccggacgcacggcaagggcccccgacttcatccagcgtcgctagaatcgctatcgccgtatccctggcgctgccctgggacgtgttcaagaaggcgaacgcccgttcggtcaggggaacccgccgcgtagacatgctctccatggcgcgggacatggcccgatagtccgcgaggctgccggcattctcgacgagcaggttgtgggcgtgggcgctcggggagaagcccctgcggagcgcgagccagtcgaagaagcgggccgcggggaggccgcggtcggtgagcgcgcggagggtggccgacacgatggggtgggagagggcggggtcgaggcggtcaaggtcggcctcgaggctcctgccgccggccgcgacgaggcgaacgatcgcatctgagaccgcggcggcggcgggggcggcggcggaggcaacgctgctggtgcggggattggcgggtttggaggagaaggttgcgcggggagaggcgaggcggaggcggaggaagacggcggcggcgcggtggagcggcgggaggcggaacatagagaaggagagtggagagtggacacgaacgcagctctaccgccgcgcacgagaaatagcgaaggtcacgcgcatgagctgagccctctcgcatgtcagtgtcacaaaggtgtgtactccctccgtt

SEQ ID NO: 11276 - DNA, 1395 bp, Oryza sativa
  ref <308>: DATABASE ACCESSION NUMBER: AK108624
  ref <309>: DATABASE ENTRY DATE: 2002-08-28
ccgcctcgccatttcttcgagcaggtgaggcgcacgcgcacttcgccgctccgctgcacccccacgatggcctcctccctcgccgcgcgccgcctcctctcccgctccgccgccgccgcgtcccgccgcctcgtcccctgcgcctcgtccgcgaccccgcgcgctgcccccgctgctctgcgccgcttcttctctgcggaagcctcgacgccgccaccgacgccgccgacgccaccactcccgccgccgcctctggagcccaccgtcgagccgcccaagtcggagggcgcctcctcctcttccgcctcgtcttccgccggcgccggaggagcccatcggtcggcgccgggggcctcggcgggggctcgccgcgccggcggcacgggctacgaggaggagcaggagaaagtgctccgcgcgtcgctgctccacgtgccaaggatggggtggagcgagtcagccatgatcgccggggcgagggacgtgggcgtgtcgccggccatcgtcggtgctttcccgaggaaggaggctgcgctcgttgagtttttcatggatgactgccttcaacaactcattgatcgcattgatgctggagagggagagctgttgaagaacttggtactgagtgagagactttccaaacttgtccgaatgaggctggaaatgcagggaccttatatatcaaagtggcctcaagctctcagtatccaatcccaaccagcaaacatttcaacaagtttaaagcagagagctgtccttgttgatgagatttggcatgctgctggagatgctggatcagatattgattggtatgtgaagcgtactgtgcttggtggtatctactctacctcagaggtgtatatgttaactgacaattctccagatttccgcgatacatggacatttgtgagccgccgtatcaaggatgctcttgatcttcagaaaacttttcaggaggccgcgtatctagcagaagccgtcggtgcaggcatggggggctccctacagggtgtcctgaacagacttttcaagaaatgaagtgcataagcgtgcgtttgatacttttcattctcgacatttccaatatatatcgctttttcgattcagctgttagtgcattccaagttaaataaagcaaactggattttgatcacgatttgcctacgctggtagtgatgatgtacataatagcatgtttttttacgatgaaatatcgtcaggacccacatgcgcacaaagatgaggttgctagatctacttaacacttgagttgttttcttttcatgattacctgtgaaccgaaaaatgttcaacttgtggttatgtaatgtcccacttcaggtagcgttggtttcgtcttccaattagaaataatgtcagtggttggttttggat

SEQ ID NO: 11277 - DNA, 2259 bp, Oryza sativa
  ref <308>: DATABASE ACCESSION NUMBER: AK108625
  ref <309>: DATABASE ENTRY DATE: 2002-08-28
aaaagctttgtctgatgacggatcatcattcaattcgtagctccgatccatcgtcttcttcccggcgacgacccagccatgaacaacacaatgtccttgctgcttctacttcttggcctcagcatccttgcaatgaattctaccgctgctaccaccgataatggccagttcatctacaccgggttcgccggcgccaacctcaccctcgacggcgtagccacggtcactccggcaggccttctccagctcaccaatggcaccagcgcgctcaaagcccacgcgttccaccctgatcctttgcacttccgcgaccttccggtcgccggtggtggtggcagcggcaatggcaatggcaacgatgtgcactccttctccgtctccttcgtcttcgccatcctctccatctaccccaacctgagctcccatggcatggccttcttcgtctccccgaccaagaacctctccgcagcagcgccgaggagctacctgggcctcttcagcaacaagactgatggcgatgtggccaaccacatcttcgtcgtcgagctcgacaccatccagaacaccggcttcatggacatcaacaacaaccatgtcggcgtcgacatcaacagcatccgctccgtgagatcctaccccactggctactacgacgatggcgacaacggtaacctcaagaacttgacattgaacagccatgagccgatgagaatctggatcgattacgaccaagaaaccacacggatcgacgtgactgttgctccgcttgagatatcaaaacccaaaaggccccttggctcagtgatctacaatctttctacagttttaactgattctgcatatgttggcttctcatcatcatcaggtgacattgactcacagtactatgtgcttggctggagctttgccatcaatggagctgctccggccatcgacataagcaagctgcccaagctacccagagaaggcccaaagagttcatccaaagtaatggagatcaccctgccgatagccactgcgatgttcgttcttgttattggcgtgatcgttcttcacttgttgcgaaggcagttgagatatgctgagctgcgggaagattgggaggtcgagtttggtccacatagattctcttacaaggatttgttcgatgcgacgcaaggtttcaagaacaagtacctacttggttcaggggggtttgggagtgtgtatagaggagtgctaaaatcttcaagatagaggttgcagtgaaaaggatatctcatgaatcaaggcagggtatcaaggagttcattgcagaggttgttagcattggccgtcttaggcatcgtaacctagtgcaactacttggatactgtcggcgaaaaggcaaacttcttttggtttatacatgccgaatggtagccttgacaagtatctgcatggacaagaagataaaaacaccttagattgggctcacaggttccatatcatcaagggaatagcattaggagtgctttaccttcatgaggagtgggatcaagtcgtcgtccaccgagatatcaaggcaagtaatgtgctccttgatagtgatatgaatggacggctaggagatttcggcctagcaaagttgtatgaccatggcgtcaacccacagactacacatgtcgtcggtaccatgggctacctagcacctgagctagcgcgcacaggtaaaacatcccctcttactgacgtatttgcatttggcgcgttccttctagaggtcacttgtggacgaagacccgtggagcataacaggcaagataaccgggtaatgctagttgaccgggtgctcgagcattggcacaaggggttactgacaaaggcggtagacgaaaggttacaaggcgagtttgacaccgacgaggcatgcttggtgctgaagctagggctgctatgctcacacccggtccctcaagcaaggcctagcatgaggcaagccatgcaatacctcgacggagacatgaagatgccggagctgataccggcaaacctaagcttcggcatgcaggccatgatgtccaatgaagggttcgattcgtacatgatgtcgtacccatcgtcatcgatggtgagccatggcacattcatgtcaggactctcaggaggaaggtgatagctagctggcatgaaggggacggtatgtgatcgatggcgattgataatacccggtaaactactcaatttgctagctagaagtatatatgtacattacttatgtgatcatatatgctgttattt

SEQ ID NO: 11278 - DNA, 1422 bp, Oryza sativa
  ref <308>: DATABASE ACCESSION NUMBER: AK108626
  ref <309>: DATABASE ENTRY DATE: 2002-08-28
cttccccaactgggtgatgctggagcgattcgtcttccgcagggacgacgacaccagggctacagtactgagggcatccggttccggatcccacgggacccccttcaccatcgccttccgcatcgccgaccctccggcgatctcccgcctgtacgtgcggtggccgcagggcccggacccggaggagatggtggcgtgccccctcgtcgccacccaccgcaacctcgtcctcgtctgcttctgctacatcgtcgagtccccctccggcccggcttgcccgcaggactacttcatcttcaccgcgtccggctccggcgacggcgacgtcgaccaccacccagttccctcgccgctactcaaggccctccccccatgtacctaccatgatgagggcgacggcaacgacctatccatgcggtatccgttggagttccggtccgtcggcatcctgtgccgaggcgaagagttcgccgtcgccgagctgcaggtcctcagaaccgccagtggcagagtcaaagccaggctgtgcgtgctccgctcggccatatcctcctccaaagacgaagatgaagcagaagatggagatcatggaggcggcggccggcggccgtgggatatcatggagctgccgatcgtgtacgacggcgacgaggagcgctgcgacatcttctactggaccaccgacgccgtgatcgccttccaagaccacctctgctgggtggactacgaccgaggcatgctcctctgcgacgtgctgcggacaagccctagagtcgccttcctccggtttcctctggacagctcgatcatccctaccggcagacgatctcgccgcaatttctcccaggtgtaccgcggcgtgtccgtcaccaccgccgccaccggcggcgccgccctcaagttcgccgacgtcagccggcacgacggcaagctcctgggctccctagaacaaggacgaggaggctacaccatcacctgccacactctgaggtcgacgttaggggcggccgccattgatgacgagtggagctggagcaaagacttcgcgatcgcgtccgacgagattcttcggtccttcgagggcgcccccgagctcgagcctcgtgaggttctcctgttccctaccgtgagcatggacacgccgagcgtcatgcacttcctcacctgcgactacgaccgcatgatcaggaagatgtcggtggtgaccattgacatagccagcaagatagtgttgtcggttgttccatatgttaacggggaggaggacctttccggtgaggatgccgacatggtcagggcgaagtcgggctatccccagtccttcctcccctcagagttttccaagtacttcaattcaatctaagggtgtgtttagttcacgtcaaaattgaaagtttgattgaaattggaatgatgtgacgg

SEQ ID NO: 11279 - DNA, 1807 bp, Oryza sativa
  ref <308>: DATABASE ACCESSION NUMBER: AK108627
  ref <309>: DATABASE ENTRY DATE: 2002-08-28
tgctgctgcattcgtcctcctcctccaagaactgcagtttggtttatattccatcaagtattcagacagttcccccttatctgtgaggtacagtgtatatacagtgagcggaatcaatcaaatttacaatctggcttccttaccagaacaaatcatctacaccaactgaagttgacggggacgaatcttcgtcctcctcctcctccatctctggctcaggctccatgccaaactctggagactcaatgtcagcaaggttcttcaggtcaaccacagagagctcatcaagctgcttcaccacaaggtccgcggcattaagctcgtagatcgggtgcttgcttgcaacagccacacacttcattctggcatcatgtgcagcctccactgctgaattggagttaccaaaaacgatgcacctctcagggatgaaactcaggagctgcgctgcatagagaaacatttcagggtcaggcttcccccggtacacatcctctgctgccacaactgcatcaaagaagcttcgcacgccaacagcgtcaattgcttcttcgataaccttccttggccgcgtggtggccacggcaagagggatcttatagttggcaagcgtgctcataaactccctcgaaccattcctcatttgataaaaggcagttccacgtaggttgcagcgtatctcctctttccgtgaggacaatctccttaactcagatgggtcccgagaccagcagagaacctcagatatcgcttgctcgcttttcattccttcaatcctcttcaatacaaacgccaggggtggagacttgccctcttcttgcgcgagggtaaaccatgcctgcctttccaattcagcgtcatcctcaacaatcacgccttcccactcaaagatcactccgagccaaccacagcccatgcgctcaagccggagcagcgggttgtgcagcttgggatcatcggccctgttccgtggaggccacgtcgttttgggattggtgatcccaatatcgcccatgtcagcgccttcccccgggatcccccggtactccctgtgagggctggcctccttggtgacccccatggcgagcgccttgacggtccagtccgcgaggcgaggttgatgctgcctgggcgccctggccacaaggcggcgaccggcgaagtgagtgggcagggggcggcaggagacgacatggagagtccggcggaggtggtggtttgccttggacctttggtcgaacaggtggtgggcaacgagggaggtgctggcgctgaccgtatcaaccaccatcatggctggatccgacgcctcgcccccacctagcgctcaagaattaacctcggtccgggaaccaaaattgttggagaggcctagccaatcaatcaatcgatcaatcaatgaatcgaaggggtggtttccttgatccaagctgcaagaaattaaatcgcacgttgagaagattgcacgataacgcaaagaatcaaaaggccctagggatcgtcctaatcacggaaagaaatcggaaaggttgaatcgaatttgattcgacgggcgtctggaacagtagaggtccgattggagggggagagaaggagaggataaggtacctgaggagggaggcggcggcgactggtcgggatcggagtcgaacggcgaccggaggaggaggaggagatttcttcgggaagccgcctaccgtgccccgcctctcgtgtctagcttcttctcgctccgcccttcctaatttctttcctttgtttttgtagaaataaataaatgaaataaaaattttgtgctattatttttatc

SEQ ID NO: 11280 - DNA, 1511 bp, Oryza sativa
  ref <308>: DATABASE ACCESSION NUMBER: AK108628
  ref <309>: DATABASE ENTRY DATE: 2002-08-28
aagttgtgatttgaggctttgagcaccatctgattccgtggttggcaatggagatggagctccagggagtcgagcacgtcgtcggactgaccgtggcgagttcgactgagggagatgacagtggcagccacggacgcggaccaaagcgtacccggcataagtggtgtcgacaaggtcatccgtttgcacgccaatctagatccacgagaagaaacgaggccacgcctcccggccgggccccatccgcacattgtggcggcgcgctccagggctccagcgacgaacgccgtggcccgcagccgcgcgcaatggtcacctctcggtttgatttgccccattgtggggggcgatcgcggatcacccgcccgcaccaccggaccggaggcggcgcccctctacgtcatcctccgcccctctggtgcgttgctaacctacaggcccggggacggcgagggcgtcctcacggagtcacggccaccctctcgagggctcgactccccctgatcaggaaatctgatggcacgggttttgtggtgttgatctgagaaggatgccagcagtataaggcagtcacaatggttcatgttattggcacaccaatgcatgcccagttggtggcttggagctggaatgaatatgacgcatgtttacctggtgctcctgtaaccaaaaatcacagttcctggctcttttgcggcagtggctgtgtgatatataaagagtgctgcacagactgatagttgacaattgattggcacgaaagtggagaggaagataaatacaatggttgtccacaatacttctttctaatggtatatatctgctgattacatctgttgattacatgttctagattagcttatcacatgctcagataagttggtttttgtttatcccaatacagagaacatttttttgaatttattattgcctggaatattagtgtttgggaacgtaagctgcctcaagagtcaagatagttttagtggtttcatgttttgtctctgcacttaaactgcagaattactatgttatccagttatcctcttcataagcatagggtaaactaggaaacccggttaaagctacaagtctttgtccaaaaccacctacatattgtgatacactatagattccattgaaactatatatatacaaggggaagtatatatacaaggggaagtacttacatgttttaaagtttaatggatcatttgctctggtatataacttattatgatggctacatatttcttccttcgaatgtatatcatatgtttgcttttctcctatttgctgcaccactattgatggttttaccagatgaaaataattatgcactgtgccttctactgagacaaaagaacctccgggaacagaaaccgaagatttgcactagaaatactcattggcagatatgttccagataagtggttttttgaagcatttaatatgctacgtctgtagaggccccaaatcatgaatacttaggagaatggagataaaggctg

SEQ ID NO: 11281 - DNA, 622 bp, Oryza sativa
  ref <308>: DATABASE ACCESSION NUMBER: AK108629
  ref <309>: DATABASE ENTRY DATE: 2002-08-28
atcttccactcagtcactctccgtcctctcctgtcgacggcggcttgcaggcttgcagcggctgctcaaggaggcagcagcagccgcgacggcggttgatcccgaaggcggtggctatgacctgcagtggcggcagctgctcccgaaggtggtggctgcgacctgctgcggcaacggtggcggcggcggtggtgactctcgaagacaacggatccaccaatctcggccccaagcgacgactgtgacaggtggcggcggcagctattggtgttgcaagcggtgggcggcggtgcttgttctgtcagtattctttttcttgtgctcgagccaaccttgtgttgtttcttggttcagagatgggttggtggcttggctgctcatgaattgtttcttcttggtttgttggtggcttggctgctcatgaattgtttcttcttggtttggttggttgcagtagcctcagggtgaggagtatggaggttcttgaattgttttttttgttcaagttcaggaattcacgggggaggaattcatgggcatgttcctcctgtaatttagcaagatggttgaggaagtggtgaggatttgatcctactgattatcaagcaattcctctctccct

SEQ ID NO: 11282 - DNA, 1915 bp, Oryza sativa
  ref <308>: DATABASE ACCESSION NUMBER: AK108630
  ref <309>: DATABASE ENTRY DATE: 2002-08-28
cctctctttgatcgatcgatatcgataggcagcagaaggggagaaaaggaaaccgatctcggtcatggccacgcccaccactttggtcgccgcctccagccatcgccgtcgtcgccggcgtggatccacaccggcacaggcacaggcacaggcaccggcaccggagggggtgccggggtggatccttctgaacagcggtgcccacatcggcagccgctccaacgccaccaccgccgtcggtgaggcgagggacaagctgacgatagaggtgtccttgtggccggcgcagccgccgcacccctccgacgtgttcgtgtgttgcccgggcgtccgccacccccgcgaatccgagatcctcttcacggcccaagatctgctgctgctgcgtgtcccggtcgccgccggggctgcgccgagcctcatcagcttcacggagtgcgattacctcatctaccgtgccgccgccggcgaccgtcgtccgtcgctcacgctgctcccgaatccaaagcccaactacttccacgacggggatgtcggcatccttccccgaggcgggggcgagtacacggtcgcggccctggttgctagacgacgccgggggcaggtggaccaccaagacggtgtggatggacgacccgcggaggcctccccctgtggagatccccatcaacgcaaggcggctcaaccaccacatcaccaccaccaccatcacgctcggcggcgagctggccggtgccatgggctgggtcgatctctggaccggcatcctaatctacgatctcctccatgacgacaaggaccaagaccggccaacgctccggcacatgccgctgccgctgccgatgcacgccatcaccggcaaccacgggatgggcgacaagctagccttaggctgcccacgctctctccgtggcattgcctctgtcacgaggcgcggcaaggcctgcctcaagctcgccggcgtgcatgtcaccggagagcgcctcccctacaacgacgctgaaacccagctgccggcgttcgccgtcgacgactggactgtcacgacatggagcaatgacaagatgaagggctactttgaggactggcaggaggatttcacgattcgcggttccgaggtcaggattagcaacgccatgcgctcggatctgctgagatctgggttgctgtaccgtaaaccgtcacgaggggatggcgatgaggctacggtggaggagctggctttgcacaatctctgggtgtctcatcccacccccagcctagatggtgaagaagatgtcatctacctgctggccaagccaaagtgcttccaccccaaggcgtgggttcttgctctcgacacgaggagcagcacgctgctaggcgtggttgagtttggcactgaaaccgcaccatctgcaggtgtcacgtatcgccccagtactatatccaagtacatgagtctggtgacttctccagtgactgggagaacttaaaggatgctgctgctaatcactgaatcaagatggtactgctggcctgtttggaggcgatgcatcgaagattaagactgaatgatgttgttacacatatactccctccgtttcataatacaagactttctagcattgctcatatttatatatatgttaataaatctagacacatatttgtatagatttactaacatctatatgaatatggacaatactaaaaagacttgcattataaaacggaggaagtatatgtttacaggggtcttggcaattttgcattcgggtgcaagaaacgtgtttgtttccctgcgctggtggttaggagtatttatgtaaatttctctagttggaacaaacagccagtagcttgtcgatctgttactaacttacgatgaagcatcatcattatcatctcataaaaacttgtaatgggattttat

SEQ ID NO: 11283 - DNA, 1314 bp, Oryza sativa
  ref <308>: DATABASE ACCESSION NUMBER: AK108631
  ref <309>: DATABASE ENTRY DATE: 2002-08-28
ctcaaatggcaggggaggcgatattattctccgacgatatcatcgccaacatcctcgcctggcttcctccaaagaatgccgctcgtatgcggctcgtctgcaagcaatggcatgccgtgacatcggagcaccatttcatgcacacaaacttctcgaggagcagagacggccactccgttgccggcttcttcctcagcaacgagctccacaagaagttcagctacaatcctctacgcgacagtagcgccacgcatcccgctgctcccgacctctcgttcgtcccggagagcggctccaccgtcccgcgcaagatcaacgtcaccagctcgtgcaacgggctgctcctctgccgccggccgatggatagcagcgtcgcctccggggcgcgctggtgctgctactacgtctgcaacccggccaccaagaggttcgtcgagatacccacgccgccggacggccgcgggcgccacctgaacctggcttacgacccgtccaggtcgccggtgtacaaggtcgtcgcgctggggctcgccggcgtccacgtgtactcctcccaggctcggtcatggagggcggcgctccgttacgagcgcggcagcaacccgttcgcggggatccaccactcccggggcgtgcactggaacggctcgctggtgtgggtgacatcgcgctcgcgctccctgctccgcttcgccgtcgacgacggggaaggagagctgagcagcctgccgatgccgccggcgaggcatctgcagccggagaatcgctggatctgcggttacctcggggtcggggagtcagctggtgccggccggggccacctccggatgatcggctacacggaggaggagaagctcgccgcccgcttcgacgtggtggggatggcgggagactgccgcgagtggcgcgtgctgtaccgcgtcgacctcacgcgcatgaaggagttgtacccggatatacagcggaaaacgcggaagcaccacctgatctggccgcgccgcgctaggctagtcgactgcctggatctctggccgctgcacgtcgccgagcacggtagcttgctgctcttcggaattccgggcaagatcatggcttacggcatggaggaccaggcgatttcggtggtctgggaagatgccgcgccgccacaacctcggttcttccgctacgcttggttcgacttttatccgtacaccgcaggcttgtttgccgtgtaacaagttcagttttgtttgagaagaaaagggccgtttttgggctctttgtttggtggatatcaggatggcaggatatacgtgacaaatacttacaact

SEQ ID NO: 11284 - DNA, 1531 bp, Oryza sativa
  ref <308>: DATABASE ACCESSION NUMBER: AK108632
  ref <309>: DATABASE ENTRY DATE: 2002-08-28
taaatgtcagttctgcgcagaaggtgctgcaagagatccgcactcagaccccgccagaaatgtttgatttatcaaaaattgtttgtgggacatacgttgatgcaaggttgatgattcttcgtggtgttaacgggtccgcgttatttttcaccagatcaaattctagagctgattcctgacgataatcagtgaagcttgtaaccaatattctttgggtgtacattctttgtatttctagctgtacattattcataactagcaaatgtaaataatagagtgtaagctaaatctgtcagtcatccttccgaatcaggagagaaatatgttgccgctttattatttgatcttggaaaatgagtaaatgacgaattgacgatgtctacagcagagtccagggtggaagcataaagagggttccaagttccaactctcaatcagaactcgagcatgcagacgaaggagatggccaagcgaaggcgcagtccactgctgtcaacctgtgatgcgtgcctcagccatcaaatcccggtcgccatgttttaaggctccagcttcgatgtcatcctctcttgcctcgtccttcggttcttcctgtaggcaagcgagcacggcggtgcttctcctcatttcagtatttcttgcagaaatttgggatcatgccatcggaaaaaaaagtgatttggaatatcatcatttcaattggagttagttaaaataccactctaaactagaccatctacgccggaaaaccatcgtcgacataattatcctttaggttgttcttcttcctccctccaacaccggaagagctagtccatggtcactgtgcattttggccaccaccagcttattgcctccttgcacatcgactaacctccactccctctatgtcacaactgtcgtgctctcctactttgcgtagggccacctgtcgctcccgcggtgctccaggacttctccttgagcttgcggaggcggttggcctcctcgagccagccttgtgccggtcgaaaaactcagagtccgacagtgacactaggtagaagttctcctagtcccatgccaacaacagcgatgacctaaccatcggttttcggaacgacgactacgcggggctggtgatgttggagtcggacatgatgtgcgacaccatgaggtaacaacggggcacgggattgccacaagagcaagcgggggaggtgggtgcttagggaataatgtcaggacaatgctatagacgagggtgctgatgacgacattgttgggatcaacacatattggtgagcgatgggcgaccttgcatgaagcggggagagcatgggtgtggatgtagtcagcgtgcatggaggcaagcagctaatgtcaaccatgacgcacgatgccagttggcgatctcttctggggactacctacattttgtggacaaattttcttcaaaaaaattaatagatgtaaatataatacaatcgtgattataacttgtatgtaaccttcaaaaatctctcggtaacatactattttcatgaaacag

SEQ ID NO: 11285 - DNA, 1492 bp, Oryza sativa
  ref <308>: DATABASE ACCESSION NUMBER: AK108633
  ref <309>: DATABASE ENTRY DATE: 2002-08-28
gcgacgcagtgacacacacacttggggcgcgcggacgatatggccatggacatggcgcggcggcggcgcgcgtcgggctcgtcgacttcgcgtgcctgaggccgccgccgcggctgcgcatcccggtggccgggctgctcgagcacttcaagctcatcggctgcttcgacgacggcagcgtggagttcatgaccaaggtgatcgaggcgagcggcatgggcaacgagacctacttcccgccgtcgctgcaccacatcccgccggcggcgacgcacggcgaggccatccgcgaggcgcacatgctcttcttcccggcgctcgacgacctcttcgccaagaccggcgtgccgccgtcgtccgtcggcgccgtcgtcgtcaactgcagcgggttctgcgccgcgccgtcgctgtccgccatcatcgccaaccgctacggcatgcccagcgacgtcaggacctgcaacctctccggcatgggctgcgccgcgggcgccatcggcgtcgacgtcgccgcgggcctcctccgcgcgcacgccgccatgtcctacgccgtcgtcgtcagcgccgagatcgtcaccgtcggctggtacagcggcaaggacaagagcaagctcctcctcaactgctacttccgcaccggctgctccgccgcgctcgtcaccaccaaacgcggcggcggcggcgtcaagtaccggctcgtcagcgtgacgcgcaccaaccagacggccaacgaccgaagctaccgctcggggtaccgcgacgaggacgacgagggcatcaccggcttcaccctcggccacggcgtcgggcgcatggtgagcgagctcctccgcgcgcacctcctcaccctcagcctgtccatcctgccatggcgcgagaagctccgctacgtcgccgcgctgctccgccaccgccgccacgacaagaaggccggctccggcggcggcatcccgatgccggacttcagggcggcggcggagcacttctgcctgccgtcgtcggggaggccgatgatctggaggctggggcaggggctggggctgggcgagggggagatggaggcggcgctgatggcgttccaccggttcgggaaccagtcggcggcgtcgctgtggtaccagctggcgtacatggaggcgaaggggagggtccggcgaggcgacacggtgtggcagctcgccgtcggcagcggcctcaaggcgaacagtttggtgtgggagcgcgtcgccgacgacgaccacttcgccacggagcgccacgggaggaccacgctgggcccatgggccgactgcatccacaagtaccccgtcactgaagggtagcacgcatgcatacacatggaagattagaaattaagttatggtttgttctaataataagccacgagtaagatttcatgtgtaatctcgtgtgtggtttcttatataatttagtgtttgaatatttccaccactttactggaaataaaggctatatatatatactttacctt

SEQ ID NO: 11286 - DNA, 1507 bp, Oryza sativa
  ref <308>: DATABASE ACCESSION NUMBER: AK108634
  ref <309>: DATABASE ENTRY DATE: 2002-08-28
taattttagttgtaaaccgagttctcctcacaattgcaactcatgtcgtcttggaaaacatgttcgcctcccgttcactgcatcctcgactgtttctccttttctcttctcccttttgcactgtgatatatggacttcgcctgtgttgagctgttctggtttttcagtactatctcgttatacttgatgactactctcactacgtatggacattcccactgcgtcgcaagtccgacgtcgtgcccacgctcctcaccttccatgcattcgttcgggcgcaattcggacggccgatcttggcgtttcagacggacaacggacgtgagttcgacaacaccatcttttgctcgttcctcgccgcacatggcattgtctcgccgcctcgtcacaacgtcttctccagcacatcatcaaccagctccgagttgagttcgcgatggacttaggtccggtgcacttctttctcggcatccaagtgcgccgcacggccgatggcttcttcctttcacaggagcagtacgccggcaacgtacttgatcgtgccagcctggcagactgtaagccggcgccgacacctgtcgacacgaaggccaaggtctccagtacgacagggcagccctacagtgatccgacgttctatcgtagcatcgtcggggcactccagtacctcactctcacacggccggatttgtcttacgctgtgcaacaggtttgccttcacatgcactcgccgcgggacgtgcactggacacttgtaaagcggatcctccgttatgttcgtggcacgacacacaaaggtctgcaactccggcgttcttctacaccatcgctcaccgcgtactccgatgcggactgggccggctgccccgacacacgccgctcgacgtccggcttctgcgtcttcttcggcgactctttggtgtcgtggtcctccaaacgacagtccatcgtgtctcgctccagtgccgaggctgagtaccggggtgtggcgaacgcggctgctgaatgttgttggctccatcaccttctcggcaaacttcacgtcaagctcgacaaagccatgcttgtgtactgcgacaacatctccgccgtttacctgtccaagaatccagttcatcatggtcgtgctaaacatgtggagctggatgtccacttcgtctgggaaaaggtggccgttggggacatccgcgtcgtgcacattccgactcgacaacagctcgccgatatcatgacgaagggattgcccacagcgctgtttgaagatttccgatccagtttgtgcatcgtcgacgacgcaccaactgcgggggggtgtcaagatggctgatcatgtagataaggataggctagattacagtttctttctgacttattcttccgctgtgctcagtctacgatccactttattaggattccgttggcactcttgagctgtaccggcatgtatatatgtaaactggatgagatcaatacacctgcgcgttgtatccaaactctttcagcacct

SEQ ID NO: 11287 - DNA, 1230 bp, Oryza sativa
  ref <308>: DATABASE ACCESSION NUMBER: AK108635
  ref <309>: DATABASE ENTRY DATE: 2002-08-28
tttacttttctcattattaaattcaagtcgaaagagagatagaaatggctctagcagcagcacgaccactaataaacgtctacgacgacaaaaaaggcgaggcgagcggcaccaaggtgctcctcccatcggtcttccgcgccccaatccgcccagacgtcgtctcgtacgttcacgatcaggtgatcaagaaccgtcgccacgcgttcgccgtcggagagttgtccggcatgaaagcctcagccgagtcgtggggtaccggtcgcgccgtcgcgcgtattccgcgtgtccgaggtggcggtactcaccgcagcggccagggtgccttcggcaacatgtgccgcggcggtcgtatgttcggcccaaccaagacctggcgccgctggcaccgaaaggtcaacatcaagcagcgacgatatgccgtcgtgtcggctatcgctgcctcgggcgtcccaggactcgtcttggccaagggacaccagatcgatgagaccccagaggtgccactcgtcttgaacgataaggtcgaggagttgaagaagaccaaggaggctgtcaagctcttgaagaagctcaaggcctggaaggatgtggagaaggtctatgctaccaagcgattccgcgctggtaagggtaagatgcgtaatcgacgacgcatcatgaagcgtggtcctcttgtcatctataacaaggataacggtctcaccaaggctttccgaaacattcctggcattacattgttgccagtggacaaactcaacttgttgaagatcgcgccaggtggtcacttgggccgattctgcatctggaccgagagcgccttcaagcgactcgacgacatctacggcacatacaagagcaagtcgaccgtcaagaacgacttcagcttgccacagccgaagatgaccaacagcgatttgggacgtatcttgcgatcggatgaggtgcaaggagtcctcaaggccaagagcttcgactctaagcgtcgcgtgctcaagcgcaacccgctcaagaacacccgaaccctagccaaattgaacccgtatgccatcacgcaaaagcgaattgcgctcaagcgagctggcaagcgagttcaaccgctaccggctaagaagactggtgccaagaaagccgccgtcgctaagaagaccaccgctgctaaaccagccaagaaataaacacattgtttattgataattataaataataaaaaaattttatcgaaatatt

SEQ ID NO: 11288 - DNA, 1848 bp, Oryza sativa
  ref <308>: DATABASE ACCESSION NUMBER: AK108636
  ref <309>: DATABASE ENTRY DATE: 2002-08-28
gaagcattctgaggcagagatcaaagaacaagaagtcaagattcaggtgtagcagcaagagccatggcaatgccggtgtgatctgcatcaatggcgcttcgggcatcggcaagacggagcttgcattggagtttgcgtaccgatactcgcaacgatacaagatggtgttgtggattggaggtgaggccaggtacttgaggcagaatatactgaatttgtcgatgtatttgggattggacatcagtgctgaggctgagaaggagaggggcaggatcaggagcttcgaggagcaagaacatgatgcatttcaaagggtgaagcgagaacttttcagggatgttccttaccttcttatcatcgacaacatcgacaatgagagggattggtgggaagggaaggaccttcatgacttcatacctaggaacactggagcaagccatgtcattgtgacaacacgactacccgttgtgatgaacattgaaccaatgcagcttctgcagctctcatttcctgaagctgtgatcctgatgaagaggaaaatgaaggaggactacccttccgaggaaattgaagttcttcgaaaattcgatgagcggttgggcggactgagctttggcttgtggattgtcagttctctgttgtccgagttgatgattgctccttctacgctgtttgaggctgttgaccagatatcgttgagcgataccatgctcgctcttggtgccaatgatgaaagcttatggcagaacaatttgttcctgattaaggtactagtcttctgctttgcattgatggacagggtgaaagggggtagccttgccttgagaatgatcactgctggttcatggttagctccagctcccatgtcatcaaccctactagctaccatggccagcaagctaccaacaaaagccaatagcattcagttgtggggtgaatccctcaagacggcattgttatgcggcacacactgcttcctagctccacaagcaaagaaggctgaggtggagtcatccctcttactagtaaaactcggcttggcacgaagaacaacgcatcacccgggcttctggatccagtttcacccaatcatgctgctgtttggcaagatcaggggtggtttggcacctgcaactgcagctgtatcaggtgtcataaggtctagaaacatatctgtgtactcagaccacatgtgggctagtgcgtttcttgtgttcggcttcaagtctgaaccacctgttgttcagctcaagccgggtgacatggtgctcttcatcaagaagatggcgctgcccctcgcaatccaagccttcatgacattctctcggtgtggttcagcattggagcttcttaaggtgtgcaccaacatcctcgaggacgcagagaagtcgctcgcatcgcggatacaggacttgaagcaggggccattgtgctggaagaagaagctgcagacgaacagccatgccgatgagttcatctggcaagaggtgacactgctcaaggcaacgctgctcgagacaagggcgaagctgctgatgcgaggcgggttattcgacagcggcgaggagctctgtagaacctgcatcagcatcaggactgtcatgcttgggcatgaccattcccagacactggctgctcaggagacattggcaaagctggttagatacaggagtaaaatctgaaacaatgcgaaaacctttcagacttcagagttgaatggtggtataattcacgacacattctgttgtgggatctaaagagtagcgagttttttgagatcatatgtaacttgactacattgatctgtacagttgtgctctttgtattccactactgattttgcagatg

SEQ ID NO: 11289 - DNA, 1957 bp, Oryza sativa
  ref <308>: DATABASE ACCESSION NUMBER: AK108637
  ref <309>: DATABASE ENTRY DATE: 2002-08-28
actagtcagacaaggccaagtacgcacccagcgacgggcttgccttcttcctgtcaccctatccgtcaaagatgtctccactcgacggcggtggattgctcggcgtcttcaccaacagcactggcatgaatccgtccgccgccgccccgatcgtcgcggtggagttcgacacgttccaaaatgagtgggaccagagcagcgaccacatcggcatcgacgtcaactccatcaactcgaccgcggtgaagttgctgtctgaccgcagcctctccaacgtcaccgagccgatggttgcgtcggtgagctacaacaacagcacaaggatgctggccgtcatgctgcagatggccccccaagatggcggcaagaggtacgagctcaacagcacggttgacctcaagagcttgctccccgcgcaggtggccatcggattctcggcggcgagcgggtggtccgaggagcggcaccaagtactcacctggtctttcaattcgacattggtggcgtctgaagaacggagagaaaacgcaacgcgaggtaggccggccgctgcggtgcttgcaggtgtcgttgtagcatccgtcgtcgtcgtcggggcctcgatctgtttgtttgtaatgatcaggcggcgtaggatatctcgccggcggacgagagaagagtacgagatgggcggctccgacgacttcgacatgaacgatgagttcgagcaaggcaccggtccgaggcgatttctgtacagccaactggccaccgcgacgaacgacttctccgaggacgggaagctcggggagggtggcttcgggtcggtgtacaggggcgtcttgagcgaaccggccggcgtccacgtcgccgtcaagaggatctccaagacctccaagcaggggaggaaggagtacgcctccgaggtgagcatcatcagccgcctccggcaccggaacctggtgcagctcgtcggctggtgccacggccgcggcgacttcctcctcgtctacgagctggtgcccaacggtagcctcgacgcgcacctctacggcggcggcgcgacgctgccgtggccgaccaggtacgagatcgcgctcgggctcggctcggcgctgctctacctgcactccggctacgagaagtgcgtggtgcacagggacatcaagcccagcaacatcatgctcgactccgccttcgccgccaagctcggcgacttcgggctggcgaagctcgtcgaccacggcgacgcctcgcagacgacggcggtcctggcggggacgatggggtacatggacccggagtacgcggcctccggcaaggcgagcaccgcgtccgacgtctacagcttcggcatcgtgctgctggagatgtgctgcgggaggaggcccgtgctgctccaagaacaatccatcaggtcccgcctcctcgagtgggtctgggacctccacggccgcggcgccatcctcgaggcggccgacgagcggctgcgcggcggcgagctcgagctcgacgcgaagcaggtggagtgcgtgatggtcgtggggctctggtgcgcgcacccggaccgcggcgtgcggccgtccatcaagcaggcgctcgccgcgctccagttcgaggctccgctgccggctcttcctccgacgatgcccgtgccgacgtactcctccttgccgagccttgcattgtactgcgacgcggcggcagctagctcgtcgtcatccagtgcagggttttcttcttccacgagtggcgagcgttcgtcgacgagctcctctgcagcaaccgccgagtcgtcgtggctacttaagcacaacaacaggggcagtgaaaaaatagtattaggcaacaattgattagatcatatctttagtttgatgccaccttgatgttgcttagctcttcgttgtttatgtgtattgttcttccttgggccgccgtgtcatttgtgatatgtacctcaattcatatctcc

SEQ ID NO: 11290 - DNA, 840 bp, Oryza sativa
  ref <308>: DATABASE ACCESSION NUMBER: AK108638
  ref <309>: DATABASE ENTRY DATE: 2002-08-28
taagtgacaccagatatatggttttatggttcgaggacgattttgtaactcatgacaagttgagataccttcgatggagtactttattttcctttcagtttccacccgagccaaactctcgctccaacggaaaatgccgtctgctcttcctcctcgccacacccaagctcccgcgccgccggccgccgcctccgcctccgcctgcctcctccgccgccggcgcggccgactccgtgtcagcctctgttactgcagagcctccacggagcctctcgtgttcgcctccccgagctctccgtcgctcctccgctcctccgttgccgtccccgtcccctcctccccgcgccacgcaaatcgggggccgggagacggcggcggcctcctggtagtcaccgtcgctgcgtccgcggtacggccccccttgctcccaaccctcacacatctcatatcgccttctcaatccagcgacatgacactggggtagcctccggtagcgatggcagcatgacggcgttgctgctttgaaggcgcaagattgatatgcgtaacgtggttttgaaagcgggttcttggccagcttttgcatctgtggatggatggatactctctcccccctgtgaagagtaaacagcgggtggaactgaaaacttatctgaatcgaaactcatgatatgcttttaagctgtcggttttgaatatgaattagaaactgaaatgccaatgaaacagcataatgtgataagggtttaaggttggtttttccactctatttgaatctattatttagtactagtatcacatgtctaccaaaaacaaaaaagttctccatttacattcttg

SEQ ID NO: 11291 - DNA, 632 bp, Oryza sativa
  ref <308>: DATABASE ACCESSION NUMBER: AK108639
  ref <309>: DATABASE ENTRY DATE: 2002-08-28
ggggtgggatctgaacatggcggcggtggtagctgctacggcgctgaagggccggggggcgagaaatgcccgcgtcctccgggggattctctcaggagccacagctaacaaggcttcccagaacaggacccgggcactgcaaagccagagctccccagagtgcaaggaggagcctgaacccctaccccctgagctggaatacattcccagaaagaggggcaagaaccccatgaaagctgtgggactagcctgggccatcggcttcccctgtggtatcctcctcttcatcctcaccaagcgggaagtggacaaggaccgtttgaagcagatgaaggctcggcagaacatgcgggcatccaacacgggcgagtatgagagtcagaggttcagggcctcctcccatcatgccccgtctcctgaagctgtgtccggggtgcagtcgtgaggaacactgcaaccctcccctagactgtggcctcccaactgtcaagtcctttggctttggccatgattctggtccttgcctctgaggcccaccagagggcgcatgaagcccaggctgctgccagccctacccttcccctccccagaaaccagccgaaggcaaataaagttactgagtgtttgagtgg

SEQ ID NO: 11292 - DNA, 1198 bp, Oryza sativa
  ref <308>: DATABASE ACCESSION NUMBER: AK108640
  ref <309>: DATABASE ENTRY DATE: 2002-08-28
gacctccaccgccgctaacttcccttcgtgcttgccgtcgcccgtcggcgtctagtagcagcaggaatcagcgccgccttttcgctccgaccactccggcgtcctccgtgagtccaccgcgacggcaagcggctccccgcgcggtacctcgtcctactcccgcatctccgccgcgccgccgccttctgcactgcaatccagccgccgcgccgctgcctaccggctacctccacgccagatcggtcgccacaatcagaccgatggtttagaccgaaccatcggtctttggttttctatcttaaagaatttcggtttcttggcggtcgcgattgcttcgtgaagaactgaagagtgaagacggtgaccccggttgatcagtcatcacattttggctacggtggattgcttacctgtttgacattatcataaacagttgaaggttcactaaaatcaaccaccactccagttgctctggtctgaaagaacataagtttcaaatagcaaacccgtgaagtgtataacagtacaactgtacaagtggatataagcattttatagtacaatgaagaggccaatacttgtgcaattgagcccagaaccattgtgagatcattgagcaccggaatttccagggcttcttccatgccacttatctagaagaacaatgccggcatttataaactgtaagagacaaagaacaagcagctattgcagcagggagacagcctaattacaagggaaatggcgcattgagtgaatggtgaatacctctcctgcatctaggcctatacactgagaatctatggcccctgcaagctccattccccttgctttacttactgccgctattgccgttcttccaatctcttttgtcgccccaatgataacaaccttttcaatataccaccagattttgccttcagaggaagttgcagtgctattagagaagaacattcataatgtcataacccacagtaccttgattgtgctctgagatggcggcatctgcgttgagcagaggacctttgctgcatttctcctgccaatctttccgaatgttctggtatgagcagagtggcataaagtagccatgattttgttctgaagactgagcttacatgaaagggaggttcaggtagttatgttctctctatttctgttcgcctgaccttgagctatcttatcctgttatgaacgc

SEQ ID NO: 11293 - DNA, 1532 bp, Oryza sativa
  ref <308>: DATABASE ACCESSION NUMBER: AK108641
  ref <309>: DATABASE ENTRY DATE: 2002-08-28
aatgagcatggaggctttggtgagcgatgaactcttggcgttttctcatggcatgacgccacaggcagcggcgaggccggtccagacctgctcgaacacctcgacgatgaggtcatggtactcgccggagttgagggagaggtagcaggcgaggaggtcctccaggtcgccggcgtcgcggatgccgttctcggcgatcatctcctccatggactcgaggaagtccctcctcgggtccgacgacgtcttcaccaccgcgaagctgtgcgcgagcggcggctgcgtcggcgtcgtcgtcgttgcccgcgccgtcggcttgcctttcctgcacgcggcgaggcgcgggctgttggtgcgcgtcttgaggcggcgtcgagacgacacggacgaacgcctcggcttgcccgtgctgatgctcttctccgaggaggcagaggcagagctcgctctcggtgtcatcagctcggcgaggtcgacgtgcttcacctccgccggctcgcaccagtcgagctccctcctcgcgggcctggtcacgacaggccggagcaccctctccggcgtgtcgtcgtcgtcgtcagcgccgaggtcgatgattatgtccgcgtccgacgtgatcaccttgacatcgacggcggcgtcctcctcaggaccatccaccgtcgtcgcccggcgccggaactccacgccccggccgccatctctcccgatgaacatgtcgcgacggcaccgggagctcccggacgcatcggccactggcggctcctggtggctgcagccgtcgtggtcgtcggacggcgctagtacgagctcgccgccatccatctccgtcgaaccaaatctcccaaccctgtgccgcctcctgctgttcctcgtcggcaacggcggcgacagcgtgagggaagggaattgatcatccacgcccctcggcggtggcggcggcggcagcggcgggacctccctgtcccgggtggtgtagtagtacgacgccctgtgcggcagcaacgacgacgacgacgacgacgtccccagcctccacgtgcccgcctgctgctgcgccgccctgctccccctcatcaacgacgacgacgacggcggctgcatcgcagttgcaccgcggccgccccgcgcgcgcatgtcgcggagcttgtagaaccacgcgttgggcatcatgtcggagagcctgaacttccgccggcccatgtcctccctcgctctcctctcgccggcgcggcggcggcgccgcctccgttcttcggcgctgtacgaggaggaggagtggaggagcagggagagatcgaatggggggccaggccagagcgcgaccacgccgtgacccgcgcgggataagtagcggcgggagagagcgtgcggagcgaggtttcgctgctctttttgttcctttcttgtctcgctgaacggtgggccataccgtccggtcagcacacctggttcgctggacaacatggggctcgcatggttttttgcagaaaaaggttaatacgggatgactacattgagtaggatcaccggat

SEQ ID NO: 11294 - DNA, 721 bp, Oryza sativa
  ref <308>: DATABASE ACCESSION NUMBER: AK108642
  ref <309>: DATABASE ENTRY DATE: 2002-08-28
ctcctccatattacaatcaagagaggaaaaaaaaacagagagagaaagatcaagagcatataatctatatatacacacaggcacgtcgcgagtaaatttcacaaaactacatagactacgtggatccgatactccgatcccgacccggccatgagaaggcaaggaggcaactgcgaggtcaactcctccatcgccctcctccaggagaggttcaggaacctgcagaaggtgagggagatgagggaggggagggagcagctgctgcagacgccgccgtcgccgacggcgacggcgacggcgatagccggtgcaactaccactggtgctgctgcgtcatcgtccggcggcgagcagccgaggtggttctcgcacccggagctggtccggccgtcgtcgaggccggcggcagcacagcgagccaccgccgacgacgatgctgccgccgttcgtcagccgccggcggtgagcgttggcagggcggcagccatggttttgcagagctcggggtgtaggagcgatgtggaggtggacacctcgcttcacttgtgaagaagtgaaaattaagtagatagctagtagtagctagatgcttatttagctcggccgaattaatcattttttcccccctttgatccttctagttcttgtttttctcttgatcgatcacatcttgtatgcgctcgtggatgctgtcgaatttgaattaatttggttctagttc

SEQ ID NO: 11295 - DNA, 1062 bp, Oryza sativa
  ref <308>: DATABASE ACCESSION NUMBER: AK108643
  ref <309>: DATABASE ENTRY DATE: 2002-08-28
atacatatgcattattatattaggtatagctaggtgatcgatcgatcgtgatcatgggaatggaagacgacgccgccgggcgcggcacgacggtgccgttccttgtggcggtgcggtttgtggtggccttagcggtgggcgcggtcaccttcgcggtgatcgtcatggtgatcgccatggtcagtcgcccggaggagattcagctctccatcgaccggggctacatcactgtgtatgatgactatggctcggaagtattaccgacagcgacgacgtcgctggcggcgattttaggagggtttgtccaaagccgccccagcacagcacaactcgccgtctccctaaccgcaagctactccagccagcgcgggcataaagacaagatcatcaactgctcagacatcaccatcggcctagtggacatgacgctgtcaccggcgtcgtgggcatccggccagatgccggcgaagatcaacgataccatcgtctggttcaaactcaacaacggcttcacgttgctcaaggatacgtcgcacacggaggcgatgacggtgaccatcacaaacagcagccagatcatggagtacatagagcaccggctcaaacaagaggacgtcttccacgtgttggtcatggtgcacatcatcaccccctcgactaatccgaattcgccttcgcctccgcctccgcctccgcctccgtctccggctccggctccggctccttctaatgctcagtctccttctaataatggtccggcacacacattctactgctggcccatcaccatcggctatggctacagtgccctgcaagacaccgacgatgtcggctgcaaaagcataggttcttccgttgtccctggcaaccaaaccaatagggctaacgcgacaagcgtgaccagtggcgaatctatgcctgtgcaaatcggtggataacaagtacgtacaaataattccatacaaaatgactcgagtaaaattgagaatcctcaagtacttgttttgcttttgtgtaaagcacggtaatcaaataataaatgaactactcctacacatgact

SEQ ID NO: 11296 - DNA, 1249 bp, Oryza sativa
  ref <308>: DATABASE ACCESSION NUMBER: AK108644
  ref <309>: DATABASE ENTRY DATE: 2002-08-28
cgggatcactataaaggcgagatggtgaaagtcggagtcaacggatttggccgtattggccgcctggtcaccagggctgccgtcctctctggcaaagtccaagtggtggccatcaatgatcccttcatcgatctgaactacatggtttacatgttcaaatatgattctacacacggacacttcaagggcactgtcaaggctgagaacgggaaacttgtgatcaatgggcacgccatcactatcttccaggagcgtgaccccagcaacatcaaatgggcagatgcaggtgctgagtatgttgtggagtccactggtgtcttcaccaccatggagaaggctggggctcatctgaagggtggtgctaagcgtgttatcatctcagctccctcagctgatgcccccatgtttgtgatgggtgtcaaccatgagaaatatgacaagtccctgaaaattgtcagcaatgcatcgtgcaccaccaactgcctggcacccttggccaaggtcatccatgacaactttggcattgtggagggtcttatgaccactgtccatgccatcacagccacacagaagacggtggatggcccctctgggaagctgtggagagatggcagaggtgctgcccagaacatcatcccagcgtccactggggctgctaaggctgtggggaaagtcatccctgagctgaatgggaagcttactggaatggctttccgtgtgccaacccccaatgtctctgttgttgacctgacctgccgtctggagaaaccagccaagtatgatgatatcaagagggtagtgaaggctgctgctgatgggcccctgaagggcatcctaggatacacagaggaccaggttgtctcctgtgacttcaatggtgacagccattcctccacctttgatgcgggtgctggcattgcactgaatgaccatttcgtcaagcttgtttcctggtatgacaatgagtttggatacagcaaccgtgttgtggacttgatggtccacatggcatccaaggagtgagccaggcacacagcccccctgctgcctagggaagcaggaccctttgttggagcccctgctcttcaccaccgctcagttctgcatcctgcagtgagaggccagttctgttcccttctgtctcccccactcctccaatttcttcctcagcctgggggaggtgggagaggctgatagaaactgatctgtttgtgtaccaccttacatcaataaaagtgttcaccatctg

SEQ ID NO: 11297 - DNA, 1080 bp, Oryza sativa
  ref <308>: DATABASE ACCESSION NUMBER: AK108645
  ref <309>: DATABASE ENTRY DATE: 2002-08-28
ctctctcgccatagccaaccttttccttgccactcttgcacactccacctcctattcccttcctctcttcttgttgccttcttggaggaagaaggccgacatggcgctctgcctcatgctgctcgccagcggcggccacggcgagcgcgcgccggacgccgaggcggtggcggcgaaggaggccaagttccggagccggcggccggcggacggcgccggcgccggggagttcgtgtacgagtgcaagacgtgcagcaagtgcttcccgtcgttccaggcgctcggcggccaccgcaccagccacaagaagcctcgcctggtcgcgccgccggcggccatggaaccggcagccgatgacaagatcaagccgaccatcccggagacagccgccgccgccgccgaggagaagccgcccaagccatcgccgccacgaccaccggcctcgaggccgatcgccaccgatccaacagtgctcgcgatcccggtgatcccgaagcaagaagtgctcgacgccaccaactccgccgccattgccagcgtctccaagcagccacgtgtccacgagtgctccatctgcggcgccgagttcgcctccggccaggcgctcggcggccacatgcggcggcaccgcccgctcataccggcgtcggcgtcgtccgcggtggtgtccgtgctcgacgccgtcgacgcgccgaggcagaaggagaagagcctcctcgagctggatctcaacatgccggcgccctgcgacgacgcgaccgccgagacgacgacgacgtcgtccgccgccacctcgccggcgttcgccttcgccgtcagcgacaggtcgccgctgctggtgccggcggcgctggtcggctgccattactagcagcacaagcgacagagagtaattaaacacaaaattcaattcaaattagatataattctctgttatttctcattgcttacacacttcacacacacacacacacatacatactctctcttgtgatctaaatatttttcttctttttcttcttcttcttcttttgccattctaattccatttgaatttgttcaaaagattggggaatttgg

SEQ ID NO: 11298 - DNA, 1564 bp, Oryza sativa
  ref <308>: DATABASE ACCESSION NUMBER: AK108646
  ref <309>: DATABASE ENTRY DATE: 2002-08-28
ttattatagtggtaaattgaaatgcgaggcgtggccgtggcacagaatctaggcgtggtagctagtgagtatagtatgcgacgagcaggcttttggagcagaggcgcagagcgttgcacgcatatgttcgagtacggcgacataaacagatgctaattcttggtggtcggggtgggtctcggggggagaagaaccaacgcggcgcacatgtgctcgtggggcggccgctggctgctcgtgttagatcctcctcgtggtcctgccgtccgtcccaacttcgtctgggcctctcgccaaccaagtgccattaaactagtacgcagtaccagcagctgcaagaagcccgggtgcacgttttcttttgcatccagagcagccaaggacgcaatggcagtaaaagataggtaaggtggggactctctccctttacttattatccttcttgatctacaggaactaagctaggcaaattccatggcgcttccgaagaaggcagacctgagatttccacatgccaaaaggttaggatgccaagtgccaataagactccaactccacgcttgattccgttcatcggctgtatggtcagctcgactgtcgatcgatcccgtcaaaattgttacctccctctcaagttacatataagtaaaaagttgttatgttttaagacaaatgtgataagtaaaagtttgagaagagaatctcgaaggaaaaagtatgaattacccccctgaattattgtggttgaccgaattatcccctgaacccgaaaaccagacatttttcaccctgaactttcaataccggacgatttacccccttcgacccaaaccagagcggttttgtcctacgtggcgcatgcgtggcaatccagtcagtattttctctttttttttaaatggtggggcccacctgtcatatataccctctcatctccttctccacaacacctctctctctctgcaagcaggggcagctcgcgacggcgggtggtcagcgcgcgcggaggcgggcagtcggcggcgcgcggcagcggagcccgacctggatagctacagcccaccacctgggatgctgaggcgtcggcagcgtgggacagagccagcggcaaggtggcggagctagtgatctgccccatctacgccaacctccccgccgagctgcaggccaagatcttcgagccagcgccggcgggcgcgcgcaaggtggtgctcgccaccaacatcgccgacgccgagacgccgtacaacccgcgcacagcgatggagtcgtttctcgtcgcgccggtgtccagggcgtcggcggagcagcgcgcctgccggtcgggtatccaggtccgagtagcagctgccgtagctaggtggctgggagggtgaaccggtccacgccgccgccgccgcctccgcatccagtgccgccgccgccgcctccgcaactgctgtgattgacgaaacgttgggtgtgctttatcgatcaaatcgtgtgttaatccccatttgcttcggctggaattgcaacttgaccaccaaggaaaatgagcatgaacgtttacttgttctggtcc

SEQ ID NO: 11299 - DNA, 1379 bp, Oryza sativa
  ref <308>: DATABASE ACCESSION NUMBER: AK108647
  ref <309>: DATABASE ENTRY DATE: 2002-08-28
aacacatcaaagggatccacagttcaaaagccatgttccatccttcttcttcctcgtcgccaccaacctacagtgactcctccatgcaccatgcactgagcttctcttcggctctgcccacagctccaactgaaattcctggcagcggcggcggtttcgtcgacgacaagggcagcatgttctctcttcccaatgttgcgggctcggcgccgcctccctcctactactcttccctcccttccttctacatccacaggagcaccagctcgcactccctccttcaccaccggttgtctgacctcctcaacagtaatgccgcattctcttactcgtctgctccagcttgccaattgcagcccctcccacctgtttcttcctccacttcatcatcctccggcgatctcttggagttcagctccgggaccctgcgccgtgtcttcagcaccggcgacctgcaggcgatgaatgtaccgccatcgccaccgccaccgccgccgttttcaggtgacatctgcatccaggaggtcggcggcccgttttcgcagaaggtgggccgttacagcgccgaggaacgcaaggagaggatcgagaggtaccgcgtcaagcgccaacagaggaacttccacaagaagatcacttatgcctgcaggaagacgctggcagatagcaggccaagggtgcagggccgcttcgcgaggaacgccgaaaccgaggccgatgccgaggccgatgcggtggccggcctggacaccgaggtgtacggcaatggctatggatactgcgcctacagcggcctcaccaacagtatcagcagcaattgctacgacaaccagagccagagccagtggtggggaacgccagctggcgcggccaattggcagcaccagcagcagaagcagcagcttggtttcgacgtcgccgtcgacggcgacgacgaggactacgagctgtgctgtgggccagcatcgctgacatgtgctcagggacctgaccctgagctgatctgacctgtccggccacacacgccggcagcagctgattggcgctgccaggtgcaaggaaggcggggggaggcaaccgagcggcggctgccgtggacagtgcggtggtcggagtggcgtcgctgaccttcttgtcgccgtagtgtaacttcgccttaaattagttatagaagctaagaaaagagaagggtaaaaaaagggaaaagaaatagaccctctcgtgaaccaagccaagaaaaaccagcttgttgtttttgtgtggtcaggattagcaatttagtaggcatttagtactactttgatatctttctccgatagaagtttggccatggttttgctttgtcacacctgaaatttgaagaaagtcttgagtgctgc

SEQ ID NO: 11300 - DNA, 1488 bp, Oryza sativa
  ref <308>: DATABASE ACCESSION NUMBER: AK108648
  ref <309>: DATABASE ENTRY DATE: 2002-08-28
agacacagcccgatgacaccgctgccgcgccaatgcctcctcgcacgctcctgtcgccgctatagcacatgctacggaagccgctacgcctcccaccacctacctgcaaatcgtgcgctagctgccgccgtgcgccttctctcatcgcaaatcacgtcatcccaccgcagatcgcagcctcccccgccagcgtcgaggtgagagcgcgcttcctgccgtcctactccgatgtgaaaaggatctgcttaccctcctacctggtgttgttcctcaatcttcgcggcagcgtcctcagtcgttgcttctctgccggccgcggtggcgcctgctcttccttcaatctctcggttcataacccatggttcagactcctcagcccaccgacaagccatccatctccaccaagaagatgaaggacgcttgatttggccgcctggctttgatttgcccgtcgatcatccgttgcagggtcaatcgtggatacaatactttttatctgaacaaatattggccttttgcttttttgtgtgttgattttcaatatgcatttgtgttttatcttcaaattatgtggcgaattgtaatccatgggaatctcttaaactgttgatagaattgctgatgctaattccctttgcgtgagttgcaggtgttcagcaaaatcctgcttaggtactgtctattgcaagcaatttgatccattgtgttctcctttcttcacgaattcagggtgcagtccagtttgctgacactaaacacttcaatgttgtacatagttcatactctttctctgcaggtggtcacttatttctacctttctctgtctactaaaatggatagcgccactggaagctccacaccaaatccagcggattgaacaggcctccagcgttgtttccagggcgaagtgatttatctgccactagcagtcttcgtttgtttcattccttgtgatgatctgtgcctgagaagtcctccacttctccctactattatgtcaggttgacattgtagacaacaactgaatattttgctaaaatcttgtcatggtttaccatggcatttcactgtttggtacactgtttttaagagctattactacagtatatattggaaccttgagaatactcgaccccttgctgcatatatacatcatgatgacgtccaattatgtgttgctcaaccctgaagagaaaaccgacaagataattgtgcaggtctacatgcttttgctaactgtgtgtttgataattagtcatgtcatggtataagtcatttctttggcacatataccagcagaaatgcaggtgttgctgctaagtaacatcaggggtgctagagcttggtcaagatgcctggtggcggagctgatgatttggaggcttggagcaaacatatagtgtgctgacgatgaccctgtatgcatgattcctatcgagtaaatttctccttcgacaaccttttattatcgatgtttcgctttgaacc

SEQ ID NO: 11301 - DNA, 1707 bp, Oryza sativa
  ref <308>: DATABASE ACCESSION NUMBER: AK108649
  ref <309>: DATABASE ENTRY DATE: 2002-08-28
ggggatcggctacttcgccaacaagttcgcgtcgccggacacctccggcgaggagctcccggcgtgccgcaacctctgctcggccaactgctcctgcctcggcttcttctacaggaactcctccaagtcttgcttcctgctgaactaccggatcggctccctcttccgcggcgacagcgacgccgccgtcggcttcatcaagacgttgccgccggcgtcgcgtcgccagggcggcggcaagggctcgtcgctcagctttataaccatagtgttcggcatcgcgctgccaaccgtggcggccgtgctcatcggcttcgtcgtgtacgtgatgtgggtgaagagccggcaggccagcaacaagaagaagaagaagaagcagggcggcagccgcagctggttcaagctgccgatgctgtcgtcgcagcaggcgtcgtatgcgagtgaggagcagcagggcgaagaagacgacggcgacggcgacgaggttctcatccccgggttgccggcgaggttcacgtacgcggagctggaggaggcgacggaggggttcaagtcgcagatcgggtcgggagggttcgggtgcgtgtacaggggcgagctcacagacccagagcggagcgcggtggtggcggtgaagcggatgaacaaccttgggtcgcaggggcgacgcgagttcctgacggagatggcggtgatcgggaacgcgcaccacgtgaacctcgtcaagctgcgcgggttctgcgccgagggcgcgcggcagctgctggtgtacgagtacatgaaccgcgggtcgctggaccagtgcctgttccgcgccgccgccgccccgctggagtggccggagcggatgggcgtgtgcgtgggcgcggcgcgcgggctggcgtacctgcacgccggctgcacccgcaagatcctccactgcgacgtcaagccggagaacatcctgctgaacgaccgcggcggagtcaagatcgccgacttcgggctggcgaagctgatgagcccggagcagtcggggctcttcaccaccatgcgcggcacccgcgggtacctggcgccggagtggctcaccaacgcgcccatcaccgacaaggccgacgtgtacagcttcggcatggtgctgctggagatcgtgcgcggcaggaagaactgcaggtcgggcaagggcagcggcggcgaggcttcgtcggactcggacggctacttcccggcgatggcgctagagctgcacgagcaagggcagtacgaggcggtggtggaccagcggctggaagggagggcggacgtggcgcaggtggagcgggtggtgcgcgtggcgctctgctgccttcacgaggacgcggcgctgcggccggccatgacgacggtgtccgccatgctcgacggcagcatggaggccggagttcccaggacggagctgctcgactacctgcgcttgtacggccgcggcctggtcgacgtccgctccggcctccatgctgcggggaaaggcggctccgacttcaccagcggcggcgccggcagcagcagctggtcgcccacgtcgtgcgtgtcggcgcagcagctgtcgggccccagatgacatgacacacacatttactactgttttttctttttcttgtgtgaatactactgtagattatacagaatattttccatgttgagctgctattgttgcaggcaaatcgctgcatatgattgatcgct

SEQ ID NO: 11302 - DNA, 1495 bp, Oryza sativa
  ref <308>: DATABASE ACCESSION NUMBER: AK108650
  ref <309>: DATABASE ENTRY DATE: 2002-08-28
gacgctacttcgtttcgcacgcgtgtgacgaccgcccatgccgccgccgttcctcctttcccggcctcgccagctcgccttgccctcgcattggttccgcagctcccacctctcccctgtcgttctttgtccgccgaggcactgagccgctgccgtcgttgacctcccggctgctcaatccatggagaggcggactgacggaggttagtggcgccgtcacgccgctgaaccgccaagcgccgctggtcgccggcgccgggagcccaaggcccctggccggttggccctagttgattgccgctcctcccccttgccctgcctgtgccagcggctgccttagtagcctatgacgagtaggactacccaacaaaaatttcctggctacgccactggtcatggcaacatactactacgtatgttgcagctactgcagccaccttctcgcggtttataccgacggtgaacgcgcggttcgactacggcgtgtccatcttcgtcatgacgtacagcttcgttgccgtgtcggggtaccgcgtcgacgacctggcggcgctggtgctggacaggatagccaccatcgccatcggcgtcatcatctgcctcgccgtctgcacgctcatctgcccggtgtgggccggccaggagctgggcctcctcaccgctcgcaacatggagaagctcgcgtccgccgtggaggcctgcgtcgaggactacttcgccgaccccacggcggcggcggccaggtcggaggggtacaagagcgtgctcggctccaaggcgtccgaggactcagcaggccgcgcgatgggaggcccccgcacgggcggttcggcttccgacacccgtacgaccagtacgccaaggtcggcgccgcgatgcgccagtgcgcgtgctgcgtcgaggcgctcatcagctgcgccggcgcgtcgtcgcgccagcgagccccgcccccgcgtctcctcggcgatgcgtgtacgagggttggcgcgtggtgcgcgcgggtgctcaaggaggcgtccgcctgcgtcgccacgatgacgacgtcccggggccttggcttcgccgtggcggagatggacgccgccgtgcgcgagctgcagagcgacctgcgggctctcccgcccatcctagccgaggaagcgtcggagacgtcgctggcagaggtcatcagcacttcaccgttgctctgctgctaagcgaggatcgagggcgtcgtccacgccgtcggcacgctggcgacactcgcggggttcaagccggccgacgatgctgacggtaccgataagccagaagccgaggtggcacgttcggacgagtcaccgcctcaccggaaaatctggcaaacacgcaccttgaacagagtgaacattttagcaagtgacaaaaaggggtacaagctgctagtaggtgtcaaagcagaacattttagcaggattccaatttcaaaaccgtggtgcagaggtgcagtgctgcaccagtacgtatctacatgttc

SEQ ID NO: 11303 - DNA, 1433 bp, Oryza sativa
  ref <308>: DATABASE ACCESSION NUMBER: AK108651
  ref <309>: DATABASE ENTRY DATE: 2002-08-28
aaggcagaggccaaggtttcttctctgctagctaactagtgggctgcttgggtggggagcccgggccggcagatatcctgtctgaaacccttagggacagggacttcgaattcttggaggcaatggcgtcctcgttgctccactgctccgacaagctgccgttcatgaacgtggagaccgtcctccacatgaaggaaggcctcggcgagaccagctacgcgcagaactcgtcgcttcagaggaggggcatggacacgctgaagagcctcatcaccaactcggcggcggacgtgtacctgtcgcagatgccggagaggttcgccgtcgccgacctcgggtgctcgtcggggccgaacgcgctgtgcctggcggaggacatcatcgggagcatcggccgcatctgctgccggtcgtcgcggccgccgccggagttctcggtgctcctcaacgacctcccgaccaacgacttcaacaccatcttcttcagcctgccggagttcaccgaccgtctcaaggccgccgccaagtccgacgagtggggccgccccatggtgttcctctccggcgtcccgggctccttctacggcaggctcttcccggccaagagcgttcacttcgtctgctcctgctccagcctgcactggctctcccaggttccttctgggcttcttgacgagatgaacaggccgatcaacaagggaaagatgtacatatcaagcacgagccccctggccgtgccagtggcctacctgaggcagtttcagagagacttcagcctgttcctcaagtcgcgcgcggcggaggtcttctccggcggccggatggtcctcgccatgctcggcaggcaggccgacggctatatcgacaggcgtaccaccttcctctgggagctcctctcggagtcgttcgcctccctggtcgcacaggggctggtcgaggaggacaaggtggacgcgtacaacgtgccgttctacgcgccgtcgataggggagatcgaggaggaggtgaggcgggagggatcgttcaggatggactacgtgcagacgtacgagatcaacctgagcagcagcggcgacgcgaggagggacggcaggacggtgtcgatggcgatcagggccatccaggagtccatgctcagccaccacttcggcccggagatcgtcgacgcgctcttcgccaagtacaccgagctcgtcaccgcgtccatggagagggaggaggtgaagagcgtccagattggggtcgtcctcaccaggttgtgacacaaaccacaaagctgtgacgactgaccagagcgatttgtaccagtttatagtttgaccccatgtttctgaattctaatgtgtgaccatgtggtgtttagttgttgtattgagtaactgatgatattaacaaattccatgtgtacttaactggtaggatggaaagaaatt

SEQ ID NO: 11304 - DNA, 1050 bp, Oryza sativa
  ref <308>: DATABASE ACCESSION NUMBER: AK108652
  ref <309>: DATABASE ENTRY DATE: 2002-08-28
caaccaacagctcgcgcgccaagcaaagagccaaagagagatcgaaaagccaccgccgagcaacaaacacagctcgctcgttccgccattggccgccgctcaatcgatcgttcgatcagcctcattctcgccgtcaaccatgtgcaaggtcatcacgatccagtcgctcgtctggctgcgccgcacggtgcggcggtggcgctcccgcgccgcggcgcgcccggccggcagcaagatggagcgggacggcgacgcggttccggcgggtcacgtggccgtgcgggtgggaggcggcggggaggacgcgaggcggttcgtggtgcgggtggcgcacttgaaccacccggcgttccgggagctgctccgccaggcggaggaggagtacggcttcccgtccggcgcctccggccccgtcgcgctcccctgcgacgaggaccacttccgcgacgtcctccgccgcgtgtcctccgacgagcgccacgacctggccttctgccggcccgccgccacctgcggcgtcacgaagcgccgcgccgagtcgtcttcgtcgtcgtcgtcgcgggcgccgctgcttcaagggatggacagcctcgtctggtgatccgcgccaatccgaaagcctcgtacctaagccaccgataagcaaaagcagctgcaaaccgtgcacgcgcgtccatgtcgtcgatcggcggcattgcagctggtcgttcgggcgcgcgtggcgaccgcgggacaagaaggccgtgcacgacacgtacgcacgcgggcacatgcaagaacgcgcgctggggcatgcatgcgacgtctaaagggcgccctcccgtgctcggcgtaatggcggcgcgcgcaactggggcaggcggccggcacacagtactgtagctagctaagctagctagcatagcaagtaggctatagctatctgccatgggctgacagctactacaagatatactaatctgattgagagggtggtgatgattttaggtattcttctccctgtaattctactcggaaattaataaagaatcgatatatggcttattgtgt

SEQ ID NO: 11305 - DNA, 1548 bp, Oryza sativa
  ref <308>: DATABASE ACCESSION NUMBER: AK108653
  ref <309>: DATABASE ENTRY DATE: 2002-08-28
acgatctcgatctacgcggcatcggagagaagctgatcgatctatcggtggggcgcgcggccgcgatcgatggcgaagctggcaggccgcggcagcaacggcgccaccgacgaggcgctgcgggagtggcggcatcacggcagcaagttctacgatacgttcaccgtctctggcctccgcgtcgacgccatccagcccggccgcgtcctctgctccttcaccgtccctcctcgcctcacggtacgctactagtagctactacgtccgtctcattttaaatacagttttggttttttcgcgtccaattttaaccgtccgttttatttaaaaaacttttaaaaaaaattaaaaacataagttaggagtaaagtactatttatgctttatcatttcataacaataaaaatactaattataaaaaaatttcaaataagtcgaatgattaaaattgggcgcggaaacttatggctccacttaaaataggacgtagtgagtagtaaacactctttctgtcgcaatatacatgcatctagaattgtatataatattgcgggcatatttagattgtagcgaaaataaaccttaccaaaatttgacaaattgccaaaattttggtaggatttcttatgcatttattaaatttgacattttttgcaactttaccaaaaaaatagtatagttgaaaatagcatcaatttgaacagtcccttcataatacaatgagtttaaatggataactgtccatagtcgttttactatgaaatatcacaatcgatcctagatacgcttataataaaatggagggagtacttcctttctccccaaacaaacaacgccattaacatttttacataaggctcgactattcatttctctactacttaaaaaataaaatgtgcttccatcgtccgtaaaaaaaaaataggcgaaaaaaaacaagtttgtccgataaaaaaaaccgggcgaaaaaagtgcgaaaaaaaagaaaaaccaaatatgcccgatccagaaaaaaggggggaaaaaccggggaaaaaaaccaaaattgtccgatccaaaaaaaaaaccgggccaacaaaaacgtaaaaaaaaaagaaaaaacaaaatagcgataaaaaagtccgactcggtcccgtaaaaaaatagcgataaaaataaaaaaaagcccgactcctcgttgcgattccctctcagaaacaaaaaaaaagtccaactctagatccgagtcccactcctctcggtttgagtccgagatactaggcaccgcttctctcagtttcaatctatagcgtgatatttcatacatcttggtaaaaaaaaattgatatgccggattgaagatctgtttgcaaaaatggaacctacatgtcgagagcatttcatttttatatgattttaatttttgggtttgtacatttgcatttgagtccctgtaatttttatatttacatttgagtccctataatcttgcaataaggtgcttttggtcctttttttttgaaaaaaaacaataaataaaagggatagaacaaaggcagaaaggtgcat

SEQ ID NO: 11306 - DNA, 1314 bp, Oryza sativa
  ref <308>: DATABASE ACCESSION NUMBER: AK108654
  ref <309>: DATABASE ENTRY DATE: 2002-08-28
aacagtcaggctcacacagagcaggcagcagcacccggcggccgaaggcgtgagcctcggcacgacggaaggattgcaggccaagacgctgaggctgctattagaggtagagctgctgcaacatcaggccccgtaatggtggctacaggagctctgcgacctcgatccaacggcgggagcacggcgaacttgatacggcgcggcggggtcgcggcgagatccatcctgcattcgagttgcgtcgagttcaatccaaaccttcagagggaggttgagcagtggtagcaggacgcggcacgatcggagcaccccgggcttactgacggcagaaccagaagtggtaagttccatttcatctgcttggtgctgccggctactatatcttgatgctttgttgattagtaccatggattggctggatctgtgtgagccaagccaaaacaacagattcgagtgggagtcagttcagtcaaaaaaccaaaaggggaaaccgagagggaaacatggggtaaggtgaggaacgtgggagaaatactcctgagcagatggatatacagatgtctccagatccctatcctctttatctgaaaaaagctattatccagcatggtcagttggtcaaggagtatggattatatatctgaccgtgacttacagagtagcaacagggcccaatacttagtagtacatgctagtttctactaatcagtcaaatagggctcaatatggattagttacatttcataatctgcaagaaattaatttacttagtatattgtattaaacatataggcaattaatgtcctcaatatcaaagaattgtatttcaggccaacatatttttgctgtgtttgtgtgtaaatttgcagtaacatgaatatagtttataaattaactgtcatctacatcttcttcactttggatgtcactttcatcatctgtatctgtatactcagcgccatcactttcagaatcttcctcttcttcttcctcttcaaacatatcatcttcagaatgtgttactggttctgcttcaatgggttcacattcgactccatctttactgagaaccgtagggaagtcaccatcatcaattgtagtgtaattcaatgcagccatgatatgctcattctcttggcatgcttcagaactagacttatttgataaagttggatcattttcttcttcttctgtaggaggaaagtcatacaaatcacgtggcttcgtcttgactacaacaaaccatttagggtctctagtatctttgacataatatacttgctcagcttgtgttgccaaaatatatggctcatc

SEQ ID NO: 11307 - DNA, 2219 bp, Oryza sativa
  ref <308>: DATABASE ACCESSION NUMBER: AK108655
  ref <309>: DATABASE ENTRY DATE: 2002-08-28
aacgaacgctaaaaaagtaacagtttctgtactttattgcaaaaaaacaatgggagccggaccatccctcgacgcggaaatcgcgcaagccaaggacatcatggcgaagttcctcgagaagttcgccaagaactactcgatgctgtaccttgtggccatggccaaggcctccatcaaggagcaggtcaaggccgctgccggccccaagtggtcgctgctgaagtgcccgaaggagcccgacgcgcctgaccgcaagacgggtcacatgctcaagcgcagcaagcacttgaagaagtggaataagcgcttcttcgttgttcgcggcaactggcttgtggactactgggagacggaggaccagcagaaggcgggcaagaagccccgtggtacgctgaacctgtccggcatgcgcatcatccgcgacccgaacgacacgtacgtgaagaagatccttgacctcgcgaagaagtgcaacctcaacgttgacgacctgcccaagcccgaggtgctgcccgacttctcgctcgagatccaccacgagactcgcgagatcgtgcttctgcagtgcgagaacgccgatgaccacaagagctggtgcgacatcctggatgactgccgctggtacagccgtggcctgaacatctcggacgacaagatccacaaccagatcttccagtgggcgctgtggcgctcgcgttggcagtccggcatctggggctactggtccagcggcggtggcgaggagcagtacatcacggactgcatcaacgaggcgatcgttgacgccgtcatgccgagcgtggacgcgaagctgacgatgccgtgggctgtgcgcagcaagatccgcaacacgttcacgtcgaacgtgaacacgttcgtgtcgaccggcgtgaagcccgcgtgggctgccgcttacgagggcgtgaagaaggtgcgcgatgaggtgaaggccaagatcgctgagggtgttgccccgatcgcggacgcgcaggcgtctgtgcaggcgaagatcctcgagatggtggacaagccgtcgaaggacgcgatcggcgagaaggttgcgccgcacctgaaccccctgctggacatcatcttcgcgcctgtcaacgaggcgttcaagattgtgctgtcggcgtacgacactgcgctgacgcgcggcaaggagcgctacacgacgcgcgaggaccgcatgcacatggtgatgcacaacgcctggaacagcgagttctgggatgcggaccgaaagctgtgggacctgttcgaccccctgtgggcgatgcgcacggtgttcagcgacgtgtcgccgtggggcatcactggcaaggcccgccgacgcctgcgcaagacgctgaacaacgcgctgttcacgttcgagacgcgcctggaggaggctggcggcaaggaccactgggaccgcattgccgctgagacccgcgaaacgctcaaggccgactgccgcgcctcgatcggccgagtgctcggcaagatcctgttcggcgtcgtggaggtgttctgggacacgctgatcatccgcccgagccgcgcgcttgtcggcccgctcgctgacgcgatccccgacgcgatcaagcagttcgtggaccccgaggacatcctggagcgcacgctgaacaacatcctgctccagtgctgcgccaacgtgttccagccctacactgagcgcattcagctgtaagcgccgcgcgcttttttcgcttgaccccgtaccgtttgctggtttgcaccacctgctctgctcctcacggcccctgttggaccttcccacgcgtcctttgtacgtttcgagtgcctacctctcatttggcctttaataaaacaaaaacaagacgaacggattggacagatgtcaaacatctccacttcgtggctcccaaggggacaaacgctttgagtcgtcccttgttgccgttgttcgtggaggcgatggcttctcctcggcaaacgaccagtgccttttcgccccccgaatacccagcaagaaaaacaatatcgttcctcccctccaattccctccgcccccttttcactaatcccctcaaaccgtgccaggtcgaaacatgcagcgaacaaggggcggcgcttcgtgactgcggttgcagcacactcacctttgtgtgtgattactcgctcgcccgctgtcgctcgccgtccctccttgcgtcgagtaaacctcgccccagtcgctagtttcggtcacgaac

SEQ ID NO: 11308 - DNA, 1740 bp, Oryza sativa
  ref <308>: DATABASE ACCESSION NUMBER: AK108656
  ref <309>: DATABASE ENTRY DATE: 2002-08-28
gaagagaaaaaataataatggcagctcccacctccatggcgaacgcggatggcgagagcacgcgcaccggctactgcgccgcgaccaagtcgttccgcagcctccggccgccggtgccgctgcctccgccggacgtcccgctctccttcccggagttcgcgttctcgctgctgccgcggtcgtcgtcgtcgtcgtcgtcgtctcttctcccggcgaacccggcgctcgtcgacgcggccactggcgaggccgtctcgttccaggcgttcctgtcgcgggtgcgcgcgctcgccggagccctccgctcgcgcgtcgggctgcgcggcggcgacgtcgcgttcgtgctcgcgcccgcagggctcgacgtgcccgtgctgtacttcgcgctcctctccatcggcgccgtcgtgtcccccgccaacccggccctcacccccgccgaggtttcccgcctcgtctccctctccggcgcatccgtcgccttcgccgtctcgtccacagccaccaagctccccgctggcctcaccaccgtcgtcctcctcgactcgccacacttccgctccctcttgatggattgcggccaagcccaaggacaggagccgctgccggtggtggtggtgcggcagtcggagacggcggcgatccagtactcctcggggacgacggggcgggtgaaggcggcggcgctgcctcaccggagcttcatcgccatggtggcagggttccacgcgctgcgggccaaggctcgggaggtcaggacgctgctcggtgccccgatgttccactccatggggttcttgttcgtgctgcagggcgtcgcgctgggggcgacgacggtggtggtgacggacgcggtggcgcgggccgggatacgggggctcgtggaggcggcggagcgttgggcggtcatggacatgacggcctcgccgccggtggtgctggggatgaccaagcagaggtgccggctgccggcgctggagcggataacctgcggcggcgccccgctgccggcgccggcgatcgaacggttccgccggcgattcccccacgtcgatttgtgcatgggttatggatcaaccgaggcaggtggcatatcaaggatgatcagccaggaagagtgcaaccacataggctctgctggccgtgtcactgagaatgtcgaggtaaagattgttgaccatgtaacaggcaagccattgcctgccgggcagcaaggggagctttgggtgagagggcctgccgtcatgacaggttacgtgggtgacaacgaggccaatgcaaccacctttaattctgaaggatggctgaaaactggtgacctttgctatattgatcaggacgggtttctttttgtagttgacaggctaaaggaactgattaaatacaaggcctaccaggtaccacctgcagagctggagcttgtcctgcattctttgccacaaattgttgatgctgcagttatgccgtatcctcacgaagaagcagggcagataccagtagcacttgtcgtaaagcaaccaggaagcaagcttactgaagcagaagtcatgtacaatgtcgccaagcaggtagctccatacaagaagatccggaaagtgctgtttgttgactccatacccaaatcgccatctgggaagatcttgagaagggaattggtaaatcatctgcggttgtgtgaattgtcgagattgtgactgtgcgagtgttgtaccctatagttcaattcttgtgtcaaaaagg

SEQ ID NO: 11309 - DNA, 1521 bp, Oryza sativa
  ref <308>: DATABASE ACCESSION NUMBER: AK108657
  ref <309>: DATABASE ENTRY DATE: 2002-08-28
acttcactgcacggcgtcgcggttttcccaagctgagagttgtcgtgcgagagtgaggagcatggcgatgctggggagctcgtcggcggtggtgctggagctgatgacgatggggtaccagtcggcggcgtacctcggcgagctgctccgggcggcgtccccggcgcaggcaggggatgagcagcaggagctcgccgcggagatcctccgctgctgcgaccgcgtcatcgccgagctgaaccggggaggagccactggtgctactaccggcaagaagcggaaggcggcggagtccgccgccgccgccgccgtgacctccccttctctccccgtcacgccgaccaaaagaagggcgcgtggcgcggaggcggtgagggaggtgaggagcggcacgacgacggacgggttcatctggaggaagtacgggcagaaggagatcaatggctgcaagcacccgaggctctactaccgctgcgcgttcaggggccagggctgcctcgccacgcggcgggtgcagcagtcgcagtcgcaggacgacccggccgcggcgttcgtgatcgcctactacggcgagcacacctgcggaggcgacgccgccgccgccgccgcgtgccgggacggggaactaatgccacctgccgtcatcaactccggcgcgtcgagcttcgccgccgcttggaacatggcctcgcgtgagccggcgtcgtcgctcgccgtcgagcggaggagctgcgacggcgacgctcccagcgagacgtcgcaggggtggtctccctccttctcgtcggaggtggagctggacgtggtgggattcgacctcgccggagccgactcgtcggcgtcgccggtgtgggagttcttgaatggcagcttcgactgggaattcgtcatcaactccctctgaattttcgatgcttcgtgatcagtagcacaccagctgccccaagagtgcagtagtctttgcaaaacgcacaaaatttcgcgggaactatcgaatttcccgcgtttgcgcttaagttaatagcctcagtagttcgtcagataatcgcacgcactattttaattcaggaagggatttagattgacaaagtatattaggtgagagttaatatgggagaattcgtaatgaagagttgaatgtgttgacgttgacgtacaggggaaaaacacatgctaagaagaaaaatggcaggtgaaaggggcaagaaatggcaaagctgagcaacagagcaggtaataatagagaattgctactcctactacttgcaagcatatatgtccagaagagcagccaaagagaacacaagaccgtcagcttgacgcataactgacgcacttctgatggtaacaaaaaaccggccaccatgtcccatgtgaacgaatggattcattagttgtaataatggtaatagtagtgacactcaattgcaatatcatgcttggtacagggttaaggatcagatggttagtttaaccaccaatagcaacaagctgaaacgaatactggttttgctggatttc

SEQ ID NO: 11310 - DNA, 1283 bp, Oryza sativa
  ref <308>: DATABASE ACCESSION NUMBER: AK108658
  ref <309>: DATABASE ENTRY DATE: 2002-08-28
aacctcctccgtcgtcctctcccccgaatcagctggtctctagcttcgatcggcactgccccgagaggaagcgcttgtctccccggtgcgctcggcattggagctcaagccgttcaacttcggagaccagcggctcgcgtcctcgccgcgctacctccccagcggcgacgacgccctgtaccgctgctcctcccccttcagccccagcttcgggttctcctcgccgtcgccgctagccacctccgtctcgctctcgccgtcctcctccgcctccctcgtcgatgacggcgacgacggaggagcggccgccgacgccacggggcagcggctccagctcgcgcgcctcgcgctgcagtaccaggaggtggccgaccgctacgagctttgcctctcccacctcgccgaggccgccgaagaggcggcggcgctccgtcttgagaacgccgagctccgcgtcaccaacagcgacctcgccctccgtctcgcgctgctcagcgggaagcataccgccgccgtcgccgtcgccgacgagatccgtcggctccgcctcggcgagcagaaggtcgcggccgccaccaaggagcgcacgcccgagaagctcgccgtgctgccgaagagcatctccgtgcggtccacaagctacctcaagctgaaccagcaatcccaggccgccaccgccacttcggcggcccccaaccgcaagccccgcacgtcgtcgaacccaaccaaccccccgaactcgcagcgcgcgtacgacggcggcaagaaaggcgacgagcagaaggcgcaacccgcggacagcggcgcggagctggaggtgtacaaccagggcatgttcaagacggagctgtgcaacaagtgggaggagacgggagactgcccctacggcgaccagtgccagttcgcgcacggcgtcaccgagctccgccccgtcatccgccaccctcgctacaagaccgcggtgtgccgcatggtgctcgccggcgacgtctgcccctacggccaccgttgccacttccgccactcgctcacccccgccgaacgcctcctcctccgatcctagctaaattaaggcagtgcgcggccagtcttttgcaccacctggatggtttattgctttcgcatgtatactatatacgattatacacacgaaaatgtacaaaaatacgaacatcgtaaataacacataagaggtacgtacagggtacaggaagccatatggtagagctagtagcaccgatattgtaatgtgaatatccacaaacaggattagtgttttcgtc

SEQ ID NO: 11311 - DNA, 1613 bp, Oryza sativa
  ref <308>: DATABASE ACCESSION NUMBER: AK108659
  ref <309>: DATABASE ENTRY DATE: 2002-08-28
agaccatttcgttccgacgcgagtaattcctccccacgggcggcgactagggcggctagggttcgtcgggcgccgccgtgccggagatcgcctctcgccgccgacacccggatctccgccgccgccggtcgccccaggttatcccgctcccgcagtcaccatcccgtcttctccgccagtcgcctcacgcccggcctggacgccccggaatccattgtcggtctcgccccgccgactgccgttgacgccactggctgaagggatactttaagaggcttttgggaacaggaacagtctgagttaagaaatgtcttctgggaaggggaagcggaagatggaagaaaagggagtgcctctgcagggagatctagaccctgataatgatcccatgaaatatgctttgtctgctcccagggtacagattattcccgggctgtggcgccgaattgtcagacgacggagaagcaagaatgatgccaagccctgggcatgtccctgtggatatgtaaataaacctatccagcatctgttttttgatctccctcgatttaagtgtggaagtagagaatgcaaggaaatgatcccggatgactatgaatttaagttctcacttgttgagaagcgaacggtgtttgtcttctcaataaagtgaaagaccaagattccagaccacactgcatggcatatgcctctgcagtgaatgctgatataacaagtaagatcacaagcgtacttttaggagaagcaattcgtgatgcaaaatctgaaatatgcatgagaaactttcttgcaaaaattgaagctaaagaagcaattgccaaggagtttggatatgaatacacatgatgatcttggcataaaagatttgtggaaaattatttcgatcttagagaaagatggagttgagacagtggatggttcacacaaagccaggatatcagggattactcatgttccactggatttcccagtgatatgcaaagagattgcggaaggacacccactattggccatcataagaacaggaaaaggatttgatgacttgcaatataatcagatttataaaccaccaaaagtatcgagaattgtggatggtaaatctgcggggcttcattgtattacacttgttggaggtgccatgcgcaaaggtagaaaaatgcattataagtttgtcaatacatatggggaggatttctgcaaactcagaagcttaaacagagatgatggaataaagggtggataggaaatgtcattgctgaagggatactaaggaaacctgtcaagtttctccgggagggacgaggtagtgtgtaatctggaatcccattctgatttgaaattgcttgccacctttggaagaatgattttttttgtacaattttgtgtttctttaattatcagttctcgtttgcttgctagcaactattatttggagagcttgtcaatgaaatgttaaataggtataaattgcagtacattacttatagggcacacatgcttgtagctattagtgatagcatattatggggcacagatagatgtaatgcactatttgtatatctgtgtaatggataatcctattcttaatttcaaacttggttgatcattgatag

SEQ ID NO: 11312 - DNA, 1469 bp, Oryza sativa
  ref <308>: DATABASE ACCESSION NUMBER: AK108660
  ref <309>: DATABASE ENTRY DATE: 2002-08-28
atttttccctttctcctatgagacctctgcctagtttctagatttcttcgtatccgttctgatatccaaatgggcatgctgaaaataggcaagaactgcagcgtttgcaaggagtggcaagaacactgctactggagccatatggccgaccacagtaagcacttcttgaagcatatggttggggatttcaccgagagcatgaccgtgcctgctagatttgcaaacaatttcaacgggcacatctcagaggaagtgaatctgagatctcctagcggcgaaacctggagcattggagtagccaacagcgacgccggtgaactagttcttcagcctggctggaaagagttcgtggatggcaacggcatcgaggaaggagactgcctgctcttcaggtacagcggcgtctcctcctccttcgatgtgctcatctttgatccgtccggctgcgagaaggcgtcgccgcatttcgtcgggagccatggattcgggagagcggagaactccgccggagctgaacaaggaggcagaaacggccgccgcacgccgccgatcgtcgacggcgataatggccatcgccaccacctggagatgacgctccacaggaacagctgcaggagcatccccagagcatgcaaacgcagcttattcagtgatgaaacagaagcgaaagaaaacgatggcgaagatgaagatgttgtcgcggccgcggaaggcgggcgctacggggagtactacttcagcaggcacggacgggtggccgagtacaacctgagggaggaagacagggaggagatctcgcgcgtccccgtgccggttcagcccgggaacccagtgttcgtgcaggtcatccacagcagccacgtccgcagcagcaagtactgcattgtaggggtgtcgccggagttcgcgggtaagtatctgggggcggtggagagggaggtggtgctggagagggcgagcaggggaggggagtggcacgtcccgttcgtgcaccggcagaacacccgcggcttctacggcgccggctggcgtcagttcgccggcgacaatcgtctcgtcgcccacgacgtctgcctcttcgagctcacgatggtggacgccgcggccagcggcggcggaaaccgccggcgacgctggagccggcggccgacgatgaccgtgcatgtcctccgtcgggtgcgtggtcgcttcgtgcttctgcgctgacctcctcgggctacctgccgtatgtgtttggactttggactcgggagcagcacacctgaactgatgaactgaaccagctataacctggtggcctctgcttttgctcttgctggacctggtggcaaacagtgtgtctatactggtatgtaattatgtatgtacgtatgtacctggttgtatctatactagtatgtagtatatgtatgtacctggtgatggtcaagcttgcacctctgtactgatggtgatggatgttctgatgg

SEQ ID NO: 11313 - DNA, 1493 bp, Oryza sativa
  ref <308>: DATABASE ACCESSION NUMBER: AK108661
  ref <309>: DATABASE ENTRY DATE: 2002-08-28
ctgcgcgttgtatccaaactctttcatggtatcagactcttctcgatcctaatcatcttccgctgcttctccattctttcttctctatggcgtcgagctctgtctcctccgacgatgtcaaccccttcgcggcaggctctgtggccatctcggcggcgacagcgcaactcattcacatcaagtcccatgttcccgtgatccttgatctcggcgactccacctttggcacctggcgcaccttcttcaccattgctttccgcaagttcggcctcctcgatcacatcgacagcacgactaacgcccgcctcaagctcgacgacgccgagtggacgcagatcgacacctgcatcgtctcatggctttacgccacactctcccccgacctcctctccgctgtgatccagccggacgacgacgcttacaccgcctggaacgccatcagctcccagtttcttgacaacgtcgtccagcgcactgtccagacccggcaggcgttccacgctctccaccaggctgacatgaccatcactgagtactgcggcaagatcaaggtactggcagacacgttgcgcgacgttggctcgcctctcacgaatcaggatctcgttgtcaacctcctgagcgggctgaacgacaagtttgcccactgcgtctccaccatctccgcggcacggccgcccatgacgttcctccaagcacggtccttcctcctccaagaggaggtctggatcgccaatcgcgcgcagaaggccgcgaccaccgccctgcttgctgcctcgcgatccgccggcgcctcctccaacgcgcccgccgtcggatcctccacgcccgcatctgctccacctgccaccggcgccactggcagcaatggcggcactggcggcaacggtcgcccctacaaacgcaagaagcaggctggtcgcgccgacggcacctccggcaactctggcccctccggcaactccagtgcgcccatggcatcctgggtcaacccatggaccggcgttgtccaggcctggcccatcgcgtggttccctctcacctcgtcagctcctggcattctcggctctcgccctggtgccgccccgcagcagtccatggtggtgcagcaggctccggccggcacgcttccgccggcgctctaccaggctctcaccggcctgtctctacagtcgactccgccgagcgccacggattgggttttcgacactggggcctccactcacatggttggcaactccggatcttcgcagcaagacggttcttctccgcagtgacagccctggcgatctctatccgctgcgttccgctgccacgccacttgtttctggcttccatgcctccgtcgacctctggcacgatcgcttggggcatcctggccggccggcgctctctcgcattttgaataactttaattttagttgtaaaccgagttctcctcacaattgcaactcatgtcgtcttggaaaacatgttcgcctcccgttcactgc

SEQ ID NO: 11314 - DNA, 830 bp, Oryza sativa
  ref <308>: DATABASE ACCESSION NUMBER: AK108662
  ref <309>: DATABASE ENTRY DATE: 2002-08-28
agcaagaagaccccgagcaattctacccgctcggagctcctcccctttcatcgtctccaatcaccatcatctgcacgtctcaccggccctacgcaacagcaagtgggttacctctcgatcgggatgagccgcagcaacaagaagagctctaggggcatcgacctgaagctgaacctctcgctgccggcgagaggggactcgtcgtccaggagggcgatggccgccgacgaggagtcgtcgccgagctcgtgcctgtcgtcggagaacgagcacggcctgcagtggtccaacagcccggaggcgacgtccatggtgctcgccgcctgccctcgctgcttcatctacgtcatgctcccgcaggatgatccgcggtgcccgcagtgcaagagccccgtgatccttgacttcctgcagcaggacaacggcaacaacaacgccaacagcaatagcagcaggaagaccaggagagggtgaagttaaacaaaagggggggcaattctccgtttggcagaagatcaacatcaatcaagaaaaagaaaagcgtctatatgaagtcctaggtccagtaattctcttttgttttgcctattcccccagtgtaaccatgatatattccttactaaaattgtgagactagcatgaaaatccatgtgctggtggcataattttgatacatcatggatacactggggactatatccatccccctctcctggcttccttctttagtggttctaaatgaagaagttttgcttagacataggaccagacttctcatctttgttttgtttttgtttcctttccgagatgaaaagaaaacatttaccctg

SEQ ID NO: 11315 - DNA, 2160 bp, Oryza sativa
  ref <308>: DATABASE ACCESSION NUMBER: AK108663
  ref <309>: DATABASE ENTRY DATE: 2002-08-28
gctgttgctcttgttcacttgtgctcacagcacctggtaaccccacatacagtgatcacacaacaaacaatatctgttgtttgtgtataaatagccctaacatggcttcctaattcctataaacaacaagtgtgagaaaacccaagaacgaaacacataggagagaaatgagttctctggatgccactactcctagatatgacgagtttaaaaggatctaccaccttttccttttccatgcacacccattctggctccaactgctgtacttcctcttcatctccctcttgggtttcttgatgctgaaagctctgccgatgaagaccagcatggtgccgaggcccatggacttggacctgatcttcacgtcggtgtcggcgacgacggtgtcgagcatggtcgccgtcgagatggagtccttctccaactcccagctcctcctcatcaccctcctcatgctgcttggtggtgaggtcttcaccagcatccttggcctctacttcaccaacgccaagtactcctccaagatgatagcaaccttacctgatgatgacgaccatggtggcagtggcaaaccaccaccaccaacgacgtcaccttcgtctaccctagtggagctcgagctcgctcctcccatggacgtcgtcgtcgtcaaccctaccaccactgcgacgacgcacgacgaggtagagctagggttaggacgtcggaacaagcgcggctgcacctgcactactactcacacgtcgtcgtcatcatcggcatcgaagacgacgacgacgaggctactgatgttcgtggtgatggggtaccacgcggtggtgcacgtcgccgggtacacggccatcgtcgtgtacctcagcgccgtcggcggcgcgggggcggtggtcgccgggaaggggatcagcgcgcacacgttcgccatcttcaccgtcgtctcgacgttcgccaactgcgggttcgtgccgacgaacgaagggatggtgtcgttcaggtcgttcccggggctcctcctcctcgtcatgccgcacgtcctcctcgggaacacgctcttcccggtcttcctcaggctggccatcgccgcgctcgagagggtcaccgggtggccggagctcggcgagctcctgatccggcggcggaggggcggcggcgagggctaccaccagctgttgccgagctcgcgcacgcggttcctggccctcaccgtggccgtgctcgtggtggcgcagctggcgctcttctgcgccatggagtggggctccgacgggctgcgggggctcaccgcgggccagaagctcgtcggcgcgctcttcatggcggtcaactcgaggcactccggtgagatggtgctcgacctctccaccgtgtcgtcggccgtcgtcgtgctctacgtggtgatgatgtacctgccaccttacaccacttttgtacctgtccaagacaaacaccagcaaacgggagcacagtccgggcaggagggcagcagcagcagcagcatatggcagaagctgctcatgtcgccgctctcgtgcctagccatcttcatcgtcgtcatctgcatcacggagcggcggcaaatcgccgacgaccccatcaactacagcgtcctcaacatcgtcgtcgaggttatcagtgcgtatggcaatgtggggttcagcacggggtacagctgcgcgaggcaggtgaggcccgacggcagctgcagagacctgtgggttggcttctcagggaagtggagcaaacaagggaagctcactctcatggccgtcatgttctacggcaggctcaagaagttcagcctgcacggtggtcaggcatggaagatagaataacgcctaactgcaagcacccatgcatgcatgacaacttcgttactaattaatggggcatttcagccggccgccgtactagactacaagagatcgatcgataggtctcccctcctaaaactcctccttaatctgatctccacgagttcttgatcagggttacttatatattataaaggaatgatcagataaatatatgtctatatcaggatctggtcgatctctagatatctgtctttttttttgggtaatgcatgtaagcaagtagcaattgctagacatatatatgtgttagcttacgagagtatatactggcgcttgagtcgtgatg

SEQ ID NO: 11316 - DNA, 1469 bp, Oryza sativa
  ref <308>: DATABASE ACCESSION NUMBER: AK108664
  ref <309>: DATABASE ENTRY DATE: 2002-08-28
tctcccccctcgccgccacggcgaacccctcgccgccgccaccgccaccgccgatcgggcgggaggaggcgtcgcccgatccgatgtcggccgcggaggatcccgcgaagcccccgcccccacccccgccgcagctcgaggcgtccggatcggaccccgacgaccccctcctccgcgaccgcgtcgtcgtcatcgcccctccccctcccccgccaccaccaccaccaccagcacccgcccccgccctcctcgcccccgccgagaacgcctccgcggaagccgccttcgccgtgccgccggcggcgatcgcggcggtggtggaggcgaacggcaactcggagaagaagaagaagaggaagacggatgaaggggaagggtgcaagtcgtgcagctgcaagaaatccaagtgccttaagctttattgtgtgtgttttgcatctggatcacattgttctgaatcatgtggatgtgatccatgttacaacaaatctattcatggtgttccacggagtacaccagccttgcctttgaaagctgttcaaacattagagactggtcaagattcagtggaacaacttataagatcccctatggactttggtagaagaaaatgcacttgcaaaaagtcaggctgccttaagaaatactgtgactgctaccagggaggagcaggatgctccatcaactgtaaatgtgatgattgcaagaacccatatgggagaaaagttggtgttattttggatggtaaaaatattcttgctggaccaacaccaaatgaaaggaatggaacagaagctgactcaagtgacgatgaagaagatgattattatatgaaccgaccactctcgcctgtctccccatctccagtatccagagagtcttcattccaacaggagactttagttggcgtcgaagtccagactatgaatgggcatctatacccaaaaccgcttacccaagtgcggccggaatcatggcagctcactaggaggcctactgaggaagtgcgaggagaggcatggcactacttgaggaggcccagtgaggatggaacatccgatgttacggaaggacatgctgaccccaagtttcagagagacaataaacagctggaaaaccatgttgataggtacagcattccgcggtgcatcgaggtgatgaacgccatggcagacctctcgccgatcgagaagtcgctcgcaccggacgtcttcttggatccaagcaatcgggagatttttctttcactgactgtagatattcgaaccatgtggctgaagcgtaagatgaagagccttgtgtagagataccatgaaaatttttcatccgcataaaacctgtcaagcatgtggtgtactgtagatatatctagttttcaagagttctgaaccgatgtatctagtcctaacttggcacaggctatattgcagccagcaacaataaattcatatgatcttcaggcttcagct

SEQ ID NO: 11317 - DNA, 1362 bp, Oryza sativa
  ref <308>: DATABASE ACCESSION NUMBER: AK108665
  ref <309>: DATABASE ENTRY DATE: 2002-08-28
catagtggaaatttatcttccatctacttcatgcttattggcaaggatcattctcaaggttctcaattattggtgatcattgaacaaggttactgagagagaagagaagcacaacacaatgcttcttgaagtcaatccgcttcgataatcatgcgggggttgtttatctatttacaatcaatttagagaaggctgagcgtctccagcggcttgacggtggcctccagccggcgacgcggcggcgtccgcggcatggccggcgccggcaccgacggctgcacgaacttgcagttggggcacgccggcgaggacttgcagagcatgacgaggaggtggcagttgacgcacgggacggccaccattggtcccaacgagcctacgccgccaccgccgccggcgatcctcgcatcgtcctccgcgatggcagcggcgccgccagagctcgccttgccggctccgacgtggaaggtggacgggatcgtggagatgttgagctccaggtccagagtgttgctgccgccgtgctcctccatgggcctcacccagctcttcctcatggtcttcctgttcaggtcaaggcactgctcccagtccatggggagggggtcgttgaggtggaggtccaggctcgcgtgggacacggcctcctcccaggcgaagtgcttcctcctcttcctgctgccgtcgtcgctgctgccgtccgactccgacgacgacgagctcttgccggcgccggcaccgacgccgaagcccagcaacgtcggccccagggagagctccggctgcacctccatcgaccggccgatcctgaatattttcatatttgaagttttgaacgaggggtcaagtttgaggacaccttagatgagtttttgcactgaaaactgcttcttctcagttctgtttgtcggctgtataacaaaaccgttgagagagtttgatgatgtggtactctcctgcttgaccatcatttgcacctcgcttctatgcagaccaagatttgaaacaaattatgtaaaagattattaatttggttatgggaatggctactgtacactttatgtaatttagacactacatttctctcaccattcactaataactctggtagtgggaatagcgggcgaaattaaaggactctttaaagtttttaaattgatgtgcatgtacagcatcattaggttagatctcctaggaaattaactgtggcatttttttctgatcagaagtttcttagcaagttatgttgctgtcacatcttgtactataacagaaactaacccttacattgatctgctttttctttttggaaggagcagttctttaatttcggaaccatgggacctggctgcaccattgaag

SEQ ID NO: 11318 - DNA, 2213 bp, Oryza sativa
  ref <308>: DATABASE ACCESSION NUMBER: AK108666
  ref <309>: DATABASE ENTRY DATE: 2002-08-28
acattgtccattaacactagagagaagctagctagtgagataacacagaattcagatatgcagcatatggttaagccagtttgcatattgtgtctacagtgtagcctcctctatggcgttcatcttgcagcagccgttgctgctgccggtgacggcaacggcggggaccagtttgcctactccggctttgccggagtgaaggacctaaccctcgacggcacggccatggtcacaccagatggcctactcgagctgaccaatggcaagccgcaggttaaaggccacgcattccatccgacgccgctgcgcttcgaggagttgtcgtcaccagaaggcggggagaagaaggcagcagtgcggtctttctcggcgtcctttgtgttcggcatcgtcactgcctcccctggtgtcggcggccatggcatcgccctcgtcatcaccccaaccaaggacctctcctccgggctcgccagcacatacctgggattcctcaacagatcaagcaacggcgacaacagaaatcacatcttcgcggttgagcttgataccatccagagccccgaattctccgacatcgacgacaaccacgtcggcatcgacatcaatagccttgtgtcttcaaatgcctctgatgccggctactatgatgacaacaccgattgacgtgaggcttgctccggtaggaatcaagaagcccatgaagccattggtctctacgagatccaacctctcaacagtgatcaccgatgaagcatatgtgggcttctcagcgtcgataggcacaatgacctcgcaacactacgtgctcggctggagcttcggtgtgggcacgcaagctccggccattgacatggacaagcttcccaagttacctggcagaagaagcaagaagtcttatccgcccaagaccatggtgatagctctaccaatagtctcggtggtgcttgtgattgtcgttgctgctggtgtttttctactgattaagaggaagtttcagagatatgtcgaactgcgtgaagattgggagcttgagtttggagcacatagactgtcatacaaggatttgcttcaggcaacagaacggttcaagaacaagaacttgcttggaattggagggttcgggagggtgtacaaaggagtgcttcctacttctagttcggaggttgctgtgaagagggtatcacacgactcaaggcaaggaataaaggagtttgttgctgaggtagcaagcattggtcgcctccggcaccgcaacctcgtacaactgcttggttactgtcggctcaaagaagaacttcttttggtctacgactatatgccaaatggtagtctcgacaaatatttgtacagccatgatgacaagcctactctgaattgggctcaaaggttccagattataaaaggtattgcatctggcttgctttatcttcacgaggagtgggagcaaattgttatccatcgggacatcaaaccaagcaatgtgctccttgacaacgacatgaatggacggctaggtgatttcgggctcgcaaggctctacaaccgtgacaccgagctacaaacaacagttgttgcaggtacctttggttatatggcccccgaattagcactaaccgggaaggcatcccctcttaccgacgtgttcgcctttggcgcatttctccttgaggtcaccagtgggcgaaggcctgtcgagcaagacatcgaagggcatcgactcctgctgacggactgggtgtttgagaattgcagcaaggaacagatccttgctgttattgacccaagacttaacggcaacattaacattagtgaagcaagtttagtattgaagttagggctcttgtgctcgcacccaatgtctaatgtaaggccaaccatgcgacaagttgtgcagtacctcaacggagatatgcccctcccagagatgtcaccaatgcgctttactttcagcctgtcagcactcatgcagaaccaagggtttgactcgtcgttgaagagtttaggcacgattagtaatctttcaattgggagatgacaatgcaagatgatgcatttctgttcataagtagaatctgtttcttttcaccacattaggtcagagtttattgtagttattcttagctgaagtgcactctctccagccttgagttgagagatttactaatgtgcctatgcatgtttctttcttgtgacaaagtttatcaattccttgt

SEQ ID NO: 11319 - DNA, 957 bp, Oryza sativa
  ref <308>: DATABASE ACCESSION NUMBER: AK108667
  ref <309>: DATABASE ENTRY DATE: 2002-08-28
atgcgtgaggccgtgcgaggggactgttgcgcagcggcagcgaccacgacacgtcgttgttccctctgctcccgctgtcggtgtcgacgagagcgagctgcccagcggccgtgagcccgtgacgggagcacctcctccacaccgatccttcccctgtcattgagggtgatctgaacctcaccctcacccgtcgcctcaagtgcatcgacacccaccgtcctgagtacgacgacgcccgtcattaaggtagtgtttggttggagggatattccgggataggatggaatgatccccaaaaccaagtgtttggttgagagattaggagggataggatggttccaaaaagagaatattcctccaatattcgggacaatctcatccgcgaaaatctagcggacggcgccatcccacttcgcacgcgcgcggtaaccctctggctacctttttttttttcaccgcacccctttcctttctccttcgctcaccggcggcgggagcacgcgagcaaggcaagccagcagcgggagggcgcaagcaatagtgagggcgagccgacgacgggagcgtgcgagcatgggcgagccgacgacgtgagggcgcgagcaagggcgagaccaagctagtggcagggagcacgcgagcacgcgagcatgggcgagccggcggtgggagcacgcgtgcaggggtgagccagcggcggccacggcggtgtccaaccagcctcgatccgccatcggcctccaacgtcagcagcacgcgcgatcttccttctccaatcctcccagaatcccgacgacaacattggatggggattttgtttcagatctgtacatgttctttcagtagacatttttttttatgtgagcaagaattagtttgtgatgtgtgcaagtaatttgtggtgagatgattaattagtgcttgagcatgatatggcaacatattcatctttttgtt

SEQ ID NO: 11320 - DNA, 1341 bp, Oryza sativa
  ref <308>: DATABASE ACCESSION NUMBER: AK108668
  ref <309>: DATABASE ENTRY DATE: 2002-08-28
actaattaatatttttaataatatacgaaataaacgagcttgtttcgttctctctcgacttaacttaaaaaaaaaacaacaacaacaattaactaaaactaacatggcaccaccacaatacgctgatttgggcaaagctgccaaggatcttttcaacaaaggatacaactatggaactgtgaagttggacgtgaagacccgaaccaagaacgagatcgacttcaacatcactggcgagcacaacaacgacgtgcaaaagtcgctcggcactctagaggccaagtacaagtcgccgcaacacggtttgacgttcgtcgagaagtggaacaccgacaacattctcaaggccgagatcacgctcgaggactcgatcgtcaagggtctcaaggtcgctcttgactcgtcctactcgccagctactggaaagaagtcgggcgtgttgaagacttcgtacaagcacgacaaactcgtgctcaacacggacgtcgacttggacttggcaggcccagtggtccacaactcgttgacagtcggccatttgggctggcttctcggcttgcagacgtcgttcgacacgtccaagtcgcagctcacgcgcaacaacttcgccgtcggctacgcggccaacgacttcacgctccacacgaacgtgaacgacggcaccgaggtcggtggcagcatctaccagtgcgtcaacgacaagaccgaattgggcgtctcgctctcctggtcgtcggtcaacaaccagacgcgatttgccctcgcctcaaagtatcagctcgacaagtatgcgagcgttcaggccaaggtcaacaacttgagccagatcggtttgtcatatagccaacagcttcgtgatggtgtcaagttgatcctctcggcactcgtcgatggcaagaacatcaacggcggcggccacaaattgggtcttggcctcgagatcgacgcttagattgattgattgattggatttattggtacaaatgcaaacaaacaaaacacacaactaaaacagctcttctcttttaatcaatatcactatcatcagaattcacttctttcttaatactaattattaatatatatatattattatattttatttgactaactaataaatgtactaattctaaaaagttaagcatatatttcaagatagagagaaaacctacgtctcaaataaaatattcaaaaatttatatatttaaaataagctcgtttaaattttttttgtttttttttctgtccttaaaattctacaaacaaactaaaagaatgatttgatataaactgatctttattttaaaagtcgtaattaataataaacattttttaaaatcg

SEQ ID NO: 11321 - DNA, 1645 bp, Oryza sativa
  ref <308>: DATABASE ACCESSION NUMBER: AK108669
  ref <309>: DATABASE ENTRY DATE: 2002-08-28
tctacaactgagcagtttctaaatggttggttcagattttcagatcagaagaatagtgatggaacttacagggccaaggtacttgatgcattgcttatgcagcttccatctagggcaatgctcttccaagttgacatctttcccttcaccaacatccaacctgtgtttcagaatcacatatttgtcagtaagccttgtctgtcaactgggttcggagatgtgaaacggtcttcggagattcgcgcattcgcaccagtagaagaatggctggttgatctcacaatggagccaacggtggtagtagtagtgcagattgtgcccataccgatgtcgaggatcgatctgataatcagacatgagatgaaatctcagttttcattgcacatttcaatcatgaaaatactgttgagatcaatgtttgaagcatgtaccgcctcaagccaatgctgtagagcaagtttctgggccttctcatctttggacagacctttgccaacctaaggtgatagcaacactacacctatgtcagtaatgcagtataaattccatgcttactgaaagaacaatggtggctctgttaaaaagttcagagattaatccctcctatgccactgattttgcaaatcccccacctcgtctcaccgacgaggtgggtccagggttataggcccacatgtcagtgagacatagggtggtggataagggatgatgccaatgaactctaccttggcagccctcattcttgcccgagaccatctcgagatggccgtttcgggcttctcaatgtcgaagaacgacaccgaattccgcttgagcagtgcgaaatcgagcaatttccacctgaattcaagcatcaaacaattcaaacactatgacccaaaagacaaagaatacttttacggtgatctccgctagtaatattctacgacaaaaatgcacaaatatttgcattttgcatgagaatcataccagctctgctcgacaagaacggcgcaatctgcgagctgccttcttgtcctgaagctcttgtacaccttctgcagcctgacagccgctgcctggtgcttggggctggcaactccggcgatcaccggagaatcctccggtgtctggtctccggcaagcgcaaatctcgatgcaccagcagtagcatttggcttgctgctgcagctctccttgtcagacttgggactcctgatggatatcatggtctccatctgaaccgggtcagcctctcttctcttgaagctcagggagccctctatgatcagcttccccccggagccgaatgccggcagcaatgtcgccgacggtgatggcatcggtgatgtcgacggcgagtcatcggcggcggcctccatgtcgtcgtcgaagctgagggaccggatgaacagcctgcccatgttgtcctccattgctggcaggtagtcgtctggtgggtatgagattgacagccccatctttcttggctttggactcaaggtgatgttgcaagcctgtcttgtttgcacgttttcctcttgtctggttgatccacttcctcttgttgttaatccaaaatttaagttatcctgtgcagatcaaagctaatttttaatgggcatcaaatgtaagttccagggaaagaatttgacattttcagaac

SEQ ID NO: 11322 - DNA, 1631 bp, Oryza sativa
  ref <308>: DATABASE ACCESSION NUMBER: AK108670
  ref <309>: DATABASE ENTRY DATE: 2002-08-28
tgctacccttttctcactgccaatcccccgtggtttgaaagaagatactactttgtactcaagtaggtttgttccagaataccttgagcagaaaaaagttcagaaacttttattggttggactagaaggctctggatccagcacaatctttaagcaggcaaaattcttgtatggaactgaattctccccagaagaaatacttaatttgaagctcatgatacaaagcaatgtttacaaatacctcagcacattgcttgaatggcgggagtgctttgaggacgaggctttggaggaagaaaaagagcttggcatgagtaatcacaagggagatggggaaccgaaggcagtgcagagcacgtcatctttgtattcactaaatcaaagattgatgcactttgctaattggttgctggagatagttgccctgggtaaccttgatgccttttttcctgctgcaactcgcgagtatgcacctatcgttgaagaggtttggaaagatccagctattcaagccacatataaaaggaaaaatgagttgcactttcttcctgatgtcgccagttattttcttgatagggtggttgaaatatccagcaatgaatatgaaccaaccgagacagatatcttgtatgcagagggtgtaaaccaatggaatggcctctctacacttgaattctcgcttgatgaccgaggtcccctctctgactcatacgctgacaaagctggcaatccagccatacaaacaaagtatcaactgatccgcatgaactccaaggggctaactggaggcttcaagtgcctcgggatgctggaggacatccgtgccataatcttctgcatctcgcttgcggactacgaccaaacatgggtgcagagctcaggagaaccctgcaacaagatgatcgccagccgggatttgtttgaggatgtgatcaggcacccttcctttgaggacaccccctgtgtactcctcctcaacaagtacgacgccttcgaggagaagatcagtagggtgccactgacagtgtgcgagtggttcgctgacttcagccccgtcaggcctcaccacaccagccagacatcgctggccagccacgcctactactacgtcgccgtgaagtttaaggacctctactcctccgtcgctgatggccggaagctgtttgtgttccagacgaaggcgctggagcggcgaaccgtcgacgacgccttcaggtacatccgggaggtgctgagatgggatgacgtgaagaacagcgatgccggctattgcagcgctgacgagtcctcgtacagtgtggacatgacgacctctccatcctaatcgctgtttatcagttaccatctggtgagatgttttgctgtggttagaagatattggaggtatttatacctctttacttgattacttctagtatctccaatcaccataaaacatctctgcatcaatagtagttgcgtttaggggcctagtcttttcatgtttgccttgtagtagatatgttttcttgaaatatttgcacccttttgttgaacctgctgtagttttctgtttaattagtagccttattcttcctgtaagtaaatagaggagtaatctcctgcgtataacgacaccgtttctatctgtt

SEQ ID NO: 11323 - DNA, 1798 bp, Oryza sativa
  ref <308>: DATABASE ACCESSION NUMBER: AK108671
  ref <309>: DATABASE ENTRY DATE: 2002-08-28
ctcgttgcctccgccactcctccccctctcttttgctacctccttgcctccgccgaccctccccctctcctccacctcccttcccctgtcttccgtcgccccttctcctctcctcctctctgctcggggacggccagatccgccgccgcgtgcttagggacagccagatccgccgccgcacgctcgggggtatccggatccgccaccacaagcacggggcagcccatttaacgactactgtggctccctcaactccctcaaccaccgtgtgcttgggggcggccgaatctaccaccgtgcacacgaggacggcctactcacaacagcggcttcctcaactccctcaatcgccacaggcacaggggtggctgctcaacgacgacgggtcatcgatcatcattggacaccaattaagcaacagcaatggcgtcgaggagcatatcaagctgcacaactgagacggcaaaaggcatccacaggttcgagatcttcagttacagcatgatgaacaccgaagccgaagacgactccatccggtccggcgtcttcaacgtaggaggattcgattgggcgttgctttactaccctgacggcatcgacgacgacagcaagggctacatcggcgtctacctcgagctgatcagcaagaacggcgagccatgggcactcgtcgacgtgaatctgatcaaccagctgcaacccgggcaacctcgtcagctgttcaccaagaccgatgtgcctaccccgttcagatcttcaagctttcaggagtctaccttggggtctctcaagtgcatgaagaggagcgatattgagagcactccagggttcatcgtcaatgactgcatcgtgatcgaatgcaatgttactgtcatctatgagccaaaagtgtctaaaaccagggcattgtgtgacgctgaaactagttcggcattgcgcgagatcgaggtgcctcctatggagatatcgtcggatttcgccaagatgttgaaggacggtgtaggagcagatgtgacattcagagttggagaagacacattccgtgcccacagggcggtgctagctgcgaggtctccagtatttcatgctcagctctgtggaccgatgaaggagaagaaggagacacaaatgcaggagataaccatccaagacatgcagccatctgtcttcgaggctttcctctatttcatctacaccgattgtgttccaagaatggatgatcttggcaatggtgagaagatgcatttgatgatgcatttgcttaaggccggtgaccggtatggattggagaggctcaggatcatgtgcgagagatttctagctacgaacctcgacacggagcatgtatctgcgatactgggtctagctgacttgctagatctcaagaagctcaaggaagcttgcagggagttcatggtcccatctgagagaatggatgccgtggctgcaagtcaagggtaccagcagctgaagagagcatttccctctctggcgtttgaagtgtgggagaggaggagccgtgttcgcaggaattaattaacatcttcttgattcagaagatatatgtgcgcgatgtctggagatttcctttttggttatgtttgttttggtacatttgatgatctgacgaatgttctctcaacaatgtgatgactgatacggtgcacgcgtggttgcaccttaatgtaatgtggctatctggatcatgcaaatggttttacctttagatcgagttgttttttaaaccttactctcttaccaactctcttaagtttttatgctagaaatttgccccatc

SEQ ID NO: 11324 - DNA, 1377 bp, Oryza sativa
  ref <308>: DATABASE ACCESSION NUMBER: AK108672
  ref <309>: DATABASE ENTRY DATE: 2002-08-28
gtgtcagatccatggcgagcgagagcggggttgattgctcataggccgagggcgccgagcggcgtcttgccctggccggcctcgaagtagaagatgagcatggcgagcatggcgaggcgggcgtgcttgatctcggcgagcttgagccggtcgagcttgtcggtgtccgggatgtagacgccgtccctggtctcgccgccgaggccgagcgggtcgaagaacttgccgccggggtagccctgctcgccggtggcgttggagaagttctcggcggtgcgcgaccacggcgtggcccactccaccgcctgcgagtccgggttgaagaagtcgacccaccgcttggactctacccagcccatgagcagcagctgcgtcccgaggagggagccgaaggagaagggcgcgatggcctccggctgcgcgccggcctcgaaccacggcacgccgctccacgcctgcccgacgaagatccccagcaccgccgccatcgcccaccgcccgtggatcagctccgcctccctgtaccacttgaggaacgccgggtccttgcccagccccagcgggtcgaagccgaagtcaccggggagcctgcccgttccatacacgagacgcgctcgggttgtcagccagccaaacacaatgcggcggcgcgaggaggaggaagaagaggaagaggaaaaaagagaagaagaacttacgagccatcgagccacggcgggttgatgaactcggcgtcgctcttgaaggccgggatccacgacttcttggccgacacgacgagcgcgcggcgcggcgcgggcttggcgcccgcgacgccgacggcattggcgagcgcgcgcttcgccccgaggaagggcgtcttgagcacggccgcggacgcggtggcggaggtggaggcgagcgccatggtcgtcgtcgtcgtaggggggctctctcttccggtggcggacggtgtgatcgggagcgagcaggacggtcacggcgggcgagttgatatttaatcgtggcgccgcggagcgccgcggccacaggatggggaaatccccggggagctagggtggatatgtcgccggccaatggggagcgcgcgccatcggattttgccgcgcaggtggacgccacgtggactatatcctgcccacgacgctgcttgtgatttgtggggacgggtcgctggtgtgagaccgccccgcagtaaaatcctgagcgatttgacaagtattccagttcagttgcgttcttctttcatgttggactcgatttctttacgtgaaattaccgcaaaactgttgtaaaaaaatacatttgccggaaatggccgttaaggttaaggccaattggaatgtaagaataagaatttcatggtaatattttgcc

SEQ ID NO: 11325 - DNA, 991 bp, Oryza sativa
  ref <308>: DATABASE ACCESSION NUMBER: AK108673
  ref <309>: DATABASE ENTRY DATE: 2002-08-28
cggccggcagccggatgacgggcagtagttgtccggccgattcttcccagctgctgtaccctcgccggggtgcccccaccaccaccaccacctcccgtcctcctctccatccgctcatcgctcatgcgccctacgacgtcgtcctccaccgatctgtcgtcctctccatcagctcagctcgtgatcaggctgagctcgcgagcttctggtgctatataaggctgggtggtggtgcaagtgcgaagcgagcggccggtgaggacgatcgatcgagatcgagcttgacggcggcgagaggaggaggaggggagacgatgagcgggcgggggaggggggacccgctggtgctggggagggtggtgggggacgtggtggacccgttcgtgaggagggtggcgctgcgggtggcgtacggagcgcgggaggtggccaacggctgcgagctccgcccctccgccgtcgccgaccagccccgcgtcgccgtcggcggccccgacatgcgcaccttctacaccctggtgatggtggatccggacgcgccgagcccgagcgatccaaacctcagggagtacctgcactggtgagtcatcgatcgagtcagcacagcagcagctgttgtagctgacgcgccctgtgacgactgatctgattcagattcagagtccagattcagctccctgcaccgcaccctcgtcgtctcgtgtcgtctcgtctatcgtgtcgtacgagatagagcgtatagctatagccagccaagtgcccgtgttggtgttgcacttgccgccacgagatcgatcgagccctttttgcctctttttttttaaaaaaaaaagagagaatatttttgcatccgggtagcagccagtgaatacagttacgaaacatgaacgtttgatcgttgactgcatgctagctagctgcttttcaaaagaaaaagggcacacatttcttttaatttagatgaaaaacaatatatatggatcgatcacac

SEQ ID NO: 11326 - DNA, 1783 bp, Oryza sativa
  ref <308>: DATABASE ACCESSION NUMBER: AK108674
  ref <309>: DATABASE ENTRY DATE: 2002-08-28
gaactagcaagtaaacctgcggtgtttccaacacaacaaacgctacaacccttgtaggtttcagaggaaaacacacgacacgagccggaggcaacaaggcgctcaggtccatggagcctcacgtcctcctcgtgtccttccctatgcagggccacgtcaacccgctcctccgcctcggccgccgcctcgccgccacgggcctcctcgtcaccttcaccaccgtccgcctcgccgccggcggcggccgcctccgcgacgtgccggaggacggcgcgtgcgccgacgtcgggctcggccgcctgcgcttcgagtacctgcgcgacgacgacgacgacggcgacgagcggtgccagcagctggcgcccaacgacgtgctgtcgcacgtcacggccgtggggccatcggcgctcgccgagttcatcgacggccaggccgacgccggccggccggtgacgttcgtcgtgaacaacatcttcgtgccgtgggcgctcgacgtcgccgctgggatgggcatcccgtgcgccatgctgtggatccagccgtgctccgtgctgtcgatatactaccacttctacgagtcgcccgaggcgttccctaccgccgccgaccccgacgtgccggtcgagctccccggcttgccggtgatggccatggtcgagctgcctttcatggttcgtcccgagtacgcgcagtgcctgtggggcgacacgctccgggcgcaggtcggggcgatcaagaggacggtgtcctgggtgctcgtcaactcgttctacgagctcgagcgctcggccgtcgacgcgctccgcgcgcacacgacggtcaagctcgcgcccatcggccctctcctggagcatggccatgacaacggcggcggcgacgacggcgcgccggcgccggcgctaggggccgaggacaacgaccgctgcgtggcgtggctcgacgcgcagccgccgcgctccgtggtgtacgtggcgttcggcagcctcgtgaacatcggccgcgacgagacggcggcggtggcggaggggctcgtcgccaccggcaggccgttcctgtgggtggtgcgcgacgacagccgcgacctcgtgccggaggccgtcctcgcggcgtgccgcggcgacaaggccggcaagatcacggcgtggtgcccgcaggggcgcgtgctcgcccacggcgccgtcggctgcttcgtgacgcactgcgggtggaactccatcatggaggcgctcgccgcgggcgtgccggtggtcgggtacccgtggtggtccgaccagttcgcgaacgccaagttcttggtggaggactacaaggtcggcgtccggctaccggcgccggtgaccggcggcgagctccgagcgtgcgtcgaccgcgtgatgagcgggccggaggcggcggtgatccggaagagggcgatgcattggaagcgagaagcggcggcggcggttgccgacggcggttcgtcggatcggagcctccaggattttgtcgaccatgtacgacgttccaaaggaccggaggagctagctcgattagctcaagacatccagattatgaatgggccggtcaatccggtcctagtttaataaatctagcacagcccatgtacggtcatgtgggggctatgacgctatgtagtgtgttaatctatctactccattaagttgctgtcgagtctaatccttgttatcataggattccaaggcttacataaaaaaacggtgtaaaaaatgtaagtttgaagtttgaacactccaagtcaaacacgattacatcgtattatacg

SEQ ID NO: 11327 - DNA, 993 bp, Oryza sativa
  ref <308>: DATABASE ACCESSION NUMBER: AK108675
  ref <309>: DATABASE ENTRY DATE: 2002-08-28
aaatcgttggggaagagcagcgagagatggcggcaagaggcaggggcagcgagagattgcggcgacggcgagggcctcgatgtgcaacggcagcggcgcggcggcctcgatgcgcctcgatatgcgacggcagcggcatggcggcctcgatgcgcgatggcggcggcagcggcggcctctcttttcctcctttctgctgtgaattttgttgacggcggcggcaacgacggcctgtctcttcctcctttctgctgtgaattttgttgttggatttgctgaaccaaatgtaaatggctaaatggttgattaccagcttactcttgaattgcaagtttcgtattgatgaactaaaataacaaggttcagaaattggatctgctgtaaatagtatcgattcatgagaaagtctcgtgtactttgagttacgcattgtttttttcctcctgaatccttcctctattcatattaaagttacaaactcaaattgggaatctcctcctggtatttctctgttcagattaaagcagcaaactcaaattgggtgcctccgagcaaggcaggctcgatgcacgatggcagcggcacggcggcctcgatgcgcgacggcatcagcaggctcgatgcacgacggcggcaacagcctcgatgcgtgacggcagcgtggcggcctcgatgcgcgacggtggcggcggcgcggcggcctcgatgcacgacggcggcaacaacctcgatgcgagacggcggcgcgatggcctcgatgggcgacggcggcagatggaagagaggagacctcatttttgttagcccgatcatacccctgttaaaccaacggttagattagattggtacctcgtgatacctctttaaggatgggaaaaatgctctattataaaagatgcttgtttcatctcaaatcataggttaatcattgtgtcatgtactgcaagcctccaaatttgcaatgcagctcccttgtcttagaagaggtcatgc

SEQ ID NO: 11328 - DNA, 1640 bp, Oryza sativa
  ref <308>: DATABASE ACCESSION NUMBER: AK108676
  ref <309>: DATABASE ENTRY DATE: 2002-08-28
cagtggcttttgggggttttgtgttgttgtttgaccacccaacccaacaccaagaggtttcatttcaccgtgcgatcgatacatatggggatagacacaagagaattggagaagtcaaaaagttttttaagcatttgggatgaattagtaatagaacttgtgtgctgagttgtttcagggactaaatatcttgtgtgctggattgtcgtgcacttgtgttcaaataatgcaggtagaagtagaacaaggcacttggggcaggaggacacaaattgtagaatgcgtcgtttgattgttttgttcaaagcggttggcgccaaactccttccatctgaacaactcgccaatctgattactccctctccgtctacatatatatacccccacacccacatcgttcaagataagctgagacaaaatcgatcggaggtcgaaatggtgcgcgccatcgggcccctgctcctgctcgcccacgtgctcgtgttcgtggtgtccattgcggcggcggcggcgcccgtgcgacggccacgctgcgacgccggcgaccgcgccgcgctactcgccgtgaaggcggccttcaacaacgcgtcctacttccagtcctggacgcccgacatcgcctgctgccactggtacggcgtcgactgcggcggcgacgactacgactacgaccccaccgacggcgaccgcgtcctcagcctcgccatcatacgcgatgacaacgtcaccggcggcataccaggcgacgccatcgcccgcctcacccgcctccaggagctcatgttcttcaaggtccccggcgtcaccggccccatccccgccgcgctcgccacgctcaccgccctcagggagctcaccatctcccgcaccgccctctccggctccatcccttccttcatcggcgacaagttcaccgcgctccagtctctcgacctctccttcaactcgctcaccggcgccatcccggcgagcctcgccaagcccccgaagctcatctccatcgacctcagccgcaaccagctcaccgggagcatcccgcggctgctgctgagcaaggccgggcagcaagcgttcctgacgctgtcacacaacaacctgtccgggaggatcccggcggcgttcggcgccgtcaacttcgtgcagatcgacctgtcgcgaaaccagctcaccggcgacgcgtcgatgctgttcgggtcggggaagaaggagctcggcagcgtctacctgtcgcgcaacgcgctgagcttcgacatgtcggagctgcggctgccggagcggctgagcttcctggacgtgagccacaacgccatccgcggcggcatcccggcgcaggtggcgaatctgagcaacctgcagctgctcaacgtcagctacaacaggatgtgcggcgaggtgcccaccggcggcaacatggcgaggttcgacgcctactgcttccagcacaacaagtgcctctgcggtgcgccgctcgccgcctgccattgatgtttgatccagaccttgaaactgtaaccactactgtactgtagtaataatcactgagcaataccaaaaactataggataaattaatgaagaagcaaccagctaatgctaataattaaggtccattcttgatgaacatgagtgaaatttagtgtc

SEQ ID NO: 11329 - DNA, 1211 bp, Oryza sativa
  ref <308>: DATABASE ACCESSION NUMBER: AK108677
  ref <309>: DATABASE ENTRY DATE: 2002-08-28
aactacaccggtaaatccgttccccacctcgtcgtctgagcatggacgacgacgacgacgaggtcgccgccggcgaggctggacctgcgccggcggcggcggcgacgggaggccacgccgaccgcgtattccgggccctcgcgctcgcctccctctacatcctcttccggcggtggcgcgccggtggggccggcctcgcggagcggccgtcgccggccgagatcgcggtggccgtggcgctgtgcgcctccgtggcgtggctctacgcgctccccgccttcgggatccgccggagcagcgagatctccacccggcggtggcaccaagattagtcgacaactcgacatgccctgggggtaaccactctgtttctcttcacccccatttttttttctttttttttgttcgatttgatctctggtccatgactccatgtgatcttgaagcaaagcaaagaaataatgatatgtttcaattcgagcatataattgcatgagattttcctaagcttcgaaagaaatgggtagctactgatctgagccttgaggtgtattgctcactgtctttaaagagagcactgcactgtggcctgagccaatcggttctactgccatgaattgttacaaacagcgaagcagatctaaacactaacaagcatgtcaatagctgcctttctcaactgcagagtgcctaccatgtcctgaactacagggctcaattatttctccaaatttttgttaggttctactgctagaactagaagtgtatatgcatgcaattttctcgatactgcccattcccaattactacaacccttttcttttttgcatgcaataattaatagaaactcgttctcaattttttttatagaaaccctgaaaacatttatctaagaggggagatcagaacacccttcatctgatggaatgtatggagcgcattataggaggcctggtgtgcctactgttggtctgtttttcttcattgtgttgttggccatctgagcccgccaacaccctaggacctcaggccataaatagacattattttggtactccatttcttacatggtcttgcgccttttttattttgtttaatatacttcttctttcattgtcttaactcattggaaaaccatgtgttgccattgctttttatgcatttgcaaactacaggcctgagaaaaagaaatgaaatctcttgttctctcg

SEQ ID NO: 11330 - DNA, 1610 bp, Oryza sativa
  ref <308>: DATABASE ACCESSION NUMBER: AK108678
  ref <309>: DATABASE ENTRY DATE: 2002-08-28
acccaagggcgaaggcgtcgacgagatggaggagcaggagaccagtatcggggacctgcacacggatgccttcgtggagatcctgcggcgcgtcgcgccgagcgcgcgccgccgcctccgcctcgtctgccggcgctggcgcaacgtcatcaactcccgcgcgccggtgtggcggggccacgcgaagacgctcgccttcgtctaccatcgccccggtccagccaccgccgcgtacgccatcgacggcctggaggaggacgacgaagggtgctaccggaagctatgggacgccgccgccgacccgagtcttccggccatctactcccgcctgaggatgatcggcagctgcaacggcctgctctgcctgtacgacgagggggtcaccggcgacatcgcgctgctcaacccggtcaccggcgagacgctggacgtcgccgggccgccgggccaccggctcaggcgccaggagccgtacggccacgtcccgtacggcgaggcgttcagcttcacgtaccacgaggcgacggagaggtacaagatcgtgcacctcgccgtcagcgacgggcggctggaggcggtggaggtgctcacgctcgtggacggcgcgccgtcgccgtcgtggcggagggtggcggcgcccgccggatcgagctgctggctgccggccggcgtcgtcagcgacggccaagccacgtactggatcaaccacggcggcggcgacaggctcatgtcgtttgacctcacggatgagcgtgtcgcgacgatcacgtcgctgccggtggcggccaagaacttgaacgccggttgcttgaggaaggcgcgtgggaggctgtgcgtgggcaaccgtatccatcacgactatcaaaacaacaccgaaatcgatgagatgtggttactggagcgtgatggatgtgaaagcttggagaggtggtattgccggttctacttgactacgcgactgtgcatggaggtgcaacaagttgtagggccacactttacccagggcgaacatatcttggcccatcgccatggatccttgtatgtgcatcggtgcgtgagcagtgcgacaaggccacagtgcagtgtagcgcagatacacgagcactggccttaccatgaacccatgttcacgtgtggtcatgcaagtaatattcgggccttctcctacatcgagactacggagccattgaacgtataccaatgcaatggtggatctaagattggaagtgtggttaataacgatgaggagatggctacaggtaagacgacatctctagggcaaatgctaacctccatgttcaatgacctcccaagtcctcaccccaagcgcccggttgccaggcgaagaaaacggcgaaccaatcgttttaagtgacggattgtctaccggagtactttcggtatgtccgaacaagaagggatactgtgtcaccagaccaagaaaaaattaaatcatcttagatgttacaaaatcaaggagtgaatggaagcatgcaaccaatgagtatttagatgactccttgagttctaatcaaacatttaatttatctctttatttaagtcttgaatgcataaagactacaaataaaaataacttatttggaaaaact

SEQ ID NO: 11331 - DNA, 1701 bp, Oryza sativa
  ref <308>: DATABASE ACCESSION NUMBER: AK108679
  ref <309>: DATABASE ENTRY DATE: 2002-08-28
aatcagatcgagcaagacgaacagaccagacgagagattgcctttttagcaggaaaaggtgaacgatcgatcgatctctctcgcagtcgtctttgttaatttagcagaggacttggtagcataattagctagctaaccgttgcattatattgcatataattagctagctagagctggaatcaatggcgccaaccacgaaccagagcagcgggtcggcgccactgaccgtgaacccggtggtgcagcgcgccgtcgtcggcgcgcagctgccgacgacgtcgccgtgccgcacgcccaagtcgccgccgccgtcgtacgggagcatcgtcaccgtgctgagcatcgacggcggcggcgtccgcggcatcatcccgggcaccatcctcgccagcctcgaggagaagctgcagaagctagacggcgccgacgcgaggatcgccgactacttcgacgtaatcgccgggacgagcaccggcgggctggtgaccgccatgctcaccgcgcccaacgaccagggccgcccgctcttcgccgccaaggacatcaacgacttctacctcaagcactgccccaagatcttccctcccagaagcattccaattgtgggattgttccagagcatggcggggccaaagtacgacggcaagtacctgcactcggtggtgcagtcgctgctcggcgataagcgagttaatgagacgatcaccaacgtcgtcatccccaccttcgacatcaagctcctccagcccatcaccttctcccgattcgacgcccagatcgatgtgtccaagaacgctctcctgtcggacgtgtgcatcagcacctcggcggcgccgacgtacctccccggccaccgcttccagaccaaggacaaggacggcaagccccgggaattcaacctcgtcgacggcggcgtcgccgcgaacaacccgacgctgttggcgatgacacacgtaagcaagcagatcctgctgggtaaacaggacgacttcttcccgatcaagccggcggactacggcaagttcatgatcctgtcgctgggcaccggcacggccaagatcgaggagaagtacgacgccgttcagtccggcaagtgggggatgatcaactgggtctaccacgacggctcgtcgccgctgatcgacagcttcagccaggccagcgccgacctcgtcgacatccacgcctccgtgctcttccaggcgctgcactgcgagaagagctacctccgcatccaggacgacgagctcaccggcgacacggcgtccgtcgacgtctccacgccggagaacctgaaccggctcgtcgacgttggcaaggcgctgctcaagaagcgggcgtgcaaggtgaacctcgagaccggcaagaacgagcccgacatgagcaggggcaccaacgaggaggagctggagaatttcgccaagatgctgtcggaggaacgcaaggccaggctccagaagaaggccttccttcagtaaacatggatgcacggacatgcatgcatatatgcatgtatcgaatactatttgtgtagcaaattccctccctgaaccaacagcataatcattagtcgtaacccatgcatgcattcgaacaggctatatttctattacatttgtactttaattttgttggaaaagttatactatgtaaactttgtttgtcgtatatctggaataaagtactacataatttaatttt

SEQ ID NO: 11332 - DNA, 1557 bp, Oryza sativa
  ref <308>: DATABASE ACCESSION NUMBER: AK108680
  ref <309>: DATABASE ENTRY DATE: 2002-08-28
atcaccatcgcctcgccgccagtcgccaccagcgtgtgcaagtttcttcttccaccactagcctccgctctcccagtctcccacactgctccggcgagcgagcgagagcggccatggattcgatcatggagccctacgtcgccgaccttctcgctgacgacataacggcctcgatggtcgagctcttgcccggcgacggcggcgcggcgcagatggatgtcggggttcttgacgcgtacctccgcgccatcggcgcgctcccggcgcatccagcggcgcccggcgccgacctggccgccgccgccgaggtggagtccatggcatcgaatgatgacaccaacggcgtactctacgactgggacacgaaggtggatgtcaaggtgccctgtgcccttcttccgccgccgccgggcttccctccgcttcccgttccagggctggccgacgagcccgtgtacgctgcgcccgctcgccatcttcctccgccgccgggcttccctccgcttcccgttccagggctggccgacgagcccgtgtacgctgcgcccgctcgccgtcttcctccgccgccggggttccctcccctccccgttccagcgaaagccgagcccgtgtacgccgctcccgtcgacgaaggcgacgccatcagggcgttcatgcagcagctggagtggagcgagcagtacaacggcgacaacgacgctccggcccccgacaactccacggcgtcgcgcccgcagctgtgcgcgccctacgacgacgacatcgacgccaacctccgtgacatggagaaggacgccgcccagcgcccgtcgccggactacctcgacacggtgcaaggcggtcagatcagcgcggcggcgcgcgcctccctcgtcgcctggatggggaggctcacccaccgctacgaactcgccgccggcacgctccaccgcgccgtgtcctacttcgaccggttcctgtccgtgagagccctgccgagctacaccgcgcaccagctcagcctcgtcgccgccacggccgtgtacacggcggccaagtacgaggaccaggggacggtcttcaagctggacgccagggagatcgccagctacggcgagttcgcgtcggcgcaggaggtgctcgcgatggagagggagatgatggcggcactgggctatcggctgggcggcccgaacgcggagacgttcgtggagcacttcacccggtacagcaaggggaaggaagagctgcgcgtgcagcggctggcgtgtcacgtcgccgaccggtcgctggagagctacggctgcctgggctacctaccgtccatggtggcggcggcggcgatctccatcgcgaggtggacgctgaacccgccgggtgcgctgccgtggagctcggagctgcaggagctgacggggtacagctctcaggacatctccagctgcatcctcaccgtgctcaacacgcagtgatcagccagtgatggatggataatagttacaagaatctggcaagaaatgtattttttgtaatttgtgaacacattggcaaaaaaaatgttacattgtgtcgttc

SEQ ID NO: 11333 - DNA, 1465 bp, Oryza sativa
  ref <308>: DATABASE ACCESSION NUMBER: AK108681
  ref <309>: DATABASE ENTRY DATE: 2002-08-28
gctcgggaacgcgtcccccgcggccacccgcggggaggatgcggccgcggccgcgtcggcggcgggcctgcctttcgccggcgtggaccgtcgtccagtgggcgtggccgagatgtcaccggaggaggcggcgggcgtgatccccaggcggcttcttgacgccaccgacgagaggccaccgctccggcgggtggtgggggttgcgtcccggcgcgccgccgccatcaggtgccgtgccgctgctccctgccataggctgcgcttcgcgtcggtgtctgtcgacttgttccgaccgccgccgccgctcgtcggagaaccgccgctcgcgccgcgcgggctagagaggtcagcagtgcggcgagcggcggcgctggtgttcgctacgtcgatcttccggcgactgtcgctgtttcttgatgattcatgggtgaccgcctcctccctccgtgcgttcctcccggccgagcgccacctctgggctgccgtgctcgccgccgccatgccgttgccgttgctttgcttccccgacgccggcgcctgcctcggcttgctgctggacatgggcggcggcgcgacacgggacgcgcccgccgcaatgctgacgtcacgcgctcgcggcgagggcgacgcggcccgtggcgttgaccccgaacgtgccacggagttggcgccacgtctggtcgctgcaggttgctgacacgccggggcggttgacctcgggctcgacgtgccggcggcgccgggcgtcgcgcgctggagcgctccgctcgacggcgccgtcagcgagggtctcgacctggacaccagcgacgacgcgctgggttggccggcggcggcggcggcgccgaacacgtgcagtgcttgtgttctgtccctgtgacggggccaagccgccccggccggcgcgccccttgcggtggccggcgtgcgtgggctcgtcgacgccgacgacccccgcggcgtcgagcccacggacgtgctgctcgccgtgttgatcgacgacaccgacgccgacgacaatgtccggcggccggagaacacggtgcccggcgcgtgggcgacggtggagagttgcgacgtcgcggagctgctcctcgacagcctcgacgccgggggcccgttctcccgccgtgtcaatggcagctgcttcgcaatcgcaagggggagaaatgggggatcaaataacaatttgcaattgcaagaggtgaaaattttgatcgggtagggcgagagcgcatgcacatacccgtgaattccctttcgcgtatggcgccgagctagctctttccagccggctcggcggcggcgcggcggagacatggtggcctgcggcggcgctcgtcgccggcgaccagagtggcgacgccggaggtgtcagaagcctgccaacgcaattcggtaaaagaaaaacgtaagacaatttttcatctacatttcggggtcaatgcaccaccgattcatccgt

SEQ ID NO: 11334 - DNA, 1502 bp, Oryza sativa
  ref <308>: DATABASE ACCESSION NUMBER: AK108682
  ref <309>: DATABASE ENTRY DATE: 2002-08-28
agacagaaacgaagcagcggaaagagacggaaatcggagtaatggcagccatggcgtcgtccgctcccacggccgcgaaacccgtcgctctactgccagccccaatctgccgctgcggcggcggaggtctcagatcgacgctcctggccctgatgccgccggcggcggcggcggcttcccggttccgagtctccgcctccgcctcggacgtgcccgatttcctctcctccgactggctcgaaacacggaagaaaaagcctttcggccccaggttgaattttaatgcagaagaagcagtagaataccaacttgaggcattaaaatacaatgatcagccacgccaagattatgggatagaagtcatgtacaggtttgcaggctttgatccttttgagagatcaacttattttgggcgacaatttgatctaggacagtttgaacgtttccggcggatatttcaccattcaacttatagggttttgcttgcccacaaagaaagaactatattgagcagtttatgggttgaagagaacctatataagcaaagagtgtgggttcgaggatcacgtccggaggaagaagctatatttcagtttacaatggttcagagggttggtggctcatgggatgggtactggttaactgagagcttaatcaatgatgatggagatgcactctcaggtggtcttgcttactgaccgatatgtgtcttacactcaagcttctagcgtattgatgtactgatgaatctagaaaattatatagccgtgcaattatgcacggttggtccagaaataggttttctttttttttaaaaaaaaaaaattgtccagttatatgtcacggaaagagtagcaatagtacatgtgctgtggtagaattgactgcgacactcccattctgggagcattcaatatgtcaatggtcaaacacgccgctattgtacataagtttggcggctgtatggttgtttatgaaataccgtcatctggaaagctttcagcgatagctcaatgtggatgttcaggtcaggaaacggcattgtcagaagaaacaaagtcctatatacacacatctatgtttttattttgtgtacgctatgattgtctattgctccatccaatcagaagttgaattgttaactgctcaggtacctgatttccgagtatatcttcgatgtttcctgattgacttgtgagtttatcctctatgtttcctgcttttaggattacatggctcatgactgcaggtgacgagggttgtggcgtcctttccgatcagaatgtgtaaccttcaagtacttgaaaacatgaaagaagaaccggaaggtggattgaatatgttgtttcacactcaccagaaaagggcaggtaacttgttgggaatatttttttaggtgaccatcatcgtcaggtcaataacttgcttgcaagatgaaagtaacatgatatcgatatctatatattttcgcacaacctgatgatgaggcaaagaaatttgtg

SEQ ID NO: 11335 - DNA, 1528 bp, Oryza sativa
  ref <308>: DATABASE ACCESSION NUMBER: AK108683
  ref <309>: DATABASE ENTRY DATE: 2002-08-28
atagccatacctttcttcttcctccttttgcttttctttctctctttctttctttctttttccctccaactgcagttcaaatcgaatcaagaacggaggcaagaagaagatataatagcagcagcattgcgaagctgatgctgccatagttgccattgccatggcgtcctccaccttggctctcgacttcctccgccgcctactctgcgcgcacgccgccgccggcaatgcgggcggcggcgacgacgacggtgcggtggtggtgcaggtgcaggtacagcaggaggaggggatgagcccctgcgtcgtggccaggctgatggggctcgacgcaatgccgccgccgccgccggagacggagtgccagccgctgcggcggcagcggcggaggaggaggagcaggtcggtgagctcggcggaggggtggccgccgccgccggcgccgtacttgaaggaggagggcgacgagttcatcgtcctcagcttcagcccggatgccgcttctcgccacgacaatggcgaacccgacggcaagagcggacacgtcggagccaagaaacagagcggtggctgcccccgccgcaagctgcactacggcggcgacgacgacgacgacgaggcgcagcatcccggccacggcaggaggagagcggcggcgacagagcgcggcatgccgagctcaagcccggtgtcggtgctgcacgcgcagcactcgtcgtcgtcgtcgtcgtcgtcgtccacgacgacgaccaccaccaccaccaccacgtcgtcgtgctcgtcggaagaagtggggccgagctcgccgtcgcctacctcagaagaaattcggcttgcaaacaatcaacagagctcaaggaggaagctgcaacccgatttcaacgacgatctcgacaacccgttatctcctgaaactagcagttgccatgtctcaaaatgttcagaaagtgggatgaggaacaggagtgtgatgaacaagtctgaggtgttcatcccgggtgtgtctggcactctgcagttcatctgcaggctggttgaggaagatctgaacagcgtgatatggttaactagtgattctgagaacattgcagctgacatggtctctgagattcttgatcagctcacatctgagacagctgatgaactcatgcagacaggttctgaaactgtacattcttcacctggccgcctcatctccatgaaacatccaagcttcagggttgatcgaaatatgcaggcaattcgaagcaactgaacaatctcaagctctcaacaacatgaggagaagattggagaattgtagcagagacaacaggttcagaaaatctcgagcccgaatatgcaatgaaattaattctctcctttcaaggctgtaaccatatgctagtaatatgcagtgaaattgtacatgtttactttaactccatgtacaagcataaacctaacaacatgtatattagttagttgatgtaaattagcacatgtgttttcactctatggttcatattagttgacaaagattggtagt

SEQ ID NO: 11336 - DNA, 627 bp, Oryza sativa
  ref <308>: DATABASE ACCESSION NUMBER: AK108684
  ref <309>: DATABASE ENTRY DATE: 2002-08-28
aacgagaaaagtgaggttttcaaggttcgcaagggatctgtggcgccgaattccaatttcatctggcttgccagatgctcccgtgtctcccgccattccagtcaaatcccacccacgcagcagcaagcaatggcagcgagcgcccacctgccggggagggacaagcgcttgggcggcggcgccgttgtcatgcggatgcggaagagctccccccgtcccccacctcgggaccggatccatcgaaggcacgacgctcgtccatcgaaggcacgacgctcgccggaagcctcttgaacagccgacccatgttgcgcccgcccggcgcggttgttgcctggaagctgttcgacgaaatgcccactagagcagagcaatggatggaatcgtttgctacatgagatttgcttgcggacggattttgtggcaaagctgttttgcattgtcgaaattttattttcacctcggttcgtagtggtatatttatagtttatatatatattttttcgaatgttgttttcagcactaaggttttaccggtagaattttatggtagagaaacaaatgtggggtgagcattaatgcctgctatccaggacacataatcaataaacttcatgttaaagttgc

SEQ ID NO: 11337 - DNA, 885 bp, Oryza sativa
  ref <308>: DATABASE ACCESSION NUMBER: AK108685
  ref <309>: DATABASE ENTRY DATE: 2002-08-28
aaaagagagtcaaagagtgcttgaaattgccgggagatggagcggaaacgttgagaaacaggagctcactaacctgctctttcctggtcctggaggtctttgttgcggagctcggtggggatgggcttgccctccatgagcacctcacggctgacggaggcggcacttggttctctcgtataggtacgccgtacgccagagcagagcagagcagcgtgtcccaccacagcatcttgcctcgctcgccaacccaggcaaaaaaccccaccctaatacagggggagcttgatccggagggcatggaggcgcgcggcggcagaacgtcgggtcggaagaatggtgcacgcagtcctgcagccacgggccggcctcagatccagaaatatccaggcaccggctcgtggaggaggaggagcggcgttggcgctggtggcggccgggatgaggtctcgacgtcagttcatagggggaaccgggaggcgttgccgtcggctagcttgctaggaggagggggatgcgggtggaagaaattcgtcgtcgccggcggcggcggcggcgagaggcgcggggcgcaggtggggggtgagaggatttggtgtgggagagccggagagaaggatattttgcacacaagtccttgtattttgtacgattactgcgctacccttaataaaaccaaaattttgttttctttgtattctattttgttaaataacaatgagggtcttttaatattacaacttccacagtacatttaatttaaacaagagtatatctctatgtatagccaaaagttgctatattttagaacagatgtattgtacgaaatggtataaatagtgtattaaatattttattgaatggtatataaatatatcctcgctc

SEQ ID NO: 11338 - DNA, 1426 bp, Oryza sativa
  ref <308>: DATABASE ACCESSION NUMBER: AK108686
  ref <309>: DATABASE ENTRY DATE: 2002-08-28
aggccaagaatcaccagcacacacactgtcacacacaaagaaagaaaaggagctagcaatggcagcactcgccgccgtcgccgttctcgtcgtcgccatggttatcagtggcggtggcggcgtcgccgcggcggtgacatccaagaagccagtgatctacatcttcggcgactcgatgtccgacgtcgggaacaacaactacctcatcctctcgctcgcgaagtccgattacccctggtacggcgtcgactacgagaccggattccccaccgggcggttcaccaatggcaggaccatcggggacatcatggccgccaagtttggcgtcccgccgccgccgccgttcctgtcgttgtacatgaccgacgacgaggtgctcggcggcgtcaacttcgcgtccggcggcgccggcctcctcaacgagaccggcatttacttcgttcagtacctgtcgttcgacaaccagatatcgtcgttcgaggagatcaagaacgccatgatcgccaagattggcaagaaggccgcagaggaggtagtcaatggcgccatcttccaagtcggccttgggagcaacgactacatcaacaacttcttgcggccgttcatggcggacggcatcgtgtacacccacgaagagttcatcggcctcctcatggacaccatggacaggcagctcacaaggctgtacgatctcggggcgcgcaacgtgtggttcagcgggctcgccccgctcggctgcatcccgtcgcagcgcgtcctctccgacgacggcgggtgcctggacgacgtgaacgcgtacgcggtgcagttcaacgccgccgccaggaacctcctcgagcggctcaacgcgaagctccccggcgcgagcatgtccctcgccgactgctactccgtcgtcatggagctcatcgagcacccgcagaagtacgggttcaagacgtcgcacacgtcgtgctgcgacgtggacacgacggtgggcgggctgtgcctgccgacggcgcagctctgcgacgaccgcacggcgttcgtgttctgggacgcctaccacacctccgacgctgccaaccaggtcatcgccgaccgcctctacgccgacatggtgagcgccggcgccgtacaggggaacgggaacgccaccaccgccgccgccgcctccacccccgcgcctcgcgtcgtcgtgggcggcggcgcgtcgccgtcgacccacgccgcgccgcctccaaagccttagacgtgcagacaacagatcgatcggccgccgttgcgccggcacaacgccgtcgccttttcgtgtgattcgagccccagtcatatctgatctccattgtcggatgagttaaacaacaagtgtttgatgaaatgatgagtagtgtcgcgattgttcaaccaacgttttccgagtcaaaatcatgcatgagatttcccg

SEQ ID NO: 11339 - DNA, 1472 bp, Oryza sativa
  ref <308>: DATABASE ACCESSION NUMBER: AK108687
  ref <309>: DATABASE ENTRY DATE: 2002-08-28
attgccattgtcttcgccccccgccgccgcctgctcaaacccatcggagagcaaaccgaatggagctccacctcacctcccgcggcgccctcccgctgtctccgccgctcgccggccagcggcgtcctcacctctctctctccacgccgtcgcttccgatcaagaatcacacttattcagtgccacctcctttctccaaggctcactgcgcgataggatgccaagcttctctagcaactaactacatggaaacctctgcggtggctgatttggactgggagaacctcggttttggccttgtccagacagattttatgtatattgcaaaatgcgggccagatgggaacttttccaaaggagaaatggtaccatttggacctatagaactgagcccatctgctggagtcttaaattatggacagggcttgtttgagggcttaaaggcatatagaaaaacagatggatacattctgctgtttcgtccggaggagaatgccataaggatgagaaatggtgcagagaggatgtgtatgcctgcaccaactcttgaacaatttgtggatgcagtaaagcaaaccgttttggcaaataaaagatgggtgcccccaaccggtaaaggctccctgtatataaggccgctgcttatgggaagtggagctgtccttggtcttgcacctgctcctgagtatacctttatgatttttgtctcccctgttgggaactatttcaaggaaggtttagcccctattaacttgattatagaagaaaactttcaccgtgctgcccctggtggaactggcggagtgaaaaccattggaaactatgcctcggtattaaaagcacagaggattgcaaaacagaaaggatattcagatgtcctctatctagatgccgttcacaagaaatatctggaagaagtgtcttcgtgcaatatctttattgtgaaaggcaatgttatttctactccagcaataaaaggaaccatactgcctggtataacaaggaaaagtattcttgaagttgctcagagaaaaggcttcatggttgaggagcgccttgtgtcagtggatgagcttcttgaagctgatgaagttttctgcacgggaacagctgttgtggtgtcccctgtggggagcataacttatctggggcaaagggtggaatatggcaaccaaggagtgggcgtggtgtgtcagcagctgtatacttcacttacaagcctccagatgggtcatgtggacgattgtatgggctggactgtggaactaaaccagtgatcatgtacctcccttctcgctgtatacgttgggggtatttggcgcattgatccgataataatgcaaaataataaaaaatgttgttctttttatggtcagaacaaattccccatatactattagtcctgtgctcctgaagttctgatcacaagaacagtgtgctaatgtatcctgttatcacaaaatactagtatc

SEQ ID NO: 11340 - DNA, 1420 bp, Oryza sativa
  ref <308>: DATABASE ACCESSION NUMBER: AK108688
  ref <309>: DATABASE ENTRY DATE: 2002-08-28
cagcattcaagaaaaacagccggaagagagaggggaaccgagagaacgacctgctcgacgcgtggactcggcgtggcatcgccaagctcgccttcaacctctcccagacgcgtcgcccatctccacttcacacccagagccgaccagaccaagagaggagagccctcagcctctccgtcaccctcatccttgtcaccgaccgtggagaagacgaaggctgccgtcgtcgtcaagccgcgcacgccgtcatctctttttcgttccatacttctctctccatgccgagcaaatcctcttttgactccactttgtttcgtccgctgcagcgacgggaacgccgccgtgcccacgggtgttgcagtgcgtgcaccgagcgccgccgcaacgacatcgtcgccgttgccgtcgatttaggccaagccggagcgagctaccacgccaccagcttcgcgtagtcctcctctccatttcccctcaaaaatcccaaagaatggcgcatcgaggaaggagatcggcgtcatcctcctcaactcgggtcaccgttgccatttgccgaatccatcttctccgtggatcgagtcgttgccgtcttcccggagctctgcaccgtcgccggaccatcttcttcaccgctgctgttgtccagactttcccgcgcctcgttcaagcttcgataattgcttaaacggtgaagaagtgaattaggtgctgacattttgcagtttcaaggtactatcgcacaaccaactcccgactctcgtccagatctacgctcgccgccgccgcgagggtttctggcgcctcttccttcccgactcccgtccagccaccactgccggctcatcctctcctgtggagccgcgtcctagggcggcggcggcgcgtcctcgcccatggacaaccgccgactcccgtcaccctcgcctgcccaatgtcgtagaactggtttcacggctccacggctccatggcagcaggcttgcagactattacaagactctgttcaagtcatctaactattgggctgccctctagcttatcttgatctatctatgcacttctgtctgaacttgaagaacaaattcacttgaacatgtttaacttggtagattggactggttctgaatcctgatggttgttcatatatattgtcctttggaatcaactttttatatgttgaactttccaaattatctacaagcaggagcagagtaactgctgaagtttcaagggcaatgcaaatggattgtataggaatgctacatcatgaagatgggaggagctaaagctatagtattagcttatgaacagttataatttctttttggagatgattcaaatctcattttctgtatgtatgtttacctgacatgttgatcacagttgctcttaatataattacctttcatcgattggattgt

SEQ ID NO: 11341 - DNA, 1709 bp, Oryza sativa
  ref <308>: DATABASE ACCESSION NUMBER: AK108689
  ref <309>: DATABASE ENTRY DATE: 2002-08-28
atctttgcattctttcgtgtttctgtttctctacttgagtgaattcttgttctttagaaaaattttgtatacaaacttcatcatggctgaaagctaccacaaggaggtcattgctggccttaaggacaagagccttttcattcaagaggccttcatcgatggccaatgggtcgccaaggataacaaatttgacgtctttgagccctctactgccaccgtcctcggacaggtcgccaactgtgccctcgaggacttccagaccgccatcaagagcgccgatgttgcccagacaaactacttcgacagcacaaccggtgccagccgaggtgccctgttgaggacgtggtacgacctcgttctcgccaaccaggaggacttggccaacattctatctctcgagaacggaaagacctactctgaggctctgggagaggttctgtactctgccagcttcatctcatggttcgccgaagaggccactcgatcctacggcgtcacgatcccttcttccgctcctcacaccaccctcatgaccgtccgcgaacccgttggtgtctgcggtatcatcacaccctggaacttccccgccgccatgatcactcgaaagatcgctcccgctctggctgccggttgctctgtcgttattaagcctccttccgagactccctactctgccctcgctttcaccaagctcgccattgacgccggtcttcctcctgccaccatccaggtccttcccactcgtgaccgccaagctgctactgagcttgctaccaaccctctggttaagaagatctctttcactggttctaccggtgttggcaagtaccttgccaagcttgctgctggcaccttgaagaagctgagcttggaactcggtggtaacgctcctttcattgtgtttgaggatgccgaccttgaccttgctgctgagggcgctatgttctgcaagttccgatgctctggacaaacttgcgtctgcgccaaccgcctctacgtccagaagagcgtcgctaaggagttcactgccaagctcgttgagaaggtcaacgccctcaagatgggcagcggtctcgacaagtccaccactcaaggccctcttgttaacaaggccgctgtcgacaaggtcaaggagcacattgccgacgctacatccaagggcgcccagatcgcaaccggtggctctacccccgcagccccggtttcttccaccagcccaccgtcctcactggcgtcacacaagagatggctgtcgccaaggacgagaccttcggacctttggctcccatcttcgagttcgacaccgaggaggatgctatccgtctagctaacgacaccgagtttggtctggccggatacttcttctccaaggacatcagccgtgttatgcgcgttgcccacaagatgcaagtcggtatggtcggtgccaacactggaaaaatcagcgctgccgaggctcccttcggtggtgtcaaggagagcggttacggaaaggagggcagtctgtatggaatggctgagtaccaaaacatcaagtccattaccatcggcaacctcaacaactaaagttgcatgacaatttttttgaagaaaagcattggaaaaatcaggagtttgtctttagccatgatcaataatgacggggcgagaagcctcatagaataacgactgggatcattatattaatggtctccaaaatacaaaacagt

SEQ ID NO: 11342 - DNA, 1299 bp, Oryza sativa
  ref <308>: DATABASE ACCESSION NUMBER: AK108690
  ref <309>: DATABASE ENTRY DATE: 2002-08-28
gcttattagtgggcccatcatccactccggcccacgacgaccaacaccaaacaaaccctagctcaccggcgtcggcggcggcggaaggcggtcgccggcacgccacagcaaaggcaaacccgcagcagcacgaacaaacaggcgagcgatgggaggaggcgaggccaccagcggaggaggaggagggttccgcgcgcgggtggagcactacctgtacagcggcgagaagaagcacgtcgtcgccggcatcgccatcttcgccgccatcttcggcgtcccctggtacctcatgacccgaggggcaaagcatcagtcgcaccaagattacatggaaagagctaacaaggcgaggtcggagaggctttcttctggacaggcatcttcgccaaaagagtgaaacaggaaggcatacaacttccgttgcagtgagctggttgattcaagctcaatctggatgcatggtgctttgtctacaacccaatgtaggccgtgtggcatgcctgtttattcagtgtctaaaattgcaaagttttcttcccgtcgcccaaaagatttaatttttttctacttgcccctatctctgaactgtgctgtttatagtttttgcagatgactgaatactaaccattaccaatttaattagcgttgctatggataggacaactgcctccaactccatggagttgtgttgatatgcaatcttccccatcaattgaaatgtggtggatttaaacaaaaaagaaagaaagaaacaaatgcacatccatctgaaaaacccagaaggaaaatattgtcatctacagaattgcagtctgaagatttgctgttctttctctgctggaaaagaagcagtgacaacaagaagctgacacaagcgtgcctatggttagggagatccaaattagagaagaatgattctgaactcttcccatgtcggcattaaactacaattcgacggggttgattaatcatcactacagaatcaagtcgtggcttactggcatatcaagaggggaaaaggtgaatggtttgatacttcgatgaaaaccacgcggattccccagaaatagtcctcgttactcgtcaggtgcacacgcttacagcaccagtacttctgacattgtgattagtttccatagtcccatgtccttgttttgatttctttttaaggtaatgtgttcttgtttttctatggcaaacatgataggggcattcaaaacaccctatggttttcgagctttcgacttttgatgcaacataagtagggtgtagctaaaattagtaaagactcatctaact

SEQ ID NO: 11343 - DNA, 1422 bp, Oryza sativa
  ref <308>: DATABASE ACCESSION NUMBER: AK108691
  ref <309>: DATABASE ENTRY DATE: 2002-08-28
atccccatcacctccgtccgtccgacccacccaatcgcccaccacccacccaccgccaccgtcccgatctccggccaccgtcatgccgtccgccggtgccggcgccgccttcctactccgtccaatctccgctaccacccaccctctcatcagcttatcctgtaccggcgccggcgacagcgcgaaccacaagtctcacctcctcttccgcctccaccattcgtgccgccgcctgcccgtgccccgcctctccctcaccccggcccccaccggcagcaataattctccgccctcgcctccgccggcgtccccggagcccccgccccctcccttctccaggtggtccccgccgcgcgcgatctggcgggggctcttggcgctgcttctcgcggggcaggtcttccaccgcgtcctcaccggccgcgtccaccgccgcaacctcctcgcgcagctccgccgcgtgggccccgggagcgcgggggtctcgctcctcaccgcggcattcgtcggcatggccttcaccatccagttcgtgcgcgagttcactcgcctcggcctccaccgctccgtcggcggcgtcctcgccctcgcgctctcccgcgagctctccccggtcgtcaccgccgtcgtcgccgcgggccgggtcggctccgcgtttgctgcagagctggggaccatgcaggtgtcggagcagaccgacaccctccgcgtccttggtgcgcagcccgtcgattacctcgtggtccctcgcgtcgtcgcttgtgtgcttgcgctgcccgtgctaaccctcatgagcttcgcgctcggtctggcgtcctcggcattcttagctgattcgatcttcggtgtcagtaccagcatcattctggagtcagcgcgaagggcgctgcggccatgggacttgatcagttccttgctaaaatctcaggtgtttggcgccattattgctgttgtgagctgtgcttggggtgtcaccacccatggtggagccaagggcgttggagagtccaccacatctgcagtggtcgtttctttagttgggattttcgttgcggatttcgctctatcatgcctgttcttccaaggagctggtgattctctcaaatatgcaatgggttgaagcaggaacgcagcagagaaaccttttggcttcatcgcagcatagtgtagtggtgtacattgacatgtatggtgtagtggactcgaagtggtcggcgtttcaacatcagccactctcaggtgaaatgaatcaatgttcttgtggcatccattggaagtcgatgctatgctttttgtgtgttgtgctaaattattgctcaactttttgcttctatttcgtgtataactttactattacttcagaaaaggaaataacactacatatgtctattttggctttctaatgaattgttaaattctgat

SEQ ID NO: 11344 - DNA, 2265 bp, Oryza sativa
  ref <308>: DATABASE ACCESSION NUMBER: AK108692
  ref <309>: DATABASE ENTRY DATE: 2002-08-28
tacagaaaacaagatcgacgatggagttggcggtaggtgcttcggaagccaccatgagatctctcctgggcaagctgggcaaccttcttgcccaggagtattctctggtcagcggcgtccgtggtgacatccagtacatcaatgacgagcttgccagcatgcaggccttcctccgtgaccttagcgttgtgacggagggtcacaaccatgacaaccggaggaaggactggatgaagcagatccgagacgtcgcctatgacgttgaggactgcatcgatgactttgcgcaccggctcccccaggattcaatcagcgatgccaaatgctccttcatactcacaaaaatgtatgaactcttgacatggtggcctcgtcgcgatattgcttcgagaattgctgaactcaaggtacgggcgcaacagatcgcggatcggcgcaacagatatggagtgaacaacccagaacactgtgacagcagcaacagtcccagacccagagcccatgctgcggctcaagacattgctgagtatcaggacacaaaacctcagatcgtcagtataaaggagcctgtggggatgaagactgtcatggaaaaccttgagaagtggctaaccgaacctcaacctgataaggggcgagctgttctgtccattgtcggtttcggtggtgtggggaagaccaccattgccatggcattgtacagaaaagtcagtggtaaatttgactgccaggcgtcagtcgctgtgtctcagaactatgatgaagacgaagtcctcaggagtattctgaatcaagtcagcaaacaggaggaggccggtggcagcacagaaagtagtagtagagatgagaacaccagggaaccccagggcagcagtagcacatcaagtagagaggagaacactgccgagtcaggcactaaaaggatgttgaacaagttgaagaaagccctaccactgtcactactcggagggaatgatgataagacatcggtcaggcagcaggaaacaatgggctctcttcagctccgcgaagaactgaaacggcgcctggccgaaaagagatatatcctcttgattgatgatatttggtctgccaagacatggaacagtatcatcataccgtttctgccttctgaaaatgataaagacagcagaataatagtgactacaagatttcatgctgttggttccacatgctcccctagacataaaaatgatgaggccacatcctcccctggacatggaaaggatcttttgcataaagttgattttctcacaggtgacaagcccctagatttatttaatgcaagcattcctgacccaatgaaaagaacagatagagacaagaagttatcaaagatatgtgggggattgcctttggccattgtcaccatggctggtcttgtagcctgcaacccaaacaaagccaactccgattggagtaaactttgcgaatcattatttccatatccagtaactactcttaacctggatggggttacgaggatactggattgttgttacaatgatttgcctgcagatctcaagacctgcttattgtacttgagtatatttccaaagggttggaaaattagtaggaagcggttggcccgacgatggattgctgaaggttttgctactgagaagcaagggctaaccgaagaggaagttgcagaggcatactttaatcagctcgcaagaaggaacttaatacgccctgtggagcatggcagcaatgggaaggtaaaagcctttcaagttcatgacatggttcttgaatacatcatgtcgaagtcaatcgaagagaattttattactgtggttggtggacactggcagatgactgcgccaagcaataaagtccgtcgactatcgttgcaaagcagtggatccaagcatggaaattctacaaaaggcctgaacttggctcaagtgcgatcactgacggtgtttgggaacctgaaccatgttccattccattcattcaactatgggataatacaggtgctggatcttgagggttggaagggtttgaaagagagacatgtgacggagatatgtcaaatgcttgtactcaagtatttgagcatccggcggacagaaattgccaaaattccctcaaagattgagaaacttgagtatttggaaactcttgacataagggagacatatgtcgaggagctgcctaagtctgtaggccagctaaaacggatcagtagcatacttggggggaacaaaaatacacggaaggggctgaggttgcctc

SEQ ID NO: 11345 - DNA, 1607 bp, Oryza sativa
  ref <308>: DATABASE ACCESSION NUMBER: AK108693
  ref <309>: DATABASE ENTRY DATE: 2002-08-28
acgactctcggcaacggatatctcggctctcgcatcgatgaagaacgtagcgaaatgcgatacctggtgtgaattgcagaatcccgtgaaccatcgagtctttgaacgcaagttgcgcccgaggccatccggccgagggcacgcctgcctgggcgtcacgttggaacaaaattgcgaagcgcttgaatgggcaaattacgccaaacttaaaaaaaattatctgcggcgcaggtgtccatgatgtactctatcagttcttctgctatccattttttgctttcctattgcctgggaggaaatctactctctgtggctctgaaagttcttctgagtcatacctttctttgacacatgacctagaggtggaagtggctattgaggtttatagatccatttgtgcaaactccaatcatggtccagaggctgatcacaaggttttcctggagagcttttgtggatttgttgtaagcataattgatgaaaacatctccctgttccaagccaacattgagtactgttcagagaagaagtttaaaaattgtgctatcctttctactcttggcgaactagttagcggattattagagaatggtcatattttgaactacgctatcaaagagccaacagaagcaagtgaagagtctgctggatatagccagcctagcatccttctgtgttgcttgaggcttgttagcaggtttatgggactgtcaactattgttatcaaagcaaatccaactacccaacaccagatcatgagcagggttttttcatctttatctgcgttcgctgggtatcttctgttgaagaaagatgttcttctattctttgagataattggagagcaactaactgaatgtctctctttatctggcacattataccgtgaaatgcaacatggggaaaccattaatcagattgagaaactctggctcaagatcatcatgtgcctaaagatgagcaagctcatcaatgattgttccttccttcaaaagcagcaaatgctacttcaagcggcagtcagtcacccacatcgtcccatttcggttgcaactacaccagcctggagagcatcaagatatgatatctcaaccttgcagcactcatcattctccctttctaaactggataaattgccaatggagagaagaaaagatcttactgacccttgcactcctcacaatgccatcgcgctcgaagaaatcgacattttgaggaagttcaaacacccaatttctgagttggagaagaatgatgaatctattaagatctctgtgggtctagggagaaagaggttgaagatcatgaagtactcaatgaagccaagggaacctggaaaaagtacagttcctcctggtaattttagctctaaaaaggatactgatgctgatgccttctcatcgcattacatggaaagcaaagcgtgtaggaaaccggaattaatacttgaaatgcttaaaagaaaaagatagatatgccacgaacatatttgcttgtatgatcgtctaaaaaaagttgtattcccgaaaaaagtttataagactgctgtacatttgtatacagttatactaaattggttgttggaatagatacactttgactttgtc

SEQ ID NO: 11346 - DNA, 1472 bp, Oryza sativa
  ref <308>: DATABASE ACCESSION NUMBER: AK108694
  ref <309>: DATABASE ENTRY DATE: 2002-08-28
gatggctgtggctgcaatccgattcaggtagatcgacaacgtcggcgggatggacgatgccggtgagatctgctcgttctcgcggtcgtcgtcttcggcgagggaggacgacgaggaggaccagcggtgggcggcgctggagaagctgccgacctacgaccgagcacggacggcgctgctggccatgccgccggacggcgagctgcgggaggtgaacgtccagcggctcgccgccgtggagcggcgcgcgctgctgcagcgcgtcgccggcgtcgccgacgaccatgcacgcttcctcgccaagttcaaagaacgcgtcgatcgggttggaattaagctaccgacggttgaagtgcggtatgagaatctgaacattgaagcagagtcgtatgtgggcaggaggggacttcccaccattctcaatacatataccatcataatggagggcctgacaaatgctctttgcattacaaaaaagataacacacaaaataccaatccttcacaatgtgagtgggattatcaagcctcacagaatgaccttgttgttaggccctccaggttcaggaaaaacatcactattattggccttggctggaacatcaaccttaaaggtatctggaacaataacttacaatgggcattcaatggaggaatttgtgccccaaagatctgcagcttatgttagccaacatgatgtacatatggctgaactgacagttcgggagacagtcaatttcgctgcaaagtgtcaaggggttggccatcattatgacttgctaatggaactgttgaggagagagaaggaacaaaatattaaaccagatccagaaattgatatatatttgaaggcagctacaacaggagagcagaaagctgaggtggtcacaaatcacatactaaagattttgggattggatatctgtgccgacacaatagtagggaacaatatgctgagaggcatatcaggagggcaaaaaaagcgactaacgacagctgagatgattgttacaccaggacgagcacttttcatggatgagatatcaactggacttgatagctcgacaacattccagatagttaacaccatccgacaaaccattcgcattcttggtggaacagcagttattgctttgctacagcccgcacctgagacatatgaattgtttgatgatataattctactatcagatggtcaagttgtctacaatggccctcgtgatcatgtgcttgagttctttaaatcggttggattcaaatgccctgagagaaaatgcgtagctgacttcttgcaggaagtgagttttaccatggtttgaccttagcattatttttggtcaagtgcttaactatgactaattataagtggcttattttaggttacatctaggaaagatcagaaaatactggataggtagtgatgacacataccaatatgttcctgttacgatgattgctgaggcatttcagtct

SEQ ID NO: 11347 - DNA, 1463 bp, Oryza sativa
  ref <308>: DATABASE ACCESSION NUMBER: AK108695
  ref <309>: DATABASE ENTRY DATE: 2002-08-28
atcaccagcctcaccttggtctccacctcctccgccttcaccaccccgtcgtcgtcatagccatccatcaccaccccaagcttcatctcctccacgacgaacaccttgttcatcctctgctccgcgtacatcggccagcaaaccataggcacccctgccgtgacggcctccagcgtcgagttccacccgcagtgcgtcacaaacgcgccggtcgccgggtgtcgcagcacctccacctgcggcgcccacgacggcagcaccagcccgcgcccccatgtcctgtccaagaacccctccgggagcagcgactccagcgccgcctcgccgcggccctcaagccgtttcgtcgagtccgcgtccgccgcgaccggcgcgcgcacggcccagaggaacgagtgcttgctcctctccagccccacggcgatctccttcagctgctccgccggcaccgagctcgcgctcccgaagcagaggaagaccacgctccgcggcggctgcgcgtccagccaccttaggcactcctgcttctcctcttcgcctccgcgctcttcgccgaccaatgggccgacgcagaataatctcggcgcgggctcgccagggcgggggatcccgtctcgtattgccttcacggcgcggggctccagccactcgaacgtgttcaccagtacgctcttcgctttggccagctgctcgaagaaagcgatggttgccttgtactggtccttgtcgcggtcgagcaggagcacttccggcaagtcggacgccggaatcggatggactcccgggatgcgcagcaaggagcgccccatctgcccgaaggacacggcggatcgcatgacggggatgtgcaggtaggaagcaagggccgaagcgcaggagacgaagaacaggtaggccgggacgccgagctccgcggcggcgtcgagcccatacgcacagaagaagtcgatgacgagggcctccacggacgggagggagcggacgaaggcggtgagcgcggcgttggtggcgcggaggtcggcgaggagggtgatgaaggggtcagcgtcagggtcggccgtgtcggcgccggaacgggccggtgccgccggtggtagcagctggaaggagacggaagggtagtaggcggagaggcgggcaacggtcttacgggactcgcctgacgacggaacgtcggcgacggcgaccgtgacggggacgccatggttggcgatgcgatcggcgagctgcgtcatggggtggaggtgcccccggaccatccatgtgtacagcacgaccctgctcctcattgctcgattatggctcgtgttttctgcgtgtttatggagtactacaaggggatataaatgggaatctatgttgccgacggccgagttgttggcagtcatcggcagccggcaaagttggaaccacgagctatatcctattatttgattcctagtgatgagatgatgttttctaat

SEQ ID NO: 11348 - DNA, 1488 bp, Oryza sativa
  ref <308>: DATABASE ACCESSION NUMBER: AK108696
  ref <309>: DATABASE ENTRY DATE: 2002-08-28
acctggaaggtgctacacgtacggtggagaagatgcgcttctctgatctccacgtctagtggcggtcgacgaagctcttgatggcgtcgacgagctcccgggtcctctcgccggtggccgggtccatgtcgacggcgtacttgttgaggtagaaggagtggctcatgccgcggttgaccagcacctccacgtccttgccggcggtgcgcagcgcgtcgcagtactcgaggttggtgtcccggatgaggtcgtgctcggcgacggcgaccagcagcggcggcagcgggacggactccagcggcggcgcgttcggccccatcgggcacgtgtacgggtggtccttggtggcgccctcggggagcgccatggcgaggaacttgtcgagcatgtcgagggtgaagaacaccgagtcgggcctcggctccagctccgacttgctccgggtggcgtgcacgaaccccgggtggagcgggatgcctccggtgacgcggaggggcgcccagctgtccgccccgtcctcgccgacgcgcgcgccgacgtggtggacgaggttgccgcccgagctgtccccgatgaggaacacccgcgagaagtcggcggccgtccggaggagctccgccgccgggtcgccgagagcggcggcgtcggacagcgcgatggagcggagccggcggagcccgtcgacgccggtgtcgatgtgcgccggcaggcggcgctcgggcgccaagggcagctcgacggcgaccaccacggccgggagcgcgcacgcgaggcgcgcgtagaagtggtggtacatgagccaggacgggtgggagatgcagaagccgccaccgtggagctgcacgacgacggggaggcgccgctcggcgagggcgacctcggggaggtacacgcggaggttgggctcgccggggaggtcgtgcagcgtgtggccgtcgcgcggctcggcgtaggcgggcaccggttgcatcagcgggagcacctcggggggacccgtccacgtgcggtcgacggtgccgtcgtcgaacacgcgcagccagccggacacctcgtccaccaccttgcgcccgaccgccgccgccgcgacggcgtcggtggcggcggcttgcacctgcgcctgctgcgactcggtggcgatggccattgctgccgtacgtacgtcaggctagtggcgttgcttccgccgtgtgtgcgatgcgattcgatgtgcgcggtgcgagagatggatgaagtggcgagggttttattgccggtgaccgagtggctccgtgttgcagttgccgattgtactactgggaagtttcgcacggaatatcacggcgattgccaagcaaaattttcccggattcgcaagcagagttgctgcagagtggtggagacttgacaggttaggagtagggtcgtgtgtggacttgtagagcgactagaccaaccgaatagcgagtgttctttttttattgcgaaaattatattgactttggtggttat

SEQ ID NO: 11349 - DNA, 1255 bp, Oryza sativa
  ref <308>: DATABASE ACCESSION NUMBER: AK108697
  ref <309>: DATABASE ENTRY DATE: 2002-08-28
ctcaacgcgaggcgggtgcgctcgttccgccccatccgggaggagcaggtcgcccgcctcgttggcgccatcgccgccgccgccgccgctcccggcggcgatcagccgccgccggtgaacgtgagctggcagatcgccggggcgcttaccgacctgacgctgcgcgccatcatgggggagtgcggcttccgatggcgggaggagttcctggagacgctgggcgaggcgcagaggaaggcgagcaggttcggcgtcgccgacctgttcccgtcgtcgaggctcctccgcgccgtcgggagcacggcggtgcgcgacgtgagggcgttgaacgccaagctgttcgagctggtggaccgcgccatcgagcagcaccgggaggcggcggcgacgactgcggctggcggcgaccacgacgacggcggcgacgacgacgcgcgtgacgacaacgagtgcttgctgaatactctcatgagaatccagaaggaaggtggtggcactctctccatgtcaacagtcaaagccgttattcttgacatgtttgcaggtggaagcgaaacaacatcaacaatacttgaatgggccatgtcagagcttgtgaagaatcctcaagtgatgcagaaggcgcaagcacagatacgacttgctttgcaaggaagatctagaataacagaagatgacttgataaatttaagttacccaaagaatataatcaaggaaacactaagactgcatcctgtagcacccctacttatgccaaaagagtgtcaagagtcatgcaaaatattaggatataacattccaaaagggtcaatcatgttggtgaatgtatgggccatcggtagagaccacagatattgggatgatgcggaagtatttttgccaaagcgttttgaggaaatcacagttgattttggaggcacaaactatgaattcataccatttgggggaggacggagaatatgtccaggcataacatttgcacatgccacactcgagttggccctcactgctctcctataccattttgattggcatcttcctcctagtgttacaccagatgggttggacatggaagaggaattcgggatgaacgttcgtagaaaaagggatcttcatctacatccagtaattcatgttggagtaaaaaaggtataatgagctagatatatggttaatgtaagtgcatttttataggtgtgtatcgacttcttgaataatcatcctcaataaagttgcacgactctcttaaagcggt

SEQ ID NO: 11350 - DNA, 1223 bp, Oryza sativa
  ref <308>: DATABASE ACCESSION NUMBER: AK108698
  ref <309>: DATABASE ENTRY DATE: 2002-08-28
caagaatatcacatttggctttacacttttctggtttgaggctcatgctatgttctcagcccaacctggttacaacgattggttcatatctttctacaatgttgcctttacatctctcccggtcattgctctaggtgtctttgataaagatgtctcttcccgtgtttgcctcgaggtcccttcattacatcaagatggcgtgaataatttattcttcagctggtctcgtatactcagttggatgctgaacggagtttgctgttcaataataatatactttggagccctccatgctgtcctcattcaagctgtccgacaggatggccacgttgctggatttgacatccttggagtgactatgtatacttgcgtagtttggactgtcaactgccaactagcactctacatcagctacttcacctggatacagcatttcgtcatctggggcagcatactgatttggtacacttttctggtcatctacggctcgtttcctccaacaatatcaaccagcgcatatcatgttttctgggaagcttgcgcttctagccctttatactggttatccactctagtcattgttgtgacagccttgatcccatacttcctctacaaaatcacacagtcgctgttttgcccacagcattgtgatcaagttcagagacctaattcaaaagaattggtggctcaataattatgggactgaaggggctcaattgagagattgctatggtatcctaacaactttacagttcagtttataaaccatgatattttagatggtgaatatagtatcaaaacaaaaatagctagttaatgtgttagagttagattgtgtacatacttgagctcatacccaaaaaattagtgtcgggctatagtgttgcatgagttgatatgggaatggaagtggctgcttcgacaggctcattgtttccattatactggtaaagtacagttgcttcagcggggaacttgtgttttcggacacaaggctgatattgttactggtcaacaaacccgtgagttcactcttggtcctctgatatggctcgtccttttttttttgtttattagtaatcatgattgtaatttggttgccaggagggatgagatctgttggctagtgctttgtacagccgaattagatgtttatcccccttttatgcaccatcattgtaattaagtttaagcagataatgttggcgtttttttgtgaggcc

SEQ ID NO: 11351 - DNA, 1414 bp, Oryza sativa
  ref <308>: DATABASE ACCESSION NUMBER: AK108699
  ref <309>: DATABASE ENTRY DATE: 2002-08-28
atcatcgaaaccatcaacaccacgcgcaatctgatctggaaaatccgcaggatccaccggagatatcaggaaacttactggactggtttctgggattttaggagatggcagcgacggagaggcgcacgtcgggggcgccagtgcgatctttcaagcgcgcccgcgtctcccgccctccttctcactgggagcagacttcgactggcaatcgggcggatcttcctttattaaaacactggcaaaaagcggctaccgagacagcttccttcgcaaagtacaacgtggagccagaggtccctacttttgatgatgcgcaatacgaagagcacctcaaggatccaaattggactctggaggagactcgctacctcgtcgacacttacaaggagtgcaacggcaagtggactgttgtcatcgaccgctatgacaagcctgaacggacgatggaggacctcaaggcgcgatattattctatttccgctgtgatgctgcagcttgaaacgcccatccaatctatgacagcgccacagtacaaaatgtacgaaactctcaaggacttcaatccaaagcaggaaatgtcgagaaagcgcctagcggaaggtcaccttcatcgtaagaaggacgaggtcgacgaggaagcggtgctgctcgccgaactgcagcgcatcatggccaaccaggaatctctcgacaacttgcgcgaagatctccgcaaacgactcgactaccccaaagctggcaccaacagctaccaatactcgacttcacaggcgttacatacactttggcagcagcttgtcaacgccgatcgtcagcgcaagacccaacgcctccggactggtactggacaaacagctacctctatcgagactcctggcgcaggccagacccccgctggtccaggccgtccgcgagagtcaaatgctggcacgacacacgaaccatccccttcgaccagcaataccaagcttacggcaaaggacaaacttcgcttcggcgtcacagaagtcggtccgggcgagaaactgcccagcggcgtttccttcgcctccgacaagctgtccaagccacgaattgcgaagagcaccttgcagactgagaagatcgctgccatccttgcgcacgttggtgtgcccgaactgattcctttgcctactgcacccgtcatcgaagcatttgactcgctcatgggcaagctgcacacgctgcttgacatgcgcaagattgctgagaaggaggagcaggagctcaaggtccgagaagcggaggctgctgctttggtcaagagcgagtgatgccctccttccaagtgcgttcaggttttagcgaggcgttctgggtttgggctggtaggccatggtacgattaagcagacagagcaagtttacattgtatattacccattgattgttcg

SEQ ID NO: 11352 - DNA, 1347 bp, Oryza sativa
  ref <308>: DATABASE ACCESSION NUMBER: AK108700
  ref <309>: DATABASE ENTRY DATE: 2002-08-28
ataacgcagatcagccaagaacgagttcatcttcttcttcgtgttgttgtagcatttgattcgagatatggcggcgactgacatgtctcccaaggccggcaagccgctcgtcgagaatgacgctggctcatacctggcgtggtccggcaaggaccagccggccgtcgccggcgagaagctcgggtgcggcctactcgtcctgaagcccctcggcttcgcgctgccgcactacgccgactccggcaagttcggctacgttcttggcggcagcgcggtggtcggggttcttccggcaggggtggacgccagggagagggtggtgcggctcgaggccggcgacgtgatcgccatgcgcgccggggaggtcacgtggtggtacaacgacacggacggtgaggatgtcaccatcgtgttcatgggcgacaccgccggcgccgtcagcccaggcgacatctcgtacttcgtcctcgccggcccgatgggcgtcctgggaggcctcgacgccggcctcctcgccaaggcgtcggggctgacgtcgccggagcaggcggccaccgccttccgcagccagcccgccgcgctgctcaccaggctaaacggcaagctgcacggcgtccgcccacgcgagcacgacaggcacgggctcgtcgtgaacgcggcgcgcgtgccggcggacagcaacaccggcggcgccgccgccgggacgaagacggtcaccgcggcgcacctgccagtgctggcgcagctcgggttcagcgtcgggctcacgcgtctcgacgcgggcgctgcggttcgcgggccctgggtgctccgcgacgccgcggcgcaggcggtgtacgtcgccagggggagcgggcgcgtccaggtcgccggcgccggcggcgcgtcgacgctgctcgacgcggaggtcgcggcggggagcctgctcgtcgtgccccggtacggcgtgtcgctcgcggccgcggacgacgccggcggcatggagctggtgtcgctgatcaaaagccccaggccggcgacggagcacttcaccgggaagggatcggtgatcggcggcctgacggcggagatcgtgcaggcggcgctcaacgtgtcgccggaatttgtggaacagctcaggaccaagtactgaacgccggatttgatgaatccggtactgtacgtccatgtgtcctctcgtctctatacgtttcctgttttcagcacgcgacgaagttaattaggcagtggctactgctccggtgttcagtcttgacacgtgaatagtctctaaacgaaataattaatcgaaaccatactgtaattagctgaagctgaaactacttgtatgcaatattattataaagt

SEQ ID NO: 11353 - DNA, 1282 bp, Oryza sativa
  ref <308>: DATABASE ACCESSION NUMBER: AK108701
  ref <309>: DATABASE ENTRY DATE: 2002-08-28
atgaaaagtagagaggggggtgatcaagtggagcatgggataactactgggtgatgcattagttcagctaagttgagcggggcacgtttggaatgacttggcacatgcttgcttgctaacttatgtaattcgtgggtatcctcatagttaagctatgtttcacttgaggtatgcctgcaggtaaggtaatttctgctagctttcttgtaaagatgggaaggtatgtagctagggctgagtttgggaactccaagcctcttttagtaaatagtagagagatatttatttaattcctgaaaaattgtgtgaagtgagagttactagtagtgcctgcaggtgatatatggcataagtaacccaacaggtgacaagtaacccccgttattcttgtaatgtattatgctcttccaatgcaatttgttgcttcatcttgggccccctgtgtactcatccttggtagaaaaacagagcttacaaacttgggagttcaaaatagccaaaaaaaaacttagctagctaggtgaaagtaatgcttaattaatattttttgtgtattgtcctcttgcaaagttgatgtgcacaggcaactgcatcagatctataacataccctaccatattacagtgaaacggaggagatctcagggaatggctgaagttgcattggaccaatcttggtccgacaagcctccaagacaaacttggattcaatttcgttctggcagatcggtatgaatgccatcctcgcaagcattgcgcaagttgatagtggtgatattcttgaaaagaaaaaatcgatagtggtaatgagaaaagcacaggaggaggacaagaggacaagtgaggcggcaagctaagaagacggtggcttggcgtgcttggcgtaatctaacttgattaccaggcagaggcagacaaacactggattctagctcgatggaagatgttcctgccacatgtgcatgcattcatgctggcttaaggaaattattcagggagacatgatgcccaagcaagaagatcgagggcagggctgctccagatgagatcatcagccgcagctacacctctacctctgcttcttgttttcctctacctgtaggctgtagcaacaacaagttttcctctacccctctgcttcttgtttagcaacaacaatagtactactgctctgcttcctgtgtgtcatctgcatcaatgatctgtgatgatctattggatgtatctcagtatctgtgcttatagctttccaccatcgaatcgaacatgcacgactcattttc

SEQ ID NO: 11354 - DNA, 1209 bp, Oryza sativa
  ref <308>: DATABASE ACCESSION NUMBER: AK108702
  ref <309>: DATABASE ENTRY DATE: 2002-08-28
gaagcttcccggttgacgacctctccggtctcccccctcaccccaccgcaacccgggacgtcttccatggccgccgccgccgccgcccccgcctactaaaccaccctacccaccccctccaaactcccacacattacatccttcaaagagagcatcacacacacacacacaccagcctagcgatcacatttccacgatgacgacgacgacgcgagtggcggccgccgccgccggcgtgctgctggtggcggcggcgctggccggcgtggcgcgcggcgaggacccgtacgtgttcttcgagtggaaggtgacgtacggcaccaagaccctcctggacgcgccgcagaaggtgatcctgatcaacggcgagttcccgggcccgcggatcaactgctcgtccaacaacaacatcgtggtgaacgtgttcaaccagctggacgagccgctgctcttcacctggaacgggatgcagcaccgcaagaactcgtggcaggacggcctcgccgggacgcagtgccccatcgcgccgggcaccaactacacgtacaagtggcagcccaaggaccagatcggcagcttcttctacttcccgtcgctggggatgcaccgcgccgccggcggctacggcgggatcagcgtcgtcagccgcctgctcatcccggtcccgttcgacccgccggccgacgaccacatggtgctcatcggcgactggtacaccaaggaccacgccgccatggccaagatgctcgacgccggcaagagcttcggccgcccgcacggggtggtcatcaacggcaagtccggcggcctcagcaggttgtctcggcggaggggcaaggacggcggcggcctcggccggctgtctcggcgacgccgggaaggtcggcggcaggagacggcggtggtcggcaccggcgctggatctgggagcgctgagaaaaagcgatgcgggaggagaggaaaaatcgcggatcggacgggagggagagagaatagaggggaaagcggtggggcccacgattggccaggcctttttggctggctatatttggccagtgcaaggggaactttggccagtaggatggcttggccagccggttagccagtctattgaagcacgaatttgagccaaaattgctacaatttaacttagagaatggaataagaaggctgttgaagatgctcctagaagcctatgttcttttatcc

SEQ ID NO: 11355 - DNA, 1234 bp, Oryza sativa
  ref <308>: DATABASE ACCESSION NUMBER: AK108703
  ref <309>: DATABASE ENTRY DATE: 2002-08-28
aagtcacaagtggagcgcgtgcgaggatgagccccagcgccgcggccaagatgcggctcggcggcggcggcggcggtggcggtttcatgctcgggtgcggctgcagggatgccaaggctgtggcagtggcggtgtccgccacgtcgccgtgttccgccgccacggagacgtccacggccaccacggcgacctggcgcagggcccggacgcacccgtcggcgtcggcgtcggcgtcgacgggcacgctgaccgtgccgtccgcctcgtcgtccttcctgtgggacgatgccgacgctgaggccgacggcgaagaggtcgacttcaagcgggagagctctgcgaccacgccgagcttctccggccttctgcggcagctgaacgagctcgagcagagcgtcatgacgtgggggtggaagagccctcgccgcggtaatcacttctcgccaccgccgccgcctcctccgccaccgccgttacctttacggccagtcgtcctgcaccgagctgtggacgccggcgggaagcgcagcaacaaagaagacgatgccaagttctcttcgccaccgccgtcttcccattgcccgacgacccagctgcaccggaaggtgaagagcgttgaccaacgaaacagagaagatgatgaagcccacttcgcgccaccggcacctccgccattgcccttgccgccgcagcagctgcggaacgtgaagggcgtggacaaaggcggcagcaaagaagacagcaagcactgtccgccaccaccgcaggcgccgaagcaccggaaaacgaagagctgcgacaacaacgacggcttcaccgccggaaagctcgacgggagcttggcggtggtgaaacagtccgaggacccacgcggcgacttccggcggtcgatgctgaacatgatcgtggagaaccgcatcgtgaccggcgacgagctccgggagctgctccaccgcttcctcgagctgaacgcgccgcaccaccacgacgccatcctccgggccttcgccgagatctgggacgaggtgttcgccgggccggacgagccccgtcacggtcccccgaggccgccgccccggcagagaacgccacctcgccgccggcaccctctaccggcttggcgcctgtagtaaccccacacatggatacttaccgcgtagtatgtacaatgtagattactgtactaggttgcgtccaagaaattctcggcctcatctgatcacgtatctaccgg

SEQ ID NO: 11356 - DNA, 1276 bp, Oryza sativa
  ref <308>: DATABASE ACCESSION NUMBER: AK108704
  ref <309>: DATABASE ENTRY DATE: 2002-08-28
aatttggcgccgtaactccaaacagcatatagcgatagagcgatatactcgtatatatatagctctcgatctcgccggctggctggccggagatcgatcctctgtgtcgtcgccggcagtagctagctatgctcccgtacgcgacggcggcggaggcggaggcggcggtagggcggggcctgacgtgggcggaggcggcctggttccgctactcggcggccatcccggactactgcctctactgccacaacgtccccatcctcctcctcgtctacaccctcgcgccgctccccctcgcgctgctcgagctccgccgccacctgccgctgccgcacaagctgcagcccggcgtgcgccacccgccggccgccttcctccggtgctacgctgccaccgcgcgcgtgctgctcctcgccgtcgggccggtccagctggcgtcgttccctgcggtgagggcggtggggatacggacggggctgccgctgccgtcggcgggggagacggcggcgcaggtggcggtgtacctgctggtggaggactacctgggctactggatccaccgcctgctgcacacgccgtgggcctaccaccacatccaccgagtccaccacgagttcaccgcgcccatgggctacgccgccccgtacgcccactgggccgagatcctcatcctcggcttcccggccttcgccggcccagccatcgtgccgtgccacatgaccaccttctggctctggttcgtgcttcgccacctcgaggccatccacatccacagcgggttcaagttgccgttcgatccgaccaagtatatcccgttgtatggaggagtggagtaccatgactaccaccatttcgtgggaggacacagccagagcaacttctcttctgtcttcactttctgtgattacatctacgggactgacagaggctacagataccataaggcaagcttgtcaaagctgaaggagatggcaggaaaccacgttgagaaaggagatgaaaatggattcggcaacgggaaacaagattaattagagaccaactgcaattgtaggcaggttggctcatgcagcatctgaagttttctacacagccctcacacaggaaaataatctgtgtcatgcagcatataaccaaactttgaatggaaattccctgttgtcaataacaaggttttcatcatgcccctcgcttatggaactatgcttgatcctacaattaaagatggaaattccacatgagtatgacccatgactggggcatgtagcctcggtgt

SEQ ID NO: 11357 - DNA, 745 bp, Oryza sativa
  ref <308>: DATABASE ACCESSION NUMBER: AK108705
  ref <309>: DATABASE ENTRY DATE: 2002-08-28
agttcttcatccaatctcctctcgatcgatccccactgcaacctctgcagcaatggctatggcgggctgctactgcgtgcgcgagcaccagcttgaagacgacgacgccgtcggccaccggctcctgccgccggagatcctggtggagatcggcattattgctgctgccgatcacaccgccgccgtccacgctcgccgcgacgccgtcgtcgaggagctcgccgcgcgcctcgtcggcatcctcggcctcacgtcgccgccgtccgccggcgcaggcagactgggagagaaacgtgccgcggctgcgacgacgacgacgagtagtggcggcgccaccccgccgtacggccgctcacatgtgcgccgccgcgagcagcacctcgccgccggcggcggcggcggcggcgtcatcgacggagggatggcgcggtaccacgcgccggggttcgggacgacacagtggctggcgccgccggcgtggtgcggcggcggcggcggcggcaccggcgtgttcttgccgcgtggcgaggtgtacccgacgagaaccttgaaccctcccaggaaacaggtgcgaaaccgccgcgtctgctgaggaattgaaggaggctgccaatgccatggagacgtacgtttagagaaatacactcatgttcatgtcccaaattaaatcatcacataataaatgtgtaatcatccatttgtagacgaatatcacttaagagcagcatgtacaacgatctttatt

SEQ ID NO: 11358 - DNA, 1517 bp, Oryza sativa
  ref <308>: DATABASE ACCESSION NUMBER: AK108706
  ref <309>: DATABASE ENTRY DATE: 2002-08-28
accgtctcttcccccccctcccttcccttcccttccctcccctttctctctccttcccgatctctctctctctctctctcctcgagctctcgccgcacgctcccaaaagcggcgccgcgccgagctcgagctcgagctcgcggcgggcgacgagctccggcgagcgcgcgcgcgcacgctgaccagcgggggtttccccgtccgagctcgcgcgggcgtcgtctcgtcgggcccccttttcacctttctatcggtcattgaggggtgttctctctccccccaggccaccgcttcgcctggccgctcgggcgctcgccgcggattttcctggcccgccgagtggcgggatcgcggccaaccgcggaatggcgcagagcaactgggaagcggataagatgcttgatgtgtatatctatgactatttgctgaagcggaatttgcaggcgacggccaagtcgttcatggcggaggggaaggtctccgccgatccagttgcaattgatgctcctggagggtttctctttgagtggtggtctgttttttgggatatatttattgcaagaactaacgagaagcattctgagatcgcagcagcatacctagaggcacagcaaacaaaagcaagagagcatcaacagcagatgcaaatgcaacagttgcagctaatacaacaaagacatgctcaactgcagcgaactaatgccactcatccttcacttaatggtccaataagtggcctaaactctgatggcattctgggaccatctacggctagtgttttagctgccaagatgtatgaagagcgcttaaagcactctcatcccatggactctgatgggtcacagcttcttgatgctagtaggttggctcttctcaagtcggcgtcaacaaatcactcagagcaatcagtacctgggactcctggaagtgtgtctacgacgcttcaacaaatccaagctcggaatcagcaaaatattgatataaaaagtgaaggtaacatgagtgtagcacaaagatctatgcccatggacccatcatcattatatggtcagggaataatccagccaaagcctggattgggtggtggagttttaaaccaaggagtgagtggtctaccattgaagggctggccgctaactggaattgaccaactgcggccaaatttaggtggtcaaatgcagaagccatttctttcaacacagtcgcagtttcaacttatgtcgccacagcagcagcagcaattcttagcacaagcccaagcacagggaaatcttggcaactctaccaatttaggggatatggatccccgaagattgtcagcgctaaccaggagcgtgttgaatggtaaagatggacaacctgctggaactgatgggtgcattacttccccaatgcaatccagttcacccaaagtcagaccagaccaagaatatctcatgaagacatcttctcagcaaacacaggaacaacttcagcagcagcataatcagcaacagcaacagcaaacacaacagggc

SEQ ID NO: 11359 - DNA, 1308 bp, Oryza sativa
  ref <308>: DATABASE ACCESSION NUMBER: AK108707
  ref <309>: DATABASE ENTRY DATE: 2002-08-28
gtgtaaaaaaaaaagaaaagaaacctagctccgcctccgccgccgccgccgccgccgccgccgcaactcgagcggcgaatcggcgatgccacccaaactgaggtcgtcgaagggggtggcgccatccccttccaccggcgagggtggagaaagccacacatcgaaaaagaatcccgctccggctacggctcccaccgccggaagtgttactcgatctagagcgagggatactactgagcgcgctagagctagtggcgggggcacggcactggatccgaagaagagaaagaggacagaagagtcagcggcgtcatcagcagcggcggcaggtccggttccgaggaagatgaccaccgccggtagtacgaccttggcctcccggccgctccctcttcgctacccgccttatcccaccttaccaccggggactcgtcctaccagcagacaatatttggatcccgtccttgacagaaaatatttggattccgttcttgagtgggccaaggagcgccgccggatcgccaaactctccaagaaaggttcaattcaatatttctttccttctttctataatttgcttcctatccctcctgcttgatccatgccactgaccgccatccttcttttcgttagctcaatgtaaagatatccccactctcaggcattcgcccatggatcccatcactgcagatgccgtcgtcacatcacaagacaaggccatggtgctgcgtgtggctcgctccgttgtcagtgtttcatccacaatgcctggtagtaacacaattatctaaggctcaattcgttattattcattcatatgatcgattcctcctagctagctaaatggcattcgatgactttgcagatgggggtggattgatttcccggtgcactggcgtcgtaatcggttgggatggggctaacaaacgtgccaagatcctcactgctgcttctgttgtttgtgacttccatggtgaattgcatgacccagcactcaaggtacttaactctcttctttgaattatatatatatgccctgtgtgtagtctatgttaaatgcttcatatctcataactgtagttgatcatgtcgtctgcaattcgttttaactttttgagataccaattgctgcctgttatctgattcctctttgtttatcatgtaagtttcaatttacgttgccgttaattagggaagtaattgctcattgtagctcaacttgctgaatttttgaaattgaatagaaatcgggaggtattttaatacaaacttgagactgcttggcaaaaaaaaaaaaaaaaaacaaag

SEQ ID NO: 11360 - DNA, 553 bp, Oryza sativa
  ref <308>: DATABASE ACCESSION NUMBER: AK108708
  ref <309>: DATABASE ENTRY DATE: 2002-08-28
atcgtcccctccgcgatcgcaggcgctcgcagcgccatgccgaggaggagctcgagctccatccacctcccccgcaatctctttcaccgaatcactgatcaagccgccaccaacagcaaaagagaccgcctccgcccccctctacctccgcccaagagccgcacaacacttcgcctcctccaccgccgtcgccatccgcaaaccaggcgaaaccctaacctcaccgcctccgccaattcgcgagaactcgccgcacctgagacccggccttcgtccgaaattgaggtgaccagcatcttctacacgcgatgagtctcctttaccctctcttttcctggcaacaccaccgtagctcgccggagcgactcccgcccacccgttcccccgccgccgggaagggaacggttggaatttcacagttaagatgcataaatgcattgttagatagattaactccaggggcaaagcttaggatagtactctattactttaactggtgatgcatgtactgaaattattctgaagactgtcaatcacaaaagttatatccttc

SEQ ID NO: 11361 - DNA, 1031 bp, Oryza sativa
  ref <308>: DATABASE ACCESSION NUMBER: AK108709
  ref <309>: DATABASE ENTRY DATE: 2002-08-28
aaattaagactcgggtgagctcatcaggctcagttcatccctctcgtgagatacagatagcctcgcaaatcagggatcagcgtgtgatgggcaggcagccgtgctgcgagaaggttggcctgaagaaggggccatggacggccgacgaggaccagaagctggtcaccttcctcctctccaatggccactgctgctggaggctcgtccccaagctcgcagggctgctcaggtgtgggaagagctgccggctgaggtggacgaactacctgcggcccgacctcaagaggggcctcctttccgaagaggaggagaagctggtcattgacctccacgagcagctcggcaacagatggtccaagattgcggcacggctccccgggaggacggacaacgagatcaagaaccactggaacacccacatcaagaagaagctcaagaagatgggccttgatcccgtcactcaccggccggtgatgtcactcgctcagcctgatcccctgaagcagcagcagcagcagcatgaaccgtccgtctccggcggcaccggtgccgacgacaaggaggaggaggaggaggagacgccgacgagcgcccagccacagggcgtcgcttgcgctgcttcatccgcctccgccgtgtcgtcgtcatgctcctcgtccgccccggcctccgccgcgacacccggcgcggacgtggactggcccggcctcttcgaggtggatgccattcttgacattgactgggctggcttattgtctgcctgcggcgacgatggcggctgcagcgccattggcgtcgatatgttgttcgaccaatgctctgacgttggctttgatcaagatgtgtggatgtgatcctgatcctgacaggagagtttacgtccgtgagtagaattagattggccgtgaagttgagattcatatcttcttctttcactcttctttgttttcctatattgaattcgtccgtgacaagcatgcatatttgttgacaatgaagaagagaagaaatggtttggtgtgttttgtgat

SEQ ID NO: 11362 - DNA, 1568 bp, Oryza sativa
  ref <308>: DATABASE ACCESSION NUMBER: AK108710
  ref <309>: DATABASE ENTRY DATE: 2002-08-28
aattcatgcatatctcaatgacactaagcccttgctggagttgtacaaaagttcacaagttcacttcttggaagaagatttcatactagagaatatcggttcctggtcagctaaattactcaagcaacaactctcgttcaacaagatatcgaaatcattaatgccagaggttgagtatgcccttaaatatcccttctatgcaaccgtggaagtactagagcacaaggggaacatagagcgattcaacgtaaacggcttccagcgtctgaaatctggatactgcggctccggggcagacaaagaaattctagctttggctgtcaataaattccactacgcccagtctgtttaccaacaagaactccggtatctcgagagctgggtggcagaatttaggctggacgagctgaaattcgcgagagtgattccactgcagtcgcttttgtctgtgttgtccccttgttcccctgcgagttgtccgatgcccgcattgcttggagccagaacgccatactgacggctgtggttgatgacttgttcgacggcggagggtccatggaggagatgctgaatttggtcgcgttattcgacaaatgggacgatcacggtgagattggcttctgctccagcaacgtagagattatgttcaatgctgtttacaacacgaccaagcgtatcggcgcaaaggccgcactggtgcagaagcgttgcgtcatcgatcatattgccgagcaatggcaggtgatggtgagggccatgctgaccgaggcagagtgggcggcgggcaagcacatcccggcaacaatgggggagtacatgtcggtggcggagccgtcgttcgcgttgggccccatcgtccccgtgtcggcgtacctgctcggggaggagctgccggaggaggcggtgcggagcccggagtacggccgtctcctggggctcgccagcgccgtgggccgcctcctgaacgacgtgatgacctacgagaaggagatgggcaccgggaagctcaacagcgtcgtgctgctgcaacctctcgccgccggcggcgccgcctctcgcggcggcggcggcgctccggctccggctccggcgtccgtcgaggcggccagggcggaggtgcggagggccatccaggcgtcgtggagggacctgcatgggctggtgttcggatcaggcggcggcagcagcagcagcatcattccccggccgtgcagggaggtcttctggcacaccgggaaggtggccagcgtcttctaccaggagggagacggctacgcacggaaggcaatgcggagcatggccaacgcggtgattctggagccactgcacctgcaagagtaacacctgaattaattcctacgtcttgttgcttggcaaatgacacatgatgcaaatggccactctccctcgctgaacattttctaaaactaggaagaaaacccgcgcatatgcgcgggcatttgatttattcttttacgaaaataatgcttacagaagtcatatatcattttaatatatttaaatgataaggaggcctcctagattaaataaaatcatttgccccgact

SEQ ID NO: 11363 - DNA, 1870 bp, Oryza sativa
  ref <308>: DATABASE ACCESSION NUMBER: AK108711
  ref <309>: DATABASE ENTRY DATE: 2002-08-28
gactagtactccctccgtcccaatataagtgcatttaggacaggatgtgatatatcctaggactacaaatctggacagttgtctgttcatattcgtagtcctaggatatgtcacatactatactaggtgtatttatattgggacggagggagcagtacttaaagtatatttgcaactttttactgaacttggtgtgctgtgtcaggcgactactccagaggattgattacttcatgccttgacaatgatgtgaagtagcatgaccttgcgattcatatggtcggggatcgaggcacatatacacccaacccagttcattgagtgatcagtagagagattcttcccctcttctcctgccagctcttccaggttctgagttctgaccatggcggctggagcgattccaatggcgtaccagaccactccgtcatcgccagactggctgaacaagggcgacaacgcatggcagatgacatcggcgaccctcgtcggcctgcagagcatgccagggctggtgatcctgtacggcagcattgtctagaagaagtgggctatcaactcggcgttcatggcgctgtatgccttcgctgctgtctggatctgctgggttgtctgggcatacaacatgtcgttcggcgaccgcctcctgccattctggggtaaggcacggccagcgctcgggcagagcttcctcgtggcgcagtctgagctcactgctaccgctattcgctaccacaatgggtcagctgaggcgcccatgctcaagccgttgtacccagtcgccaccatggtgtacttccagtgcatgtttgcgagcatcaccatcatcatcctcgcaggctcactgcttgggcgcatgaacatcaaggcgtggatggcctttgtgccgctctggatcaccttctcttacacggtctgcgccttctcgctctggggtggcggtttcctcttccagtggggtgtcatagactactctggtggctatgtcatccatctctcttctggcatcgcaggcctcactgctgcctactgggttggaccaaggtcagcatcagatagggagagattcccgcccaacaacatactgctggtgctagcaggggcggggctgctgtggcttgggtggacaggtttcaatggaggagacccatattcagccaatattgattcatccatggcagtgctcaacacacatatctgcgcatccaccagcctactcgtgtggacaatcctggatgtcttcttcttcgggaagccatcggtaattggcgcggtgcagggcatgatcactggcctggtatgcatcacccctggtgcaggcctggtgcaaggttgggcagctattgtgatgggaattctctctggtagcattccatggtacaccatgatggtgctgcacaagaaatggtcattcatgcagaggattgatgacacgcttggtgtcttccacacccatgcggtggctgggttccttggtggcgccaccactggactcttcgccgagcccatcctatgcagtctcttcctatctatcccagattctaaaggtgcattctacggtggccccggtggatcacagttcgggaagcagattgctggcgcactatttgtcactgcctggaatattgttatcacctccatcacctgtgtcatcatcagcctaatcctgcccctccgtatagctgatcaagaactgcttattggagatgatgctgtacacggtgaggaggcatatgctatctgggcagagggagagctcaatgacatgacccaccacaatgagagcacacatagtggtgtctctgtaggagtgacacagaatgtttgaacagtacccactttattgaggaaaaagaaatataattgtctt

SEQ ID NO: 11364 - DNA, 1478 bp, Oryza sativa
  ref <308>: DATABASE ACCESSION NUMBER: AK108712
  ref <309>: DATABASE ENTRY DATE: 2002-08-28
atctatcatcctggactgcgagctcacacacctcctccaccgctgtatttgtctctaacacccataccgaaatcatggcacctgcctcaaaggacggtctggacatcatcatcctcggtggtggcatcgctggcttgaccactgctctcgcccttaccaaatacgctcccaaaggacaggtccccagaatccgcatctacgaaatccgccccgtaccagcaaccatcggcggagccgtcaacctcacacccaacgccctcagactactcgacgacctaggagctctccccatcatccgtgagcgagactacggccgcacaatcgattacctagaagtcttcgacgtctactccacccgtctcgccacctccgacttcagcggcccagacggcaaaggcatcggcaacccaccctacaaagccctccgcatcacccgcggcgacgctctcaaaggtgtcctagccgccgtggagcagcaagagaacatctccctgacctgcggcaagcgcaccgtcgacatcaaggaaaccaccgaaagcgtcactctcactttcgaggatggcgagtctgtcagcgcggacctgctcatgggttgtgatggcattcactccgtcacccgcctgaagcacgtcgaccccgaacgcaaagcctcctactcgggcttgtgcaatgcttttggtttcgcccccgtcgagccagacttccccgtgcacttcgagtgcacggctatcaacttcgcccgccgcggcatgctgctgaccagctaccacaactcgcggaagaactctgtgtacgtcggcgcattgatgcagctgcccgagctcgagtcccgcgatggctggaaagccgctggcgcggatgccaagaagatccgcgcggatatcatggacaggtttggagatgcgaagattcccagcattaagccgttgatcgagaagacggaggacttctacctgtggcctgtgttcacgctatcgaagcatggcaagtggagcactgagagggtgatgttgcttggtgatgcagctcacgccatgccgccgcaaggcgaacccaccggcatcgtcttcgaagacaccgtcctcttctcccgctgcctgacccgttggatcgaaaagggcaagcccaacacaatgaaagaggccttcgacgcctacgagaaactgcgccgctcgcgcatcgaagccgctttcgaggagagcaagagcgttgtttccaccgtcagtgatgctggctacatcggccacacgatcaagacgtacatcatcccgtggtacctgtggttctcgcgcgcgagcagggagaagcactttgtggaggatgtgacgagcgttgatattggttactagttgatggatcgttggaaggagtttatggtgatggtgcgggggttaatttttcacggttcctcctttctcctttttcatcatcccacgctttagatatgaatgatagatgatgtcctccccctcagcatc

SEQ ID NO: 11365 - DNA, 1346 bp, Oryza sativa
  ref <308>: DATABASE ACCESSION NUMBER: AK108713
  ref <309>: DATABASE ENTRY DATE: 2002-08-28
attgccattgatcccattgtgtgagctcaatcgtgtgaagaagctagagcataaactgcaactgataggaagctagctagctagcaggaggatcaatggcgtcgtctccgacgatgttggtggtgatgtgtagtagcttggccatggcggtgatcctgtcgtcgagctcgccggcgatggcgcagctggacgtggggttctacagcaagacgtgccccaaggtggaggagatcgtgcgggaggagatgatcaggatcctcgccgtcgcccccaccctcgccggccctctcctccgcctccatttccacgactgcttcgtcaggggttgcgacgggtcggtgctgatcgactcgacggcgagcaacacggcggagaaggacgcgccgccgaaccagacgctgcgagggttcggctccgtgcagcggatcaaggcgaggctcgacgccgcctgcccgggcaccgtctcctgcgccgacgtgctcgcgctcatggcccgcgacgccgtcgccctctccggcggcccccgctgggccgtgcccctcggccggcgagacggccgcgtctccgccgccaacgataccaccacccagctgccgccgcccaccgccaacatcacgcagctcgcccggatgttcgccgccaagggcctcgacatgaaagacctcgtcgtgctctccggcggccacacgctcggcacggcgcactgctcggcgttcacggacaggctctacaacttcaccggcgccaacaacgccggcgatgtcgaccccgccttggaccggagttatctagcgcggctccggtcgcggtgcgccagcctcgccggcgacaacacgacgctggcggagatggaccccgggagcttcctcaccttcgacgccggctactaccggctggtggcgaggcggcgggggctcttccactccgactcgtcgctgctagacgacgcgttcaccgccggctacgtgcggcggcaggccaccggcatgtacgccgccgagttcttcagggattttgccgagtcgatggtcaagatgggcggcgtcggcgtgctcaccggcggcgaaggcgagatcaggaagaagtgctacgtcatcaactaataattaatctacgtattatagcttaattaagcaattaagctcgtaattatgtgtcttaatttttcctgctgattattgattaagtgttccctaattaatcatgcgtgtaactgatgtatgtgtagagtggtggcgacatatcgatctatactagttttacttggattactttgtttgttaattgtattattatgcaatgtaactaagaaattaatcaaataatgaatcaagtattgcacacgt

SEQ ID NO: 11366 - DNA, 1903 bp, Oryza sativa
  ref <308>: DATABASE ACCESSION NUMBER: AK108714
  ref <309>: DATABASE ENTRY DATE: 2002-08-28
cggcatcgcgcgcgatcaaccacttttgtcctgaccgcgccatggccgtccctgcctccgtcgtcgtcgcgtcgtgcctctgcgtcggcgcctccgcgtgcgtgtcgtcgggcctcgcgttctgcgccacgttcgccgtctccctccccttcgtggcgcgcgagctgtcgccggagcacatcgacggcgtcttcgccgccgtggacgcctgcctgcagaaaggggcttgctacgccagggccgccgtcgaggccgagacgcggcgcctgagggacccggcgcgatgccatccggcgcttgcgtttctctacgccagggccgaagggggcgcccgccgcgcccgcgcgctcgtcacggacgcggtcgatagattggaaacgagggccgcagaatcgaagtggcgcgacatgacggacgcatcagccgcggcattgcgctggctccgcctgatcgccggcgcgatcaatctggcagtggccgttctgatcaccatgtccgaacgccgggcagcctcgggcctcaggcgcagcggcgcgcacgggatcaggacgacgccgaactcggaagcaatgacaacctcgagctccaagcttgacgccacattgttcgtcgtctggatcaccgcgaccttcacgtacagcacgccagtgttcttccaatgcgccgtcaccagcggcatggcgtcgctcgctgcgtgcttcgcatgcttcgccacgatgtgctgcttcgctctaatgcaagccaacaaggttcacctgtggagttcccgcgacgctgccggcaggaacgctgtcatggccgaggtaccgcacgcttgggggttactctggtctgagatcaccctcgtcacctacctcgtcgacgcctgcttgctgtgcatcacgctggactcccgggcctcgcggcctgtggcgctcgcgttcctggccgcctgcaacctcgcgacgctcaaagtggccagtcaggtcgaggccatcggctccgcgggcgtgatcaggcgccgaggccacgccgtggcggtgtgcgcgatgggcatcgccaaggtgtttgtcgtgtgcttcgtgctcgacttccgcctgggcgcgttgagattcgcgtttctctgcagcgtgattgccttcctgttgaacaaggcggccggcagcttgccggacgtgtccaccccggtggacgccagtgcaggggatgctgacgtcgccggagacgttgaactgctgcctgaatacgttagtaattctgaggaattgagcaaccatgctacctttaaccataaggtggaagaagattcgagttcccctgctgccggcgaccgtgaaaacgaacatgattcaagcaactccgctaccattgacggtggagaggacgacacgactaccaaggagtattttgatggatcagattcggaggagcagcgtcaagaagaagaagaagaggactacggcggcggcatggacgaatggaacctcgttgagatcgatccggtgatgccgatcaacgttaatggtggcgccaagcgttggtgacggaagtacttgcgcagggttgtgtgattcacaattctgcacttgatctagatcctgttttgggagtttttaggtgctgcatcttctcccagaatcataagtttctccaaacagtccagcttttaatccagattttaagaagctgtagttatagaatcaaaaaataaactagaaatcagaagctgggaaaccagtttttgcagattctcaaaagctcttccaaccagcttttgcagattccaaccaactgcttcttagaattttaaactctcccaaacaggctcctattctccttccatttttttctgaacttgttgcatgttcacgtgtcattgagaacacgcaaaattgagaacacaaagaaaaaaaaaaacccctcc

SEQ ID NO: 11367 - DNA, 1590 bp, Oryza sativa
  ref <308>: DATABASE ACCESSION NUMBER: AK108715
  ref <309>: DATABASE ENTRY DATE: 2002-08-28
gaaccgccgccgccgccgccttcgattcgattccgatcgagttggagaaggccgccgctgcccaatggctccgctaccctcgccaccgctgctggccgaatcgctcgcgacgctgcgcacagcctcgccgtcgccgcccatcccctgctctcctcgccgcacccggccgttggtttcagctaggttcgcaagaacggccggccgccggagccggagcacggggggaaggagagaccttaggagctgtgcctatgcggcggaagctgagtacggcagcgcggaggatgaggtcgccgacgacttctactccgttcttggcgtcatgccagatgcaacccctgaggaaatcaagaaagcatactacagttgcatgaaagcgtgccatcccgacctcagtggggacaaccccgaagtaacaaacttctgcatgttcatcaacgaggtttacacggtgctgagtgatccggtgcagcgtgcagtgtatgatgaaatccatgggtatacagcaaccgcgaccaaccctttcttcgatgacagtgcacccaaggatcaggtgttcgttgatgagtttacctgcataggatgcaaatattgtgccaatgtgtgccccaatgtatttagaatcgaggaggattatgggaggtcaagagtatattcccaatcgggtagcacagagctaattcaggaggccattgatagttgcccagtcaactgtattcactggacttctgctgcacagctttctctccttgagaatgaaatgcggagaatagagcgggtgaatgttgggctgatgagtgctgggatgggagtttcagttgatgtattccgattggctagcgtgcgttgggaaaagagacagtcaaaagttttggaaaaaattaggacacggatgacaaacaaaaagtattcagatataagtagttcttggactgatatctggggatccccaactcgataccaaggaaatgaagaagaaggaacagagagagcgaagagagcagctgctgctgctaggagatggcgagaatactcgagaaaaggcgcagacaggccaccggagtacaaacttccagaggcagcgggcaataaagaatgaattccggggcaaatttcctttggcagtagtctggtaacccccaggcatcgatgatgaactgcaacatctgccaaaggacaacttgcccagcaatgcagctgcacatctcatggtctcaacctatttctatccgtgtgccacatttagtttcatgtgtagagcgcacagttcactgatcattgtgcagtgatatttatactcgctcctgcatggtgaaaggcagcaaggctttttgcagctacacggcctttctctgctcctcctgcaaaggcacacggaggctgataggatatactgtaggacaatgcctgctctctagattgtgcccacttacaggaacaaagtctgaaatggagagatcattgtagtgcatatatctccaatctttttaggtcatggggctacttccccgtttattcttagcctagcttcttgctgtccagaccatgtaaagttaagtagcatcaaatatctgctgagaaatctagctc

SEQ ID NO: 11368 - DNA, 1394 bp, Oryza sativa
  ref <308>: DATABASE ACCESSION NUMBER: AK108716
  ref <309>: DATABASE ENTRY DATE: 2002-08-28
aatgtacgcaaccaagccgctctcggcgttcgcgggccacccggatgccacgtcgcggccgctgccgccggcggcggcggagggcggctgctccggctacctcgccgtgaagagcgacgaggagggcaccgacgagacgcggtgctggggcttgcgcagccagccgcgcgtgcgcgggctcccgttcccgcagaaccgcgtcgtcacggtcagcgacccggcgctcggcaagtacgccgacgcctacgcggacgccgtcgtgttcgtgcccgtccccggcgcgccgccctcctcgaaccggtactacgccgtcctcgccgcgggcaagcaccgcggcctcgtgcgcgcgtgctccagggaggacgacgcggcgacgcactgcttctgccggtgcgtccgcgacgcgaagccccggccgttcgaccccgccgacgtgtaccagcagatggagatcgtgccgaacaggggcgggttcacggcgaggtccgtcgccgccgacggcctcccctacttcctctaccggagcaagcgctggctggcgtacgcgtccaggcccaagcacttcgacctcgccgaggcgcttggcctcaacgacccgctccgctcgcgctcgctgaccaccccgccgccggcgacggcgacggcgacggcggcgacggcggtggccgtcgggcggtggtacaccccgttcttctacatcaaagaggacggcgttccactcaaggcgcagatggaccggtccacgttctacgagatcgtcctggagcaacgctgggatgaggccatgggcggcgaggcgagcaagagggtgctcgtcggcgggagcgtcgaggggaaacaagaggccgtgggggcggcggcgagcgcgcggaccggcggaggcagcggcgacgggtacgtgtggttcagcgcggcgacgacgacgtggcccgcggggcagagggtgggcgtgcacgcgagcctgtgggagaagatggtgtgggaggagcagagaggcgggtgggtcgccgacgaggaagttggcggcggcggcgtcaggaagacgatgtccggcggcgccggcggcaggtcggtgctggtggagaggttcgcggtgaggaggctggacggcagcgtggtggtggcgtttgacttttcccacgtcaacaagatcaactagacaactactaggaccagtactagcgaagacctttcaattgcaactagatcagtacgagacctttcgatcgcttgtatttgcgtagttgtatactcgtgttgtatttgagttttttttttctttttgcaaggattgtactgtatatgattatgttgtatgcatgcgtgtataaccttagatattgttctttactacggttagttagttaattaattaattactgataatgatgagt

SEQ ID NO: 11369 - DNA, 1785 bp, Oryza sativa
  ref <308>: DATABASE ACCESSION NUMBER: AK108717
  ref <309>: DATABASE ENTRY DATE: 2002-08-28
atttctcgttggggaggagacccaagcggaggctgaggcggagaccccgctctcggcgattttctcgacgccggcgaagacccggtctcggcgattttctcgccgccggcggagaacctctcggtgccggtggtttttcttgcttgcgtgcttctcttcatccgctcgtgtccattgtgctcgtagctgatctgcttttaccttgctctcttctaaaatttccaggtgatttcttcgcttcatttctcgatttggtttcattttttggggcattttagatgttgtgtttagatcccgcatggtgtctgccatataaattgttttaggttcggtggttgttcttctgctagatttttagggggtttgattcgttgatttcatcccgcatgtatagtcgtggatttgggatggagacactaatgctttctcttcatggcgaaccgtgatatatgtgtgctcttgcttagttatgtttactagatctggtggtctactgtatcgtgctaatttgttttattgcagatctgcacagtacatatttgcatagtttacatacataccatttggattgatccctagtatgtatgttctgcgtgttgcatctgaagcatttgttcagaaaagtttcagatatgcatttgggttgatcccccctagtatgttatgtgacttatgtagttatgtgtttcaagcatttttcgtttgagtgatgcatggacagatctagcagtatgttcttgaccgtttggttaattggaatggtgggattctagtccaagagatctggttgcaggttttgcagcatttcagtgctcgatgttttcctgttcatgaatttgtatcagattcaactgtgcaagtttggggttgcaatttgcttggattctggtgtgatttgaatagtgaagggaaaacattagttcaactttatctgaatgctgcattcgttgcaacttttcctagtatactgcctgttgtttggttgattaattgcccaactccctatttgtgtctgaattcttctgcatttgaagcatttcatttcagagatgtatgtcccagtatgttctgagttgtttagttaaattaaacccaattccctgcatgtgttctgcacttctgctcaatttgctcagtttgtgtagatatttttccaaaaatatgccatgtgactcacaatccttgtagaatctgacaccatttggtgctcatcatacaacatggtgtgcccatagagtgtcatatttcctgcccctgcaaaattagctcagtttataatctagttatataacatttacaccctagttacaaggcagttacaaggtagttacatggcagttacaacgtagttacataccagttacagggtagttacatagcagttacagggtagttacatggaagttatagggcagttacatggaagttacagggcatgcattggaattgagcatgagctcttatgtcactagtcttttttcatcttgtttgcttaagttgtatgcagcttttaggcattgtgttgaaagatgattttttagtggtgcatgtatcattgtgtaaaaaagaagcaaaagcatcagagtgtgataatccagttatccagttacatgaaacagttacaagagtgttttgtatgatgcaagagcattaaaaataccggacatcggctagttgctagctagggatagttttgttacccaggtagctttgtaactgctttttttgggagtttatgtcgttcatattttataatttgcaagattaattattggactgttttct

SEQ ID NO: 11370 - DNA, 1068 bp, Oryza sativa
  ref <308>: DATABASE ACCESSION NUMBER: AK108718
  ref <309>: DATABASE ENTRY DATE: 2002-08-28
cgagccccacggtcgccatccaggccaataggattggcgaggacgccctcgaagcgacggcgaactccgccggcaagtgcctcgccgggtcggcgacgatagcccgcctcgccgccggcaactacggcgtcacgaggcgcggcgtgctcccgccgccgcccggcgcggcggtggtcggctaccagaaccgcatccagtcgtcggggtcctgcctctccggcgccgacgacggcctcctcaccgcctgcacgtgggacccacgcgtcaggcacaactccttcttcttccagtccggcatcagcgtgccgctctccggcgcggcggcgttcatccgcgacgtgcagcggctgcgcgacctcaacccggacgcgctctgcggcctcgaggtgtactacggcgtcctcctccgctacgtcagggcgtcgacggcgcacctcggcaagcctgaggacagcgtcgagctcgacctcacctactaccggagccgcgacccggcggcgccgcggctgcacgaggacgcggtggaggagatcgagcagatggcgctgcgcaagtacggcggcgtcccgcactggggcaagaaccggaacgccgccttcgacggcgccatcgccaagtacccgaagtccggcgagttcctcaaggtgaagggcagctacgaccccgaggggctcttctccagcgagtggagcgacaaggtgctcggcgtcgccggcgccggcggcgtgagcgtggtgagggacgggtgcgcgctggaggggctgtgcgtgtgctcggaggacgcgcactgctcgccggagaagggctacctctgccggccgggaagggtgtacaaggaggccagggcgtgccggcgtgtcgccggcgatcactagggcgcgcgccgccgccgcatcgcgcgcggcaatacgaatatggctgtattggcccattggatttcaggcccgttttgggtctagttcttgtgtaacgtggcgtggcccactacagcccaccaaaatatgtacccgattttatctcccttattaaaatcaaactatacattaataagaaatcaaatcaaatact

SEQ ID NO: 11371 - DNA, 1263 bp, Oryza sativa
  ref <308>: DATABASE ACCESSION NUMBER: AK108719
  ref <309>: DATABASE ENTRY DATE: 2002-08-28
gcacatcttttccaaaattccaatagcttctttcgactatccagaagagcaatatccatgcacaatactattatatgtgatgcaatcgggcatgactccattcttaaccatcctattaagtacatccatggccttatccatagcttgagccttgcacaaggcagcgacaatagtgttgtaagtcacaacatctggtaaaatccctcgctccagcatttcatggtatgtactgtaagctttgtccgaatccccctctttgaacaagccatcgatgatggtgctgtacgacaccacatcaggagggcagtctcctccatcatccgccatcatgtgcagcagctcgagagcttcttggcttctgctctcatgacagagtcccttgagaagaatgttgtaggagaagacatgcggcgcgcagccaagctctgtcattctgcggagcactatgttcattgcgttgctcgtcctcttctcggcacagaggctcttgagcagaggagtaaagatgatgggttccactctatatcccttcttaataacattgcccaatcccgcgaaaccgaggtccaaacggcccgcgcggcagcagcagccgatgaggatgccataggtgtgcaaggtgggagtcaccgcgccgtcgctggatcgtgccatgcggttgaagccggacacggcggccgcggggctgtcgcgcgcgacggcggcgagggcgcggttcaagctgcggatgatcgaggcgcccccgcccccgcccctgccttgccggagcaattcgtcgaacacgtggagtgcgtcctcggcgccacccccgctggcgcctgctgctccggtctttggtccgggtcgcgcaccctcggagcgagggccgccgccgacggatcgtgctcgggcggggacgcggcgtgccatgcgtgcgccgacggagctcgcagcaacctccgggtagcgccgcgccgcgccgcgcctgagcaactaactgacccgagggaaggaaaccggaggcaaggaaagggaggagctaagcagcacgcgaagaatggcgtccggatcttgtgttggcggtggcggcggcgagccggcgacggcgacggcgtgaggggacgacgggcgcaccgggataattggctgagagactgatgatgcgcggagagaccgtcagagtagagtaaaagacgcgaagagatcagcagtttattaaatttgttattttgtctttttttcccccaaaattcccccctgcaaatttacattttttttgcctgt

SEQ ID NO: 11372 - DNA, 736 bp, Oryza sativa
  ref <308>: DATABASE ACCESSION NUMBER: AK108720
  ref <309>: DATABASE ENTRY DATE: 2002-08-28
agctctgcatgcatgtcggaggcagcagaggtggcggcgaaccggcgatcaacaacggcgggttagtaggagtagctgaaggcccgacaccctcgccaatcccgtcgtgctcaccgccggccagcctgccatcaccaactcggttgtcgtctctgccagcagcgccgtctatcccctctatctccccggcgccccgcttctaccctctcccggcgacgccttgatctgggcgactaggtaagatcatgtgaggtcacggtggtggcggaagcggcgagccggcgaggaggttgtcgaggaggcgatgtgagcgatctatctgtcgcagaggcggttgaggctggcgacgagaaggatggtgtcgagccgagctgttccccatggatatggcgatggcgtggacccccgccgcccctactcctcgctccgaggcggcgctggccggtgagctccggggccgacgcacgacaaggcaccatgcgggccggcaagctctgggtcagtgcagcggattaaggctgggcggggccttcttccggtggtacatcgagctcgaggtcatcgtcccggcatggagatcaggcgaggggaatatacaatctgttgttttcgctggatttttctcgctctttttttttttgctttttttttctaggagtttttcctctgctcccgactgttctagatgaggtcgtgcatttttttaaaaaaataaactctcgtgcaatttatattt

SEQ ID NO: 11373 - DNA, 1207 bp, Oryza sativa
  ref <308>: DATABASE ACCESSION NUMBER: AK108721
  ref <309>: DATABASE ENTRY DATE: 2002-08-28
gcgccgtccgaattgtagtctggagaggcgtcctcagcgacggaccgggcccaagtcccctggaaaggggcgcctgggagggtgagagccccgtccggcccggaccctgtcgccccacgaggcgccgtcaacgagtcgggttgtttgggaatgcagcccaaatcgggcggtaaactccgtccaaggctaaatacaggcgagagaccgatagcgaacaagtaccgcgagggaaagatgaaaaggactttgaaaagagagtcaaagtcttgtgtgattcctctcctctttgtgttcttgggtgattcatcttgtgttcttgtgtgatttctctcgtgttcttgtgtgattcctctcgtgttcttgtgtgattggcaacgaaatcggtagcgggaggaggggatttgggcacgacttcttgctgatttttcgagggcgaataggggatttcgccaggggaatctcgagcaagagcaccgggcggcgagggaacgactcccacatcgcacgcgcctcacgtcgattcctccgcgcgtccccttttccaggcgaggtttcgtgccccctagtttaggcacgagcgccctagctgagacgcgggtctgagcgacacggcagcaaaaatccgacgtggcgcgactaaggcacggtccaggtcgacgcactgtgagaggccttatatgcttctatggtcggtttggtttgatgtcaaatttatacgtgtgtgagttggatggatgggccttgtggaattttttgtgggacagttttttatgaggggtctggtttaccatcttaccaaattctattgttatcccctccgttaaaaaatatagaaaaattacaaaaaccaccacataagattgacattccactacatgagttatgttgttgcgaatgatcatcctatatatggttttgttgtaaaaaccaccctaatatgcatgtgcttaaccgaatgagtatgttatcactaatgtaggctctataggctaaggtagccgactcaatcttgtccaagtgcttgtatgaaattcattcttcatatttcactgaatttcttactacacatagagaaactcagtgcaacaacgtttgagctttcatcagcaattttatttgtagattctttttaaaaaagtcaagactatactcctagctttggtacgaccatattgacgcctcacgatttatgcaaatatattgattc

SEQ ID NO: 11374 - DNA, 724 bp, Oryza sativa
  ref <308>: DATABASE ACCESSION NUMBER: AK108722
  ref <309>: DATABASE ENTRY DATE: 2002-08-28
acacgcagtcggcgccgcgatgataaaaggcgagagaaatttacccacgagtcgctcgcgcggtgactgacacaccgtggcgatgacacacgccgaaaggaaagcttggccgcggcgcgggggcattttcgggaggagacacgaccacgaccccacgaggggatcgaaaagttgcggagcttttatttaaccggccggtttgtgccattctcgccactgtcctaacctgcacttcgctctctactcctctcgctctcggtcatgggtggtggtgcggcggcgagcagggtgtcgtcggccatggccgtggcggtggcggcggcggcggcgttggtggtgatgtgggcggggacggcgacggcggcggcggccgtgtacgaggtgggcgacaagaccgggtggaccatcatgggcagccccaactacacagcctgggccgcctccaagaagttccatctcggcgacaccgtcggtacgtacgtttcgtggcgagtttatccctctcgctcacgcgttctccgctcctcctgctgcattccggcgttttatctcctcagaaacattggtgcgaacgacacacgtttgtagttttgttgcttgaacatgaatcttgccatgtgcaagactgcaagtgcaagttcgttgttgagacaaaatctagtaagtagtagccttttatcagacgaatcagtcacagagaagaagggaaaagaaaagcttcagt

SEQ ID NO: 11375 - DNA, 1507 bp, Oryza sativa
  ref <308>: DATABASE ACCESSION NUMBER: AK108723
  ref <309>: DATABASE ENTRY DATE: 2002-08-28
acatcttcagtccaaatcacaatctcagcaccctttgcacgagggaatggccccagacctgaacatgctcgcacagcccgctcgagacgaacattctcagcctactcgaaggacctccttgtcggctcggtctggtgccagctcgaggcgtacttctcaactcatgggcccgcccacagttcctgcatctgctgcaggtcctaaccacacaaactcggacagagtccacatgccgcatagagtatcgtcgagccacgagcacgacgggccgttgagacacccaagacctctgactgcggccgagttgtatgctgaatgtgagaaagagcaagaagctgtggtcaaccgcctcactcgggagctcactgcgctgcgagctcagtctgcatccgtggcatcaaaccattctcagtcaagtacctcgacctcagcatctctccttccggtcgacatttcagaccccaatccaacacaccaaatcctgggagcaactcatccaacgccctcacgccgtgaccgaagttcgtcatcagtctcgtcgaggtcgatacctacgccttcgacatccatgtctgcaacaggcagtagcatgggcattcaggctcaaggcggcagcgctcaacactcgcacccgggcacgcacggcggcgtaagtcaagcctcgttcgaccgtgcagcagcagcgacaggtggcacaggtagtgcgaccatctctcgccaaccatcaatctcagcccagagcggcacctcaactccagctcgtcaaagcttcgataacttccgcaacccttccatcggtggcggtatagcttctggcggcacgatctacaccctccctcaccgaccatccatctcgcgcgaccacagctacgccggctctactactgcgctggctggcacgccacaccaggtcccccagcccttgccatcgcccgcccagagcccaagccagagcatccacgcatccacccagaactacaccgacgccgccgcctacaaatccgagatggagctcgtcaaagcagagaacgagaatctccgccaacgcgttcgagcgctcgagcgggctttacgtgctcgcagacgcgacagcagcaccagccaggcggacggccgcgcgccagattctacacttagagctacacgggagcgagaccatggtgccgtgagcccaaatgccaccagcccaaacaccgctgcggctgcaggtattgcagcgtgggcagctggagatggcggtgtacgcggtgttgccggcccacgagagagaagcgagagtcagagtactactgccagcagtcgcagaggcttgggaggtggtggcgtggcggttggagacgatgaggtgagatttggagagagtgcgggtaacgttgggtatgggaggtgaaggccaagggaagcgatgtttagtctcgatcactgcgagcggtgagcgatagccaataggggttcgggattggtacgacgcagatgaaaacaggcaactcagccacgattgtgcatg

SEQ ID NO: 11376 - DNA, 1239 bp, Oryza sativa
  ref <308>: DATABASE ACCESSION NUMBER: AK108724
  ref <309>: DATABASE ENTRY DATE: 2002-08-28
ctctctccttgctgactcgcatcctgccatcgcatgcatatatatgctaatgcttcgatcttgcagctgagtttgtagagatcgttgtacgtacgtcggcttgtcgccggccgtcgacatgaccggcggcggcagcggcggcgccggggcgtgcgcggtgtgcaagcaccagcggcgcaagtgcgagcccaactgcgagctggccgcctacttcccggcgaacaggatgaacgacttccgcgcgctgcacctcgtcttcggggtggccaacctcaccaagctcatcaaggccaacgccaccgaggcggcgcgccgccgcgccgccgagacgctcacctgggaggcgcggtggcgggagcgcgacccctccgaggggtgctaccgcgaggtctcctgcctccgtcgcgacaacgccgccctgcgcgccgagaacgccgcgctccgccgccaggccgaccagtgcgcgtgctgcgccggcgccgccggcgtcaggcacgcctcgtcgccgacgacgctgcagcaccagctgctgctggtctcggcgtacaacggcgccaccgccgccaggcctggcaatgttgtgccgcacaacgccaccgtcgtgccgggcggcttcgtcgccgccgccgccggcgtccgcggtgccaacggcaatggagccatgtcgtccgtgcggccgccgcctcatcacgtgcaagctccggcgacgcagaccgtgaccggcttcgtcgcgcacgcgcaggacgaccgataccgcgccgtgtctgtctgcccgccggcggcgaacgccgccgccgtgccgaggtccggcgcagctgtgagaggtcagggtgactacagggacaagatcagcgacgccgcgaggtaagctgaaagagcttctctctttcttttgttgacggttcagggtttgtacgggtggatgtattggcttcgtctgcgttgtgttttgcaactgcaggtgatgctggcagcaaatggccaggagtgggtcaaattagaatataatacaccttcttgagttcttgtacgttcatcagcttcagagatgagtttcatgctagtagcagcgttgccagaaaagctctagcaataatatgctgcaaaagtactaattaaggtctaggaaccagctaaaagctcaagcaataatatgcatgaacatatccctttgatgtatggttctcagacaaataatgctatcatctcacagaagaaatgaatataatcatttcggtt

SEQ ID NO: 11377 - DNA, 1602 bp, Oryza sativa
  ref <308>: DATABASE ACCESSION NUMBER: AK108725
  ref <309>: DATABASE ENTRY DATE: 2002-08-28
ccgcaatgggcgaaagcctgacggagcaatgccgcgtggaggtggaaggcccacgggtcgtcaacttcttttctcggagaagaaacaatgacggtatctgaggaataagcatcggctaactctgtgccagcagccgcggtaagacagaggatgcaagcgttatccggaatgattgggcgtaaagcgtctgtaggtggcttttcaagtccgccgtcaaatcccagggctcaaccctggacaggcggtggaaactaccaagctggagtacggtaggggcagagggaatttccggtggagcggtgaaatgcattgagatcggaaagaacaccaacggcgaaagcactctgctgggccgacactgacactgagagacgaaagctaggggagcaaatgggattagagaccccagtagtcctagccgtaaacgatggatactaggtgctgtgcgactcgacccgtgcagtgctgtagctaacgcgttaagtatcccgcctggggagtacgttcgcaagaatgaaactcaaaggaattgacgggggcccgcacaagcggtggagcatgtggtttaattcgattcaaagcgaagaaccttaccagggcttgacatgccgcgaatcctcttgaaagagaggggtgccctcgggaacgcggacacaggtggtgcatggctgtcgtcagctcgtgccgtaaggtgttgggttaagtctcgcaacgagcgcaaccctcgtgtttagttgccactatgagtttggaaccctgaacagaccgccggtgttaagccggaggaaggagaggatgaggccaagtcatcatgccccttatgccctgggcgacacacgtgctacaatgggcgggacaaagggtcgcgatctcgcgagggtgagctaactccaacaacccgtcctcagttcggattgcaggctgcaactcgcctgcatgaagcaggaatcgctagtaatcgccggtcagccatacggcggtgaatccgttcccgggccttgtacacaccgcccgtcacactataggagctggccatgtttgaagtcattacccttaaccgtaaggagggggatgcctaaggctaggcttgcgactggagtgaagtcgtaacaaggtagccgtactggaaggtgcggctgggccgcgattctcgccgtcgccagccgccaccaaccggcgaatcccccctctcgccgccgcggcggaggggctagcgatgaccaccgctcctgacgagctcatcggtagccggcgggccgtgggaggggaggcttctaacgccgtggaagaaactccggccgccgccttctgccgccggtcacctgctgaatctgaatgcttgaggttgatgaaccaaatggcatgtgcattgcttcgatgaaggaggccactgttgtaattggactagagtcacacgcccactgtaagaccagaccttgtgttttttttttttaattttatgtttccttctccttgccaaacatgaatcccaacaggactagacagactaacaggatttcaaactaggaaacacacagaggaccaaatcacttcaatcgaaatatcaaatgcatatccatatttgttggggagattggttct

SEQ ID NO: 11378 - DNA, 1248 bp, Oryza sativa
  ref <308>: DATABASE ACCESSION NUMBER: AK108726
  ref <309>: DATABASE ENTRY DATE: 2002-08-28
ctagtaacatgtcagatgtgaaaggggggcatatgctcagccatccacacaatatacaatcagccccagggcaagcaacacagcatccacaaacatctttacctgtgcttgggtcaaataatattcatgctcgtccattgccacgaccagttggaggtccaattgtaccacttagaccacaaatggcagattccagtcaaagaggacaattagtccagggagctgttacctcagtgactgggagcatggcagcacgaccaacgttgcaaactaatatatctccatggcaacaagtaaacaaagagcagaaaactaaatctttccctccaacagaacacacaaataagggtgttggtgttcctgaaaaccaaccatcaacatcaggtacttctaaatctttcaacacaacaaactcaagtcagcctcatcgatctcatggcactcaagcagaaccaaacatgcagatccaacctgctacacaaacacctccccctgcagcagcttctaaaacacctcaaaagaaggcatctgctggacagaagaaacctttggacgctttaggctcatcccctccaccatctagcaaaaagcagaagacatccggaggttatcatgatcaaagtattgaccagctgaatgatgttactgcagttagtggtgttaatctgagggaagaagaggagcaacttttctctgctccaaaggaggagagtcgagtttcagaagctgctcggatggtcgtacaacttgaagaagaaaaactcatcctacaaaagggtcctctgaaaaaaaaattagcagagatcatgaggaaatgcaatttgaagagcataggcagtgacgtggagcgatgtctatcgatgtgtgttgaagagcggttacgaggattcataagcaatacaataagactttcaaaacagagggttgatcttgaaaaatcaagacatcgaatttatcctttgtcttcagatgttcgtagtcacattttgagggtgaacagagaagctagagaacagtgggacaaaaagctggccgaagatgctgaaagaatcaggaaacagagtgatgttagttctgcatgctgtttcagctggaatttcagtatatcttttcacacgtagtataatacatagagactggctggcaggtggatcaaagatgtcaaaagttgtagcatgtaagggggttgacttaaatgtagatgtagcaatggcttgctattgtgcagcaaggtgctccagttcattt

SEQ ID NO: 11379 - DNA, 761 bp, Oryza sativa
  ref <308>: DATABASE ACCESSION NUMBER: AK108727
  ref <309>: DATABASE ENTRY DATE: 2002-08-28
atgcgggcacaaacgagacgccctcctccgctctctctctccttctcgtcctgacctccggtgcggcgggagggagggggatctagaacaccattggttttcaggttttgatcatcttgacccgtcgttggtgagaagaagcaaaaaatggcgctcatctcgagagcttctgttcttgtgatggccatcgtcgccatgctcgccaccttggtgaatgctcaggcccctgcaccagcacccaccagtgatggaacaagcgtggaccaagggatcgcctatgtgctgatgttcgtggcacttgccctcacctacctcatccaccccttggatgcatcctccgcctacaagctcttctgaactcaactccttaacgctctgtaatcacgctaacttgtatttaacgggcgttcagctgtattattcaatcgatccagtttgttcaagagcaagaagagagatcgattcgatcggccgcgcctctgctagctgttcattgcggtttgatccatgttgaagatcgaggggaccaaaaaatggcaaaacgatgcaaccggcctggtccattctcagttgtgtatagactgtatggatttagttctttcatgagtcgatctgtaggatcaccaccagtacagagaaatacaggagctcgtcatatagagaaagaactaacagaatgattgattagctgcttgcaatacgcatacactaatacgaagtagtaaaaggagcatagttgcattgtcccaaaaaaaaaaaag

SEQ ID NO: 11380 - DNA, 1361 bp, Oryza sativa
  ref <308>: DATABASE ACCESSION NUMBER: AK108728
  ref <309>: DATABASE ENTRY DATE: 2002-08-28
tccccatagcttgccctcctccccaattcccaatctctattcctatcttgttgctctcttcctcctctagtcccaacacctccacctccccatacaccccatgtctcaagaaggagccgacctctctcaagatgtcgatgaaagcccatatcacaccgccgttgtcaccaccaataatctggtaaggtcgattaaagcagagaaatctaactctagctctagctccggcaagcctgtcgagacagacatcggtttaaaggtagcaagccctactatgtttgggttcaacacaaagatagagggaacgggaaagaacatggccgtcaagagagaggaaggagaaggtggtggtcgtcctggcgtcagcagtggtgtcagcacacgggataccaacggaaaaggcaagaacgctatggacatggagcacgcgttgcatatttggacggagagagagcggaggaagaagatgaagaacatgttcagcaccctacatggcctcctccccaagatcccaggcaagactgacaaggcctccattgttggggaggccattggctacatcaagacgttggaggacgtcgtccagaagctggagaccatcaagacggagcgcgtgcgcgcgcaccagtgggcggcggcggcggcagccgccgtggcagccaacggcggcggcgaggggtcctctcactctcactctcagccgccgcgccacgccaccgccgtcacagtcgccgtcgccgagcctgcgccggtggcggcggcggtgaacgcgcaggcgccgcagaagaaggcggcggcggcggcggcgccgacgctgcagacgtggtcggcgccgaacatcacgctgacgatggccggcgtggacgcgttcatcaacatgtgcctcccgcggcagagggcgtccttcaccacggtggcgttcgtcctggagaagcaccagatcgacgtcgtcacctccaccatctccgccgaccatgacaagagcttgttcagcgtccatgtccgcctcaacgaagcatcccttcagagcacagagggtctgacgcctgaagccaaatacaagctcgcagtgtcagagttgatggtcaggctcgccgaatgagacgaatttgatcgtcctgaatttgctgtcccccttgctactctcatcgaggattcgtactctcagcatttggaataactaaaaccagtctttgctttcagtttagtcgttgaacttgttactttttggataattcggttaaagtttccgaacataagtacaccaccaggaggtaaaagtgtaaaatccgttgatgttgtcgtcgtcgttgttggagttatagacatgttacttgaataatatagtgttgtttcttgat

SEQ ID NO: 11381 - DNA, 976 bp, Oryza sativa
  ref <308>: DATABASE ACCESSION NUMBER: AK108729
  ref <309>: DATABASE ENTRY DATE: 2002-08-28
cggccatgatcgtcatcagctgctccggtacggttgctgcagctgcaacaaacagcaggaggaagaggaggaggaggtcacggttgccttgcgcataggcctaccggccgtctcgtcggcgtcggcgtcgccgtcgccggcgatggcgaaccatggggctagtgcttctagtacaggagttgctggagatgatggcggcggcggcgccatggccggcgtgggtgtggaggtggagagcgtgcggaggagcggcggcggtggcggcggcgggcagtactggatcccgacggcggcgcagatcctcgccggcgccacccagttctcctgccccgtctgccgcaagaccttcaacagatacaacaacctccagatgcacatgtgggggcacgggtcgcagtaccggcgaggcgggacggcggcgctgcgcggggcgcagccgacggcgatgctccggctgccgtgctactgctgcgcggcggggtgccgcaaccacatcgaccacccgcgggcgcggccgctcaaggacttccgcaccctgcagacgcactaccgccgccgccacggcgcccgcgacttcgcctgccgccgctgcgccaagcgcttcgccgtccgcggcgactggcgcacccacgagaagaactgcggccgcctctggcgctgcgcctgcggcgcccacttccgacacaagcgctccctcaacgaccacgcacgggccttcggcgccgcccacgcccacgccggcgccggcgccggcgccgaagacgacggccgcgccgccgccgccgccgccggtgtgctgcgatgaccttaatttatatatatgtgagtgcgaaattaattagctgattattggttagtttcaggttatttttttagtagaaaattaatttgtttgtgatcgatcatatatatatgtggaggactctcttaattgtttttttgtttggtttgatttgatttgatgtgtattgcatgc

SEQ ID NO: 11382 - DNA, 1900 bp, Oryza sativa
  ref <308>: DATABASE ACCESSION NUMBER: AK108730
  ref <309>: DATABASE ENTRY DATE: 2002-08-28
acgacgcgacgcgacgcgacacgggagcaagcagcgcgcgcgcgctactccgaaccgaaggcccacgcggcgccatgctgctgggtgccatgagcggcggcggcgtcgtcgtcgccgtcgccgtcgcctacgccgccctggccgtggtggcgctgcggatggcgctgtcgtacaagtcggcgctgtacgcggtgcggcggctgtggcggtgggccgacgagtgggcgcaggcgtaccagtaccacgaggtgccacgcttcgcgtgcgacggcggcggcgccgagaacccgctgttccgcaaggcggcgcagtacgtggcggtgctgccgtcgctcgaagacgccgacgccgcctccgtgctgtcgtccgcgtcgaggaccaacggcggcttctccctgcagcttgggccaggccacaccgcgcgcgacgccttcctcggcgcgcgcctcgcgtggacaaaccggggcgacgtgctggttctgcgcgtgcgccgccatgaccggacgcgcgtgctgcggccctacctgcagcacgtcgagtccgttgccgatgagatggagctccggcgacgcgagctgcggctgttcgccaacaccggcgtggacgggagcaccgggacgccgaggtgggcgtcggcgccgttcacccacccggcgacgcttgacacggtggccatggaccccgacctcaaggctcgcgtccgcgccgacctcgagaacttcctcaagggccgcgcctactaccaccgcctcgggcgggtgtggcgccggagctacctcctctacggcccgctgggcaccggcaagtcgaccttcgcggcggccatggctcggttcttgggctacgacatctacgacgtcgatctctcccgcgccggcagcgacgacctccgcgcgctgctcctgcacaccaccccgcggtccctcatcctcgtggaggacctcgaccggttcctccagggcggcggggccggggacgcggaggcgagggcggcgagggtgctgagcttcatggacggcgtcgcgtcgtgctgtggcgaggagcgggtgatggtgttcacgatgcgcggcggcaaggagggcgtggacgcggcggtggtgcggccggggaggctggacgtgcacatccacttcacgctctgcgacttcgaggcgttcaaggcgctggccagcaactacctcggcctcaaggaccacaagctgtacccgcaggtggaggagagcttccatggcggcgcgcgcctcagccccgccgagctcggcgagatcatgctcgccaaccgctcgtcgccgagccgcgcgctgcgcaacgtcatcacgaagctccagcacgtgtccggggcggcggcggcgccgcggccgccgcacaggcggaacacgagctggtccggcgcgggcgggccatgggaggagcaggccgcgcgcgctagcgcggacgcggcggacggcggcgaggaggcgatcacggcgacggcggcgtgcggggtgttcgcgaaggacgcgccgatgagggagttcaagaagctgtacgggctgatcaagatcaggagccggaaggagggctccagcgggttcatgcccttgcacggcggcgaagcgccgtcgccggcaaacgggcggggcagcgagcacgacaaggagcggtgattaattaggcgatggtagtagaccccgtcaaacaagaaaaatatttttgattttttgtccgtgcttttttacttcgtgttaggctagtaggagtactacgtagttgtagttagttcactttttaattgtggatggaagaaatcaaacacgaaatggaggatgataatgggattgggtgatgtacaattgtacatgaggattgtttggttttaacagggtataaaacaaaagagatgggcaagttgaaattcttg

SEQ ID NO: 11383 - DNA, 1467 bp, Oryza sativa
  ref <308>: DATABASE ACCESSION NUMBER: AK108731
  ref <309>: DATABASE ENTRY DATE: 2002-08-28
ttgtcaagcagagggaggttacgaagagcgccgttgaggcggctgtaatggtggacgtggacagcaggatggccgggctcgcccacccggcggcgcacgcggcggggctgcgacgcctgtccacgcgcgccgccgcggggccaccgtcggcgtcggcgtcgccgcgccacgggttgcactcttttgacggcgtggcggcggccgtgctgtcgcatcttcggaagaccggggtggtcgttcttcccgggctctccgacgcggagttcgcccgcgtggaggcggagatggggttcacgttcccgcctgacctccgcgccgtgctggcaatggggctcccgtcgggggctgggttcccggactggcgcggccgggcgtggctccgcgcggcgttcgacctgcccatcgcggcggcgtcgctgcagatcgcgaagggtgcgctgtggccgcggtgctgggggcggaggccgtcggaccccgaccgagcgcggcggttagcgcggtccgccatcaggcgcgcgccgctgctcgtgccgctgttcgaccggtgctaccttccctgccgcccctgtctcgccgggaaccccatgttcttcatcaccgacgaccgcgtgctctgctgcggcctcgacatcctccatttcttcacccgcgagtcctcgttccagccgctggacgtgtcctccccgtcggcgacgccctcctccggcatttgcacgccgcacacgcgacgcagcctcgacgccgtctgcggcggccaggcgctgcgctggatcgagttctggagcgacgcggcctccgaccgacgccgccgcgtctcatcgtcctcggaagcctccaccgcctcctcatcgtcgtcctcctcaggctgcccttcgccacctccgaggtcgaccccgctctgggtcgacaactacctcgacaagctcggatcggtgctcaagaaaggtggctggagggacagagaggtcgacgagatggtcgaggtcaccgcctccggactgttcgacggcgaggaggcacccccagccgacgccgacgcggtgctcgacgcgctgttcctaaaaacggaccggtgctcggactcactccggcgagcagggtggacctccgaggacgtctcggatgcgttcgggcttgacctccgtcggcgaaaggagcagccgcggccagccgtgcagataccgccggagatcgccgccaaggtccagcgcctcgcgcaagcggtggcgaggccgtgacctcaccgggcaccggccgaacatgtggggccctgccgtttcttcctcgtctctgcgtttttttccccgcataggaggaattaaacaacacttatgtcaagtgaaaagtaaactagcccatgttcgtgtgcatgaatacacaagtaaattaagatgtgttcatgtgcacaatgaaccgttaattgtaagacacggtctcccagaaatgaaaactgcatattgccggatt

SEQ ID NO: 11384 - DNA, 1359 bp, Oryza sativa
  ref <308>: DATABASE ACCESSION NUMBER: AK108732
  ref <309>: DATABASE ENTRY DATE: 2002-08-28
caccgccgccgcattcgaaaacctcgtcgccgatctcctcctcctcctcgcgagatcttcgaggcttctctcttcttcgatctcttcgatccccgtggtggtggtgatctggttcgcggcggcggaggagatggcggcgagcaacatcgggatgatggacggggcctacttcgtggggcggaacgagatcctggcgtggatcaacaccaccctgcagctcggcctctccaaggtcgaggaggctgcgtcgggggcggtggcgtgccagctgatggacgcggcgcacccgggggcggtgccgatgcacaaggtcaacttcgacgccaagacggagtacgagatgatccagaactacaaagttcttcaggacgtcttcaacaagctcaagatcaccaagcacatcgaagtgaacaagcttaccaagggaaggccccttgacaatctggaattcatgcaatggatgaagcgatactgtgattcggtcaatggaggcttcatgaacagttacaatgcttctgaaagaagggagagcagcaagggcggcaaagagaccaacagaaggacatcagtgccttctcaggcgccggccaaatcctcatccgccacccacaaagcacaggcatcatctcatggtgccaagaaggccaatgggcatgcgccgaacgcccctccgtcacggagcgcaaagccgtctcccgcaaactccgctggaccagcttatgatgaacagatcactgagctgaagctgctcgtcgatagtctcgagaaagaaagagatttctatttctccaagctgagggatgtggagatcttgtgccagagccctgaagtcgagcatttgccgattgtcaacgcgattcataaggtactctacgctgcggaggatgacccctcgatggtggcggaggcgcaggcgatgatatcgcagcagcagcagagtgagcagccgatgctgagcccaatcctggaggcgtcggaggagaggccggcgaagcaggaggtgcacaagaggaagagcatctccgacctggagctggaggagttcggcatggcgtccagctcgaggcagaggctctccgacatctccgacgtgcagctgtgcggatcacctctgacgagcttcacttgaatgaatgactgaatgaatgaagaacacagcaattggggcacaatttgcagctgtgacattggattagtactagattgctctctatatctctttctttcttttgttggatttgtttgttggttttcctttgcgttgtattgttggtggtataatgtgtgtgctattttcttgccttcggatggtggttgtgccacagcatttgtggcacttttgagacaatattattatgc

SEQ ID NO: 11385 - DNA, 904 bp, Oryza sativa
  ref <308>: DATABASE ACCESSION NUMBER: AK108733
  ref <309>: DATABASE ENTRY DATE: 2002-08-28
cacgctcgtctcctcctcttcctcacgagctgcctcctgccagtcgatcatggcggcgccgtgacggaggtgaaggaccaagggcgatgtggatcgtgctgggcgttctcgacggtggcggtggtggaggggatacagaagatcaagaaggggaagctggtgtcactgtcggagcaggagctggtcgactgcgacacgctcgacagcggctgcgacggcggcgtcagctaccgggcgctggagtggatcaccgccaacggcggcatcaccacccgcgacgactacccctacacggccgccgcctccgccgcctgcgaccgcgccaagctgggccaccacgccgccaccatcgccgggctccgccgcgtggccacccggagcgaggcgtcgctggcgaacgccgcggcggcgcagcccgtggccgtgtccatcgaggccggcggcgacaacttccagcactacaggaagggcgtgtacgacgggccgtgcgggacgcggctcaaccacggcgtcaccgtcgtcggctacggccaggaggaggcggcggcggacggcggcgccgccggcggcgacaagtactggatcatcaagaactcgtgggggaagaactggggcgaccagggatacatcaagatgaagaaggacgtcgccggcaagccggaggggctctgcggcatcgccatccggccgtcattcccgctcatgtgatctctacatttttctaagttagtagctttcaaattagtcaaacttaggaaatttgggatggtgttcatcgcgtgcacgatgcacctacacacactacgctgttaatattacgtgtaaaactcgcgaatcacatgattgtttattacaattggaaataaatttatatacaaaggatagaaatttcttcagtggactt

SEQ ID NO: 11386 - DNA, 1382 bp, Oryza sativa
  ref <308>: DATABASE ACCESSION NUMBER: AK108734
  ref <309>: DATABASE ENTRY DATE: 2002-08-28
ctctcctctccccgcgccggcagttactggttaaaactcgtcgcctccgccataataagttcactcctcctcctcctcctctcttagctccactccacctcgccgcagatctcccgcgacgagctcgagctagctcgaggccatggtgagcgcgtcaagcctcctgctcccgtcgtccgtgcgcgacttcgcctcctgcatcggcgacggcgccgcctgcaccgcgccgtcctccacccgcacccggaggggctccgccgccgtgcaggcgcagccgtccacgctctccgtcaccgcctcgtaccgcgtcgcgctcgcgtcgtcgtcgtcgccgccgctgcagctccggctcacctgggcgcactccccgctcggccccaccctgtcgttctccccctcggcgtccggtcgcaaggtgctcgtccgccgccggaggggttcttgctccgtgctgtcctccggggaggatgaggcggtggagtcggagtcggagttgtcggcgtcgtcgccgcggctcgcgctgttctgggacctgaccgcggcgcggttcgacccggcggcgtcgccggagccggtgtccgggtactacgtggtggtggccgtggaaagcgcggaggtggtgctcgcgttgggcgacctggcggcggagttcgtcaaggccaagttcgaggggacgacacagatccccatggcggcgccgttcgcgcgcggggagcgcgtggtggtggcggtgtcgtcggacgcggcggcggcggtgacgcacaccgcgcgcgcccggttcgcggagggcggggcggagcacgaggtgagcgtggggtgcgcgcctggcggcggcggcggcggcggcggggacgagctgtgggtgagcatcgacgggaagcgcgcggtgcaggcgcggcggctccggtggaacttcagggggaaccagacggtgttcgtcgacggccagcccgtggacgtgatgtgggacctccacgggtggtggttccggcgagagccgccggcgccgggctgggcggtggtgatgctccgggcgaggagcgcgctcgagagccgcctatggctggaggaggaggccgccgcgccggccttctccctcctcgtcgaggccttcaagtccccaccttgacttcaccatcttcttcttcttcaacagcttcttcattgcctcatttgatgatggaatttaccaaaccatcaaaccaaatatgtgtcctttgattacaacttccaacttagattagattttcttttatgggagataagattatcatcatgtctggggaaaaacaacatcatggacaggtcatatactgagagattggtgtgattgtgtagtgtaggatcgttttttattattattattattgcttttcctcttt

SEQ ID NO: 11387 - DNA, 1561 bp, Oryza sativa
  ref <308>: DATABASE ACCESSION NUMBER: AK108735
  ref <309>: DATABASE ENTRY DATE: 2002-08-28
agcgcgtgatcgtgcagtttcggggtgagggtttgggagggggagcgatggcgatgatggcggcggcggtgacggtgccgctgggggtgctgctgcggcgggaggtgacgagcgagcggatggagcggcccgacgtgctgtgcggggaggcggcgcgcagccgcaagggggaggacttcacgctgctcctcgccgaggccggggagcgcgtcgccggcgacccgtccacctccttctccgtcttcgcgctatttgatgggcacaacggatctggagcggccatgtacgcgaagaagaatctgttgaacaatcttctacgtgccattccttcaggtttgagcagggatgagtggcttgcagtgcttcctcgtgcgcttgtcgcagcatttgtcaagacagacaaagatttccaggcagtagcggaaacttctggtaccactgttacatttgtagtaatagatgagtgggttgtaacggtagcatcagttggtgattcacgttgcatactagaatctgctgatggttcattataccatttgtcagctgatcatcgctttgactccaaccaagatgaggctcaacgtgttactgcatgtggaagcaaggttgggaaactgaatcttgtaggtggcccagaggttggtcctctaagatgttggccaggtggtctgtgcttatctagatcaattggggatatggatgttggtgaatgcatcattcctgttcctcatgtgaaacaagtgaagctatccaatgctggaggcaggattatcattgcaagtgatggtgtatgggatgatttgacttttgaaatggcacttgagtgttctcgtggattcccatcagatatagctgccaatcgaattgtgaatgaagcaattcatcctcggggactaagagatgatactacctgcatcgtggtggacatattacctccagaaaaactagctccaagtcctcccacaaagaggcaggggaagattgtattcaataatatgtttcgccgaaaacatacagacgtatcctttatactagatcgagagtatgctgagccagatgaggtggaagaaatatttgacgatggttccgctatgctttctaaaaggcttgctgcaggttatgcactccagagcatgtttgagcccttcagctgtgcagtttgccaagtacagttgaaagctggccagggaatttctgtacacagcaatccattgcaacacgaaaaattgcaaggatggcagggacctttcctgtgccaaagctgcaacgaaaagaaagacgcaattgaagggaaacgacctccaagagattcttgatctacactctacaataaccatggttttgctgagtggtgacaagtggcaggcccatttgttggagacattccttcatacaatcaatattcttttgttcgttactagaaacactagtcaaaccagagttattttgctacattgttctctgtagtcaagtaatacaaagtattcttggcaaaatagattgaagatttgttaattggttggattaacatagcactatctaacaagttggattaacatag

SEQ ID NO: 11388 - DNA, 931 bp, Oryza sativa
  ref <308>: DATABASE ACCESSION NUMBER: AK108736
  ref <309>: DATABASE ENTRY DATE: 2002-08-28
atatttgaatttatctgatgggagttacaggaatgtcatggacatgaatgccggctttggtggctttgctgcggctatgtctgaatatcctgtttgggtcatgaatgtagttcctgcaaatctgacggacaatacacttggtatcatctatgagcgtggcttgataggaacatacatggactggtgcgagtctttctctacttatccacgtacatatgatgtgctacatgccaatggagtattcagcctgtatatggacacgtgtggcatcccttacatcatgctcgagatggatcgcattctccggccaggaggtgctgcgataatccgggacgcgcctgatgtggttcacaaggtgaaggatgctgcagacaggctacactggcacagcgaaatcgttgacactgagaatgggggcctggatcctgagaagcttctcatcgtggacaattctcttccattcccagatcaccctgcatgatgttgataatttccacatcttctctgatcatcatcttcagaatcagaaaagattgttcttggatgcttgtatacatgcacagatgaagagtataagaggactctacacgcaatagttacatatccagatgaccacatagccgaataatccaatgtatttgagctgtttactccactagacactgtcagattccaataaaccagtataggtaacttaatctcctgagctctgtgttgttcccagcatggtgttggatgtgcagagatgcaaccatgctcgattctgtagagatgtagtatctaattgctctgcatttgtatattgtatactagctgtgtattatcggtgagatttctgtgaaattccttcagagtttgccttgctttgcttgctaagcaatggcatgattcatgtatgatgatggaatctgtagcctctacagttttgctc

SEQ ID NO: 11389 - DNA, 817 bp, Oryza sativa
  ref <308>: DATABASE ACCESSION NUMBER: AK108737
  ref <309>: DATABASE ENTRY DATE: 2002-08-28
gtgacaaagtcagtggcaaatcgtagacgtgcgacaaagtcagtggcatataatggattatctcttaaaaaaatcaaaacggagaggcccacttgccatccccatatgctttttcctttatttttcctgctctaatttttcccctttcctcctcggccgttgccgttgccgttgctccccaccatctttctctctctctctctctctctcctcctgccagtagccgctgccgccgccggcgagcgattccgcggtgatgttcgcctggctcctccgcggctgccgcgacgagtgctccgcctccgaccagctcaagcaggcccgtgatgtcttcgtggcaaaagaggcagttctgcaaaagaagatctctcaggagatggaacgtgccaaggagttcacaaaatcaggaaataagcaagcagcaatgcagtgcttgaagaggaagaaatactatgaaagccaaatgaatcaggttggaagtgtccagttgcgcattaataccaaggagaagatgattgctgatcatagcgggaataaagaagacaagtgaaatcagagttctgaatgtatgcctctttctgttacttatatttgcttggatcagatacataatcttgtgtggttagcatagtgtagcatagtttcttttaccaacaatgcaaattgaatttaacattgatgtgcccttccataatttatgaaagtggctgctttagatctttgttctttcactctttattggagaaaagtgaatctcataaactgcagtgtttatgatttatgtgaaccatgagcataaaatttcatttggattctc

SEQ ID NO: 11390 - DNA, 1178 bp, Oryza sativa
  ref <308>: DATABASE ACCESSION NUMBER: AK108738
  ref <309>: DATABASE ENTRY DATE: 2002-08-28
agagagagacaaccagacgggagcttgtcggggaggagagagagagagagtggtggtggtggtggtgagatggccggccgtgcgacggcgacggcgacggcggcggggaaggacaggtccagcttcgccgtcacctgtagcctcctcagccagtttctcaaggagaagaagggcggcggcggcgggctgcaggggctcggcctcggcttgcggccggcgccggcggcgccgcccgccgcgggagctggaggtgctttccggccgccgccgaccaccatgaacttgctgtcggggctcgacgcgccggcggtggaggtggagccaaacacggcggaaacagcggccgacgagctgcctctcatcaaggccccggccgatcagcaaagcgacgaaagtgcaagtgaggcagctggagagaaggctcaacagctgaccatcttctacggtggaaaagtagtcgtctttgagaacttcccgtccaccaaggtcaaggatctcttacaaatcgtaagcacaggcgatggcgtcgacaagaacaccggcaccgcggcaacgcagagcctgccccgacccgcacacaacagtcttcccgatctgccgattgcaaggaggaactcgctccataggtttctcgagaagagaaagggcaggatgaatgcaaatgctccataccaagctaactgcaccgctgcaccgtccaagcaagctaacggtgacaaatcttggcttgggtttggccaagagatgacaataaagcaggagatatgatatgacctcttagcttacagttcactgtcaagtgtcaagtgatctgtggggaagagatgcgtggttggctggttgctagtgctagtgtattcccccgtagcttcaaagcatgaataattactcaatactactacattactactagtaagaacttaatcaatactaggaatcaagctggtggttaattctgcctgaccattggcatcctggaatatatataagcacacacacgggttgtttgttctccacattgtttgctgctggagccgtatgctcactgcagtttatatctgtctagctggttacccacctcagcctcaccatgtttcgggaataaacactgtgtatgtgcaaattcctcatttctcgttcggtttcgccgtataaattacattgttactattttggct

SEQ ID NO: 11391 - DNA, 1455 bp, Oryza sativa
  ref <308>: DATABASE ACCESSION NUMBER: AK108739
  ref <309>: DATABASE ENTRY DATE: 2002-08-28
tagcgacccaactgaaaaaaccctatcatgcgcgaagcatgcatgcctcgatcgatctcgcacaaccaccctcttctcctcgatcgatcgaatggttggttcggtttggttttgattgatcgatattgcttttgtttaccattgccatgtccttgaaaccgggtggtgttcttggtcgccgccatgtcctcgccgccgtctgatccgagctccggtggtggcgatggcggctcggccgtgccggggacggcgagctccaacttcacgctgctgtacatcatcatcgccgtcctcgtcggcgtgatcctgtacatggcgatccggtacggccggtcggtgatgtcggagtggcgccagctgcaggccggcggcggcggcggcgagccgcgcgccgcgctgctcgggctgagctcggacgacatcgacgcgctccccacgttcacgtaccgggcgcgcggggcggcggcgtcgccgctggtcggcggcggcgggaggaggggcggcggcagcggcaaggggaagggggcgacgacggtggtggtggagtgcgtggtgtgcctgcaggagctcgccgacggcgacgtggtgcgcgtgctgccggcgtgcaggcacttcttccacggcggctgcatcgacctctggctgcgcgcccactccacgtgcccggtgtgccgcgcgcacccggagcccgacggcgtgcggctcagcgacgtcgtggccgtgtcgccgccgctgccgcagctgcgccggtgcggcctgtcgccggagcggcccacggcggcgtcgcgcgccctggcggacatcctggcacgttctccattgaggggcaacaccacctcgacgacgacgatcaccaccaccggcggaccgatcacgtcgacgtcgtcgaagtcgccgtcgtcaccggttcaagcggcgatcatcaactacgtgcaggcctcacgttcgccgtctccgacggcgtaccacagcctgaacgagcggtggccgagctcgccgacgccggttgtggttgtgcggtcgaagtcgccgtcgccgtcgtcgccaccgataggtggtctgagtctgcagacgacgacggcggcggcggcgagaggcgtcggcgtggtggaaggggtggatgcaggtgcaaccacgtcggcgtcggcgtcggcgccaacgcaggtggtggcgctgtcaagggaaggtggtggttcgcggtccaagtcgccgtcgccggtgccacattaataacgaggctgcagaagagacgccaggataaggctatagcttgacaggcaatttgattctttcttcctttttttttttttgtgtatgtctcttgtatagcttgtgggcttagatttgctccttgatcacattgtcttgacacgaagaatgtgtgtattttgatagaacggaaatgacaaagtcctgccaagcaggggttctcaacattaagggcccctttaaatc

SEQ ID NO: 11392 - DNA, 654 bp, Oryza sativa
  ref <308>: DATABASE ACCESSION NUMBER: AK108740
  ref <309>: DATABASE ENTRY DATE: 2002-08-28
ttattcttgcatgattgatctatacgcacgtgctggactattggaaaaagcagaggaaatgcttgaccataccccttttcctccaacgtcgactatgtgggcagcattagttggggcttgtcatgacagaggcaacatagaaattggtgaaagggcagcaaggaaacttttggaaatgaggacagagaatgctgggcactatgttctgattgctaacatgtatgcagctgctggttgctgggatgaactagcaacagtcaggaaactaatgcgtgacttaggtgtcacaaaagcacctgggttagcatggactgatcttggcaatgggttcaccccttttttagttggagatagatcaaaccctctagcaccggagatctatgtggttttagatgaattatctgagcaaatgaggaatatcaataattgcagtgatctagacatattagcggaaaacatagaataaacaggtaatgataggacgtgaaggaaatgttcttgctttttgtgtagtagagatcacaatgaactccaaaaatgagatggtgcagtgagtcacaaagatccaaaaaatgaagcagcagcacatagatatatggatcaattctggagaaaattgctacaaaatggacactgcaacatatgtaggtttct

SEQ ID NO: 11393 - DNA, 1548 bp, Oryza sativa
  ref <308>: DATABASE ACCESSION NUMBER: AK108741
  ref <309>: DATABASE ENTRY DATE: 2002-08-28
ataccagagttgagggcttgaagcgctcggagtgaagggagaagaagagcggcggcggcgatggaggggtgggacaaggggacgaagagcgtggtgggcgagatcccgctgctgtcgacgcgggcggggccccgggacggcgaggcgtggcggcagcgtctcaaggaggagtaccgcgcgctgatcgcctacacgtcggtgaacaagtccaaggacaacgactggttccgcatctccgccgccaaccccgagggcacccgctgggagggcacctgctggtacgtccacaacctccgccgctacgagttccccctccagtccgacatccccgtcgcctacccccaggtcgcccccgagatcgagctccccaccctcgatggcaagacccacaagatgtaccgtggcgggaagatctgcctcaccgtgcacttcaagccgctgtgggcgaagaactgcccaaggttcgggatcgcgcacgcgctgtgcctcggcctggcgccgtggctggcggcggaggtgccgattctagtcgattcgggcatggttaagcacaaggacgatgaggcggctccggccgatgcagcggctgctgcgtctggatctgccgctgcttcgtaattatgctcctccattatgttcagtgggcttcatagagtttctgtatcagcagaatcaaactccttatgcataatcataggtatgttcttttttatttaggatgaaacatgtttcctattgatggttaactaagaatattgtaaactactataggtttctgacataaccataagaaactgaagttccatttgtctttttttttctccgagttctgacaagttacaactacaataatctgaccacacttttcttttgaagtctttttttgtccgactagtaccaaaaccgatgaagcaaaacagtgccatgtcttactctgttgcatcacctaatatagtttatagcctcttaaatatccactatcctagacatgcttagaatactacgaatcaactaaagctgagtaaaggactcaaacttgcatcttcagggcaggtatcatctggttgtatagacaagtcagctgggagtttttctcttttttcttttttgatcttttttttggtttccacgtaccattgtggcacttcatgttgacatttctatttaatgcccttaagttttaacattttctcttgaaataatttctcccaaggataagccagaacaatttattttagtagtttgagatatgatttcagaattcagatgcctcttcctttaagttctggaggcttcatagagtttatgtttaacagcacaaccgaattccttattaatctcattctcctttgaattggtctttaccttgcttgctgcaacatgtttgtcatcgaagaagatatacaagctatgatttcagtgttggtacctttttttctcaatgtatttcaatttttaacagtcaagtaagttgcaacaaatcaagaagacaattagctgttttgtgagcaaccaccaatttcacaattttgcatttctcggcagtat

SEQ ID NO: 11394 - DNA, 670 bp, Oryza sativa
  ref <308>: DATABASE ACCESSION NUMBER: AK108742
  ref <309>: DATABASE ENTRY DATE: 2002-08-28
gctcgaggatctccacctctctcgccatccgccgccgccgccgccgttacccgtgccgccgccgctctccgctcgccgttgccgggatggagggggaggaggaggagaacgtggggccgttccgccgcaccagcgcgcggacgcggcggatggccacgcgcatggcctccgcgctcgccagctccgacaaccgcgcgcaggctgcactagctcgtcttgaagcgcttgagagtgataatgctggccctgaggtcgtagatcttaacgatgatgatgaatatggatctgcagatgaggaagaccatgttctcatgcagaggaagcagtcaaagaatatgaagcgcaagacgaggcaagggaaggcattggagaagaaggcggcgagatctttcatggacgtgttacaggaggcaaacctggagtcgctgcctccccatgtcccaacgtactccagggccgccgttggtcccccgagcacctcgtcccggcgccattactgctcggtctgcggcagcacggcgaactacacgtgcgtcaggtgcgggacgaggttctgctcgtgccgctgccaggtcattcacaacgatacccgctgcctgaaattcgtggcctgatcgatctgcttgctgtacatatatcgtgtaggaggaatgggaaacgggcttgtctg

SEQ ID NO: 11395 - DNA, 2056 bp, Oryza sativa
  ref <308>: DATABASE ACCESSION NUMBER: AK108743
  ref <309>: DATABASE ENTRY DATE: 2002-08-28
caaaagaacagaaagggcaagtgatgagctcctttatgataaccataaccttggtaaggatgatggtttacagaagttcacctgcagattatgtgggatgatgtttgatcttttgccagatcttggccaccaccatcaagttgctcatacaaactcaggtacagtcagtgatatcccttcaggacgtgaaaagtatcagtttaaccgtggtcggcactattattcagccttcaagaaaagtttaagaccatccggctcattgaagaagaggactagttctggagttgagaaacattttaaggctcaaagcttggatctatctatggatacatcacacattgtggaatctgagaccaccacccttggtaggttactggatttccaatgctcagacgtggcattgactttattttcaaagattcaaaagacaagaccccacccaagcaaccttgatattctgtctattgcccgttctgtttgctgtaagacaagccttcgtgctgcattgaaagctaaatatggaatcttgcctgataacatatttgtgaaagctgcaaagctttgtagtgatgttggcatccaaattgattggcatcaagaagaattcttttgccctaaaggttgcaagtccaggtctagttctaattccttgctccctttacagcctacccaagttgattttgtgatgagtcctccaattggtgatgagatatggggcagggatgaataccactatgttcttgattcagagcactttggttggaatcttaagaatgagatggttattgtttgtgaagatgttagctttggcagggagaaagttccagttgtctgtgccattgatgtagatgcaaaagaatttccatatatgaaacctggagaaattttgcaaagtgaaaattctctgccctggcaaggtttccactacgtcacaaagcgtttgatggattcatctcttgttgattcagagaacactatggttgggtgtgcttgttctcatgcccattgcagtcctgaggaatgtgatcatgtgagcctctttgatagtatctatgagaacctagtggatctccatggtgtacctatgcgtggtagatttgcatatgatgaaaatagcaaagttattttgcaggaaggatatcctatatatgagtgcaattcatcatgcacttgtgatgcctcctgtcagaataaagtactgcagagaggactgctggtaaagttggaagtcttcagaactgagaataagggttgggctgttagagccgcagaacctattccacagggcacatttgtatgtgagtacattggagaggttttgaagatgaaggatgatggggccataagacatgtagaaagggaggcaaaaagtggtagcagctacttgtttgaaatcacttctcagattgacagggaaagagttcagactacagggactactgcatacgtgattgatgccacaagatatggcaacgtatcccgttttattaatcatagctgttccccaaatctcagtacgcgtttagtttcggtggagagcaaagactgtcagcttgcgcacattggtttgtttgcaaaccaggatatcttgatgggagaagaattggcctatgactatggacaaaaattgctacctggtgatggatgcccctgccattgtggtgctaagaattgccgaggacgtgtgtattgagtttgcagtggggcagaaaatggtaacggagcagtccaatccttagcatatctccagaagttcctacaatggcgtcacttagcaagggatagcaatgtttttttctagagcaacaatgcagtgctaggatctaattccccatgcatcattaggaatcatcatataggtctctcaacagttattaggcacaccatacgattgattttagtgtggcacacttatgcttaactgatcatttgttaggagcaacctgaaatgaaagcagttcaggctgcattgttcgtaggccagaagtgaagtgtcgttgtaacataccttcattcaatttttactgctcataagcgccatcgtcgaagttgaacc

SEQ ID NO: 11396 - DNA, 1183 bp, Oryza sativa
  ref <308>: DATABASE ACCESSION NUMBER: AK108744
  ref <309>: DATABASE ENTRY DATE: 2002-08-28
aaaaaaactctctcacacaggagaagaaaacgagaggcggagatgaagttggccaggaggaaggggtcgtcgtcgtctccggcggccgtggatgacgacggcacggcgtcggcgaggtcggggcggcatcgagggtgatctcgccgcacctccacgacgtcgtcctccgcccgctgcggcgccgcctccgcgcgctgtggcactgcttcttccactggcgctctcgtcgctgccggcgccggggcctctcccctcctccctcgcgctccttgccaaggtcgccgtcgtccttgcccgctgctcccgccgcctccttgccggtgagcgtaggtggctcctcctccgccgctacagaagcagaagaatctggcgatctcggtgtctcggtcactgcaacgccggcggcaacatgctctggaacctctacctcctctccatcctgatacctggtaccttggtatcagtcggtaccaggtacctttggtaccgactgatacctttggtacctggtaccaggctagtacctagtatctggtaccgggtacccgtgatatctagtacctggtggcctggaggaggagagagaggaggaggtagccgcgtggtggagcaggagaaggaggtggcgcgcgaatccggtggtcggcgaggcgaagcgtggaggaggcagcggcgaatccggtggtcggcgaggcggggcagccgatgagaagaccgacgagagcggggagccagagcggcgcggcaagggaggcgagcttgagggcgacccttgccgaggccgcgccgtcgtcgtcctcctcggcggccggggtcctgagccagcagcggcttccccggcgccggcagcggcctccgcgcccccgctcccgctctccctcttgttcacctcacccgtcgccaagctcctcgtcgtcgccgcctcccccgcggcggtggccgccggctccgacgagcggtggggcgacggcgacggggacgacggcggccaccggctccgacgagcggtggggcgacagcgacggggacgacagtggccgctggctccgacgatttgggggggaagagtgaggtaggaggaggggatcgatccggattactatcccgtctccacgggatgtcgtggaatagattttctgaaccaagatatatgctgtgatggactctgtccgattgattcttc

SEQ ID NO: 11397 - DNA, 1492 bp, Oryza sativa
  ref <308>: DATABASE ACCESSION NUMBER: AK108745
  ref <309>: DATABASE ENTRY DATE: 2002-08-28
acataagctagctccccatactctcacaccccatgtcttctggaggaggaggaggaggaggaggagatcgccatggcccctaccaccagcacgggcacctcggccgcggcgaaggcgctgattacgtgtacagcagcagcgacatggagagcttcttcttcagccaacccgggggcgtcggcatcggcgggggtggtggtggcgtcgtcggcgccggcggtgccgacgagatcatgccgtactccagcatcacggactacctgcaggggttattggacccctccgggctagctcggcacctcgacgtggcgtgcccgtcgtctcaggacacggtggtcaagcaggagctgtcggtggatgtgacgagccacgacagccagggcaccggcggcgtcgccggagaaggcgtcgcgcaggccacgccgaactcgtcggcgtccttctcgtccagcgacggagaggcggagggcggcaaatcgtcacgccggtgcaagaagggtcaggcgaaggcggaggaggaggacgacaaggatgaggaggatggagagaactccaagaaaccgaacaagcccaagaagaaagctgagaagaggcagcggcagcctcgcgtggcgttcctcaccaagagcgaggttgatcacctcgaggacggctaccggtggcgcaagtacggccagaaggcagtcaagaacagcccatacccgaggagctactaccggtgcacgacgcccaagtgcggtgtgaagaagcgggtggagcggtcgtaccaggacccctccacggtgatcaccacgtacgaagggcagcacacgcaccacagcccggcgagcctccgcggcggcggcggcggcgtcggcatcgtcggagggcaccaccaccaccacctcttcatgcccggcgtgcatggcctgccgccgtcgcacctcatgccggcggggttccaccctgagctgatgggcctcatgcaccaccacccggccatggccgccgccgccgcaaaccctagcatgtacttcccgggcgtagctgcttctgctccgccgcctcctgctgtggctggcggcggtgcaatgccgcccaacgatcatcctcctcttcagcagcatcacttcactgactacgccctgctgcaagaccttttcccttccacaatgcccagcagcaacccatgatgatgactgatctaactgattctgcacaaatatatactactcaatatttaactagcacccggaatttatcaagatgcttttcaaacattggagtcgttgcgccaaaaatgtgatggctagggagtgcttgatgatcagcttggtcttgagatggaagctacaactttataactagaacggctgcattccacttgattcttcagcatagccctttactgttctgcacctctagacttattgtacatgcatgtactagtgtatatcatgtgtacctcattgactcattttcggagagagcaaattaattaatatttcgtctc

SEQ ID NO: 11398 - DNA, 1536 bp, Oryza sativa
  ref <308>: DATABASE ACCESSION NUMBER: AK108746
  ref <309>: DATABASE ENTRY DATE: 2002-08-28
aggaactatggcttgtgtaccgtaatgaaggccgctcattatcgaagctgatatatacagctgaagaaacaaagttagttaccggtaacaataatgagagggtcaggcatattcaagttcttcaaccatcaaagtggtggtattggttaaggacaacgaaagctgggcaaaagcaaatgcaaaatctcttatggcagctgctgatgggtctgaaagcttgtcatgatcgtaatatcactcacagggatattaaacctgagaacatgataatctgctttgaggatctggagacaggaaagtgtttgagagagattccgtcggaagcaaaacacaacaaactgaacatgcgtcttattgactttggcagtgcctttgatgatttcacattgaagcatctttatgattcagggcctactcggtctgagcagactttcgagtacactcctccagaggcacttcttaattcaagttggtttcagggatcaaaaagtgccagacttaagtacgatatgtggagtgttggtgttgtcatgctggagttgatagtaggttctccacatgttttccagataagtgaccgtacacgtgctctaatggatcatcgccttgaagggtggagtgagcaaacaaaggaacttgcatacaagttgaggtcctacatggaattgtgcattttagtcccaggaatttcctcgcagcatcagggcagtggtgactctgaacatggtcagtttcggccggcttcttggaaatgctctgaagaatcatttgcgcatcaagtgaagatcagagatcctcttaaaatgggctttcctaatatatgggcattgcgactagcacgccagttactaatatggcatcctgaggaccgcctaagtgtcgatgaagtattagctcatccttactttcaggagccaccgtaaccgacacatgataaaaatctaacgtactcgtgacctataacaagtcctccaaattttactgctgagtgtacatttgcttggtgagttcgatcgaaggaattggtgaatcatttgtagatgccaacccgattgtcttaccagctgttgtgaataccacatgaaaaatagttgtacgcagcaatataggtagatgcaggctatgtaaggatcagaatcagctgtacagattatatgctcaaccgaaatgaagaagaatgttacaactttcagctgtgttgaattgtgtgcttagtctctttggaagaacaaagattgtatacataatttttttctactccctccatcccatcccaaaataagtgcaattttacactattcatatccaacgtttcaccgttcgtcttatttgaattttttttatgattactatttttattgttattagatgataaaacatgaatagaactttatgtgtgactatttttttaaaaaaaattcataaaattttcaaataaaacggacggtcaaacgttggacacggatttctacggctgtatttattttgggacggaggtaataatataattatgcaatacaacattattccttgttc

SEQ ID NO: 11399 - DNA, 970 bp, Oryza sativa
  ref <308>: DATABASE ACCESSION NUMBER: AK108747
  ref <309>: DATABASE ENTRY DATE: 2002-08-28
gacgatgatggcgttggcctaaccggatttgcagtgcatcaggtaagggaaaaaggatggttagatagagagaaggggagttctgtgattggagaggagaggagacagggatgaggcagagcatgggatggggctatcaacagatgtagattattccttgcacaagagatgatgatgagctgtgaatgagttctgagagatggctggtgttgttgttgctccctcccctgcactgcctcttccctggctcccctgcacacctctctctctctctctctctctctgtgtgttagtatattgtttttatgttttagtaattattttccttccataagtgatacggtatttgtagcatgtaggtagaaaaaaaatgaaactagagtgatgtgacacttcaagggctgttgcaaattaacacattttaaaatggaccaagcgcactatttctcagcatgtggttctagctcaaaacatgcatttcattcggcatgccatgctagttttaagctcagtatagcatttcaataatttatttgacatactaaatctagctcaaaactgcatttcatacggtatgtcatccacgtttctagctaaaaatagcatttcatttggcattgctatgctagtttctagctcaaaatagcattctaatttacatgcattgataattcctagttcaaaatagtaatttaagggatctttttccacttgaacccggagctgttttagtgcaggggaggaggaaactgcgcggtctgatggagattgggcaagattgggacggaaggaagcagaacaaagcgaaaaattcaagatatgctttgcgatttgccaattgcaatagtttgcaatagaatctccgtagtataatttttggcatgtcctgctgtaactgccggaaagaacaaaagaaaagctcaatcttggttttcagaccatgcaatgcaatgatgaaccgtttgttact

SEQ ID NO: 11400 - DNA, 1733 bp, Oryza sativa
  ref <308>: DATABASE ACCESSION NUMBER: AK108748
  ref <309>: DATABASE ENTRY DATE: 2002-08-28
cagaatcgtcaagatgattatggaacggaagtttcaaccggtcataattttcagctttagcagaagagaatgtgaacaccatgccatgtcaatgtcaaaacttgacttcaacactgatgaagaaaaagataacatcgaacaggttttcagcagtgctattctatgtttaagtgaggaagatagaggtttgcctgctatagagttgatgttgcctcttcttaaacgaggtattgcagttcaccattctggattgcttccattaattaaagagctggtggagttgctcttccaagaaggccttgtaaaagctctctttgctactgaaacatttgccatgggactgaatatgcctgcaaaaaccgttgtgttcacgtctgtcaaaaaatgggatggtgatactaaccgctatattgcttctggagaatatatacagatgagtggaagagctggtcggcgtggcaaggatatacgtggaatttgtgttataatgatagatgaaaaaatggagatgagtgttataaaggacatggtgttaggtaaaccagcacctcttgtcagtactttccggctgagctattacacaattctcaatttaatgagtcgcgtggagggccagtttactgctgagcatgtgatcaggaattcattccatcagtttcaatatgagaaggcattgccagaagtggtgcaaaagattacatcattggaaaatgaagctaccttacttgattcttctggagagactgatcttgcagaatatcataaattggggcttgatatatcggaacttgaaaagaaaatcatgtcggagatgattagaccagagagggctttgttatacttggttcctggaaggctggttaaagtgagagatggttcaacagactggggatggggtgtggttgtaaatgtggttaagaaacctccacaatctggtactctccctcctgcactaagtgcatctcgtggtaataactatatagtggataccctgcttcactgttcttctagttcgaacgagaatggatcccgttcaaagccattgccaccacgcccaggggagaagggagaaatgcatgtggtgcctgtaccactacctttattatctggtctaagcagtgttagaatcaacattcctcctgatctacgaccacctgaagtaagacaaaatatactttttgcagtgcaagagctgggaaagcggtacccccaaggtcttccaaagctagatccaatcaaagacatgggtcttcaagaacctgaactagtggagttggttcataagcttgatgatcttgagcagaaactgtgttctcatccacttcataagtctgatcaaagtgagcagcaactgtcatggtatcaaagaaaagctgagctaaatcatgaaattcaaatgctaaagtcaaagatgcgggattcgcagctacaaaaatttagagatgagcttaggaatcggtcccgtgttctgaagatgcttggtcacattgatgctgatggtgtgctccagctgaaaggacgtgctgcctgtttaatagacacaggggatgagctgcttatcactgaacttatgtttaatggtacatttaacgatcttgatcatcatcaagttgcttcccttgctagctgctttataccttgtgagaagtctagtgaacaaatacgcctgagaagtgagctttctacaccaatgatgcagctacaggaggctgcgagaaaaatagctgaggtac

SEQ ID NO: 11401 - DNA, 737 bp, Oryza sativa
  ref <308>: DATABASE ACCESSION NUMBER: AK108749
  ref <309>: DATABASE ENTRY DATE: 2002-08-28
tgtgtgcgtgtggagtgcgagctccattagcacaagatgccaatcccgtcgcctcatcacgccatggcggcgagcccagctctcgcaccaacccgcacggtgccggtactgccgccgcgcgggccgtctcgccaccggaacgccgcggcaccgccgtgtcggcctgcgacggcgcggatcggcgcgtctccaggcgacggcgcggccgcggcagcagcggctgcggtggagcagggcagtcggagcgaggagaaggataggaagcgatgcctgcggtgcgggagcctgtatctcgacgaggacaactcccccaccgactgcgccttccacggccacgtcacaggggagaaggggttgttctcgctgtcgccgccgcaccaggggatcgacggcgaatggagcgacaagagcggggtgatcgtgtacaggtggaacgacagggggagtcgcccaaacaccgggagagacaactggaaggggaggtggagctgctgccaggagcgcgacgagggcgcgcccccctgccgccgcggacgccacgtctcctacgacgacggtttcaccctctactagacgcactctctcttaagtacagcgacggtttcaccctctactagacgcactctctacagcgagaatgtgagaggaagtccccaaaaagcattcgcaatgttgattctgtacgtcagtgtcagatcagtagtgcggagtgtggtaatcaaatgaattgcagctct

SEQ ID NO: 11402 - DNA, 1441 bp, Oryza sativa
  ref <308>: DATABASE ACCESSION NUMBER: AK108750
  ref <309>: DATABASE ENTRY DATE: 2002-08-28
agcttttaagaacacgttttatttcaactttaatcctagttatgttgggtatggtcttatttccccccatattgtcaactgctcagtttttcttgggtcagtcatatcttggggttttctttggccatttatcgctaagcaagctggtgattggtacccagataaccttagtaacactgacttcagaggcctatatgggtacaaggttttcatagcaatttctgtcatacttggtgatggcctctacaacttggtaaaagtattccttattattgcaaaggaaatatgtaatgcacgatcaaaagaacatgacctacctgttcaagctctacttcaagatgatgacagttccagacaattattggacgagaaacgtcaaactgagatattccttaaagacggcatacctacttggcttgctgtttctggttacattgttcttgcagcaatatctaccgtggctgtacccatcatatttccccaactgaagtggtaccttgtccttgtctgctacttccttgctcctgccattgccttctgcaactcttacgggatgggcctcacaaacttgaaccttgcacccacatatggcaagattgccctcttcgtgtttgcctcgcttgttggcagtgatggtggtgtcattgctggccttgcagcatgtggtgtaatcatgtcaatcgtctgctccacagcggatctcatgcaggacttcaagagcggctatctcaccctctcctcgcctcgatcgatgttcatttcccagatgatcggtgtcgccctcgggtgcataatcgctccactcacactctggctcttctggacagcgtttgacatcggtgaccctgacggcgagtacaaggccccatttgccatcatcttcagggagatggccatcatcggcatcgaaggctttgcggcgctgccaaggcactgccttgagatctgctgtgggttcttcttggcagcactgatcatcaacctcatgaaggatgttgtaccaaaccatgtctccaggttcatccccattccgatggcgatggccgtgccattctacattggcgcgtatttcggcgtggacatgttcatagggacattgatcctgttcgcctggcagaagatagaccggagagaggctgatgactatgcggtggtagttgcgtccggcttgatctgtggagatggggcctggagcattccttctgctgttctgtccatcctgggagttgatccaccgatctgcatgtccttcaggccatcttcagcttctgtatgagacgatggatcaaaactttggagttttcatgcggttatatgattgaagctgagcctctgtaaatgcattcatacaaagtagatttgtgttgtgtatattttctacttctgtgtacaattgtgtagaaaatgggacattggaatagagccgttgtccacgatgaac

SEQ ID NO: 11403 - DNA, 1927 bp, Oryza sativa
  ref <308>: DATABASE ACCESSION NUMBER: AK108751
  ref <309>: DATABASE ENTRY DATE: 2002-08-28
atccgcatcccttccaccacctcccactttcccgtatcgtccccccgtcttcatagtcgccgcgatgctcgctcgttccgccggcattgccaccgccaacctcgcccgatcggccgccgtccctgtggcccgccgatcggttgccaacgccgtccgcacctacgccaccgccaagcctgccgcttccgaggtcagctccatccttgagcagcgcatctcgggcgcctccgctggcggcgatgtccaggagaccggccgtgtgctcaccatcggtgacggtatcgcccgtgtctacggcctccgcaacgtcatggccgaggagatggttgagttctcgtccggtgtccgcggcatggccctcaacctcgaggccgacaacgtcggtgtctcgatcttcggttcggaccgtctcatccgtgagggtgacactgtcaagcgtaccggccagattgtcgacgtgcccgtcggccccaacatgctcggccgtgtcgtcgacgcgctcggcaaccccatcgacggcaagggacccatcgaggccgccgagcgtcgccgtgcctcgctcaaggcgcccggtattcttccgcgtcagtcggtgaaggagcccatgcagactggtatcaagcccatcgacgccatggtgcccatcggccgtggtcagcgtgagctgatcattggtgaccgtcagacgggtaagaccgccgtcgccatcgacaccatcctcaaccagaagcgctggaacgacggccaggacgagagcaagaagctctactgtgtctacgtcgccgtcggccagaagcgctccaccgtcgcccagcttgtcaaggtgctcgaggagaacgacgccatgaagtacaccatcattgttgccgccaccgcctcggaggccgctcctctgcagtacctcgctcccttctcgggatgcgccatcggcgagtggttccgtgacaacggcaagcacgccctgatcatctacgatgacctgtctaagcaggccgtcgcctaccgtcagatgtcgctgcttctgcgtcgtccccccggtcgtgaggcctaccccggtgacgtcttctacctccactctcgtctgctcgagcgtgccgccaagatgaacgacacccacggcggtggatcgctcaccgctcttcccgtcatcgagacccagggtggtgacgtgtcggccttcattcccaccaacgtcatttccatcactgacggccaggtgtacctcgagtcggagctgttcttcaagggtatccgacccgccatcaacgtcggtctctcggtgtcgcgtgtgggttcggctgcccagtcgaagctgtacaaggccgtttcgggttcgctcaagctctcgctcgcccagtaccgtgagctggctgccttcgcccagttcggttcggacttggacgctgccacccgcgccaccctgaaccgtggtgtgcgccttgtggagctgctcaagcagccccagttcgtgcccatggccaccgaggtgcagatccccatcatctacgccggtgtcaacggtctgatcgactcgatccccgccgaccgcatcgtcgagtgggagaactcgttccgcgagaagctccagaccgaggacgccctgctcgccgagatcgccgccggcaagcccagcgacgagctcttcagcaagatgaaggcgctcgtcaccgagcacgtcaagagcttccttgcctaaatgtgggcgtgcgttgcctcgaacaagagcgtcggtagctcgtctcacagttgcggccgacgctgcccctagtcgctcgctcgatgaatgccaacgtgcctcgctgtgggacggtccgccgagcttggcttgacagtgagcaccggggctgcgtccaatccacgcggtcctgttttctcctgtgcacatgttcccctcccaacccgaaagaaatccatacacagtatcgct

SEQ ID NO: 11404 - DNA, 909 bp, Oryza sativa
  ref <308>: DATABASE ACCESSION NUMBER: AK108752
  ref <309>: DATABASE ENTRY DATE: 2002-08-28
gcgctaattgttgtggcttgtgcttttcagtttccactttccagcatggatttgcgctgagaaagaactgatgggtgaggccgcttgcaaatgcaagaggtaactggcttctttggtcactgggttcaaggcttcaagctggccagctctgcatgcatcacggaggcagcggaggtggcgtggtcgaacggcagcgggttaagagtgagccggaggccccgccatcgggttgactgccggccgtcctgccaccaccaactccgttgtctccgcctccgatctccggcgacgagcggctcggcgatgaggtgaggtcgcggtggtggcggaagggtcgagggggcggtgcgaccggccatggtggcagaagcggcaaggaggatatcgaggagacgatgcgagcggttgatcgcagaggcggtaaaggaagccggcgacaagcagggtggcgttgagccgagctgatccccgcggatgtagcgacggcgtggacctccgccgccgtccctactcgtctatatgaggcagcgctagctggtgagcaggcgcgtatcaaggccccgcgcgggccgtcaagctccaggaccagcgcggaggtatcccctatggcgctctctatctcagcgggctccctccaatgtcgtctacaactccgtcgtcggatccttcgcttcccccgtatcgtctaggcgcatcgtcgcctcgcacggatcaaggcagggcggggccaaggagcaccaggtcaatcgagctcgagctcatcgtccccgtatttgccatctacgcgacggcatggtgattaggaaaggggaatactgtatattgttcttgctggattttttttttttctgattctgggtcttttttcatatactctggactgttctagataagattgtgcattttgtt

SEQ ID NO: 11405 - DNA, 720 bp, Oryza sativa
  ref <308>: DATABASE ACCESSION NUMBER: AK108753
  ref <309>: DATABASE ENTRY DATE: 2002-08-28
aaaaaaccccaattcacacgcgttgcggtctccgacgagggcgaggcggagctaatcgtcatctagggcaaggcggagctaatcgtgggtccgatggagaagccgtcgccgccgccgccggggaagtcgcggccggattgcgtcaactcgtcgaacccgtaccacgagtgctccgactactgcctccggcagatcgtgaagtccagggaagataatcatcggtggtcgcgcgtccatccccactgcatcaacgcctccaacccctaccacgcctgctccaacttctgcttcaggaggatcatccacgccaaaccctcaccttcagggttggagcgtccggtgcaagagccgcctgcgtccgaagctgttcctgcccaagctgacgacgatgatgatgcccaaactgacgacgacgacgaggaggacgctgccgcagacgacgacgatggttacctgaagatgacagtgacagagaatcagaagctagtatttgagcttcgggtgcggccatcgacgattctgcggtttgtggtagctgctgtgtgtgcactcctggttattcatctcctcggcgtatctctagttgtcgttgctcacgccctcatttgattagacaaagagaagcatatataattgagggaaaataggaatcaaggtctattgtacaattttgatactataatttgatacgtatggtataggatgaaatttacttttctt

SEQ ID NO: 11406 - DNA, 1407 bp, Oryza sativa
  ref <308>: DATABASE ACCESSION NUMBER: AK108754
  ref <309>: DATABASE ENTRY DATE: 2002-08-28
tatttagttcaaattcctaagcatttggatccaaatcccttgtattcaaataggccattagttttttaaaaaaatgcagtactcctttttacttctttttgctaatttaaacaacataagagtagtggcgagagtagtggcaataacctaaggaggtagataccttcttcttcacaattttaaccatttattttttaaactattctgttcagcaactttaaattagacatactcaccacagttcttcaccattgcctccaacagctgaaaatatttcgtgaccaatattaacaagaaaaatcataatcatggagtactcgctgccttatcatatgctgatagctcaacagtgagtcagtgacagataagtaaatgggcattgacaaacaaattgatgttagtcacagaaataaaaactggaggttctcacatgaaaatattacacaagggtagatattgtgattaaaattgtagcacgaaccatcaacgtgaaaaattcaactctggcatccttatgctccaactgcttcacaattttctaccacgccttggtttgcctgattcaaagtggctgatagtattctgggtgaccagagattcagaggtaaccttccatctacaagttattttttggagataatgcagttttagcaattcaaactgtcgagtttaccaataagaaataaatagaacatttaatgtgtttagtgatgcagtatttttcactgtactgttcaaattgaatgtctacattctatatagttaaactacagagaactttgaatgcattttttttaccatgaacagcaacttagactaaaagtataaactgccttcagaccttgtattttcaataacgaaagtagcaagctaaagcaaccagtaaagctacaacatatttacatggcgaattactcaacagatatagcacggcctgatttgcaacaaaaaagaaaagtagaaagaagatagcatgcctgtaataaaaacagattagtttaaccatattctgttaaaggagagcaacaggttatggtaatcattgtaaaccagattctgatgcaagttactgttttattccatctctcagaaacttttatcaatggatgagtttttggagcacagaaggcaattcgggaagaacggggaggaggatacttttagagatgcagaaatttcagaacatgaaaagcgggaggagaagctccttcgtaaaagattgtcatctactgtcaaaaagttgtcccgttgcttacacgagaagaagcctctaattctagaaattggagttcaaatagaaaacaataataagtgcgtagacctcactgttttggatatgcttttttttgctactcttcctaatcatgtttcttgtatgtatgatcaagttaaatactttctggtgtt

SEQ ID NO: 11407 - DNA, 1204 bp, Oryza sativa
  ref <308>: DATABASE ACCESSION NUMBER: AK108755
  ref <309>: DATABASE ENTRY DATE: 2002-08-28
acacctcacaaaaaagcaaacaagacagcgaaaataatcagagagagaaactggagagagagaagagggagagatgttcccatcaccagggagggcggtgatggcgctaggccaccacggcgccgcccgccaaccgccgaccaccatggcggcggcggcctcctcgtcgacgacctccgccgccgccgccccggccacggccaccaccaccgtcgccttctccttccagcatcccacgcccacgccgtctcaccaccaccaccaccatggcgtcctaggttacagccccctcgtcctcgaccaccaccacccaaccaccgccgccgcctcctcgcacgcgccctctcctcccaccctccaccaccaccacggcggcggcctccacgccgccgcgcctcctccgagatcgtcgccgccgcatccatggtcttgcgaggaaggcgatcatcgagggaggccgcagatggggaataagggcgaggcggcggcggcgatgggcgccatggggatcaacgacgccggcaacaacacggcggcggcggcggcggcgcagcatcatctgggggttggcgcggtgaggatgaagaaggttgggggaggaggaggaggaggagggaaggcgcggcggaaggtgcgggagccgagattctgcttcaagacgatgagcgacgtggacgtgctcgacgacggctacaagtggcgcaagtacggccagaaggtcgtcaagaacacccagcacccaaggagctattaccggtgcacgcaggacaactgccgggtgaagaagcgggtggagcggctggcggaggacccccgcatggtgatcaccacctacgagggccgccacgtccactccccctcccgcgacgacgacgacgccgcccgcgcctccgccgagatgaccttcatctggtagcttgcttcctctacctagctctcccgtcgtcgtcgtcgtcgtcgtccttcgccttctccgactccgatccacaagctgatgatcagctagctggtcatatatccatcgacgactgcatttcgatatcacatgcttgtgtgtgtattattattattactatttgctgttactgttgtttaatttgtcaccgttatcatagttatgttagttagttaggctggtgataattacttatatatagcgcttgttgtacgtagccgagtaatattatggagtacagttttctgt

SEQ ID NO: 11408 - DNA, 1120 bp, Oryza sativa
  ref <308>: DATABASE ACCESSION NUMBER: AK108756
  ref <309>: DATABASE ENTRY DATE: 2002-08-28
gaagaaaatccgacttcaaaggcgcacatacacacaaacaaacaccctcctagtgcggctagtgcggctgcactcgcttcaactgccacgccaatggtgaggaagctgccgctaagctccgtcctctacaccatcaactcggccagggacatcccaccctcgtcgcctccccctccggcggccactccaccggcatggatgtggccttcttgcaagcaccctagagctcattccttccgttcaccgtccgccgcctcggcagccgcagcggccaagaccatcgcgtcgatcttcctcgactccggcgagtcctccttcgccaactcatccgcgcgcatgcaccacgactgcgcctccgacagcctctccaccgagtccgacgtctccgccacggccgaggacatggccgacgccatagtccgcgggctccgctccgaccgcctcctcttcgagccccgcgcgccctccagctccatcctcgataagaagcccgtgcgccgcgccgcaggcggcggcgacgacgacgacgacggcgcggcgtcgttcggcggcggcgtcgcggtggcgttcgactcggaggatccgtacgaggacttccgggcgtccatggcggagatgctggccgcgcacggcgtgggcgactggggctggctggaggccatgctagggtggtacctccgcgccaacggcaaggagacgcacgccgccatcgtcgcggcgttcgtcgaccttgtcgtctccacggcggcaaggggctccagctcctcccgccactcgtcgttcactctcgccgggaccgacctggagagcagcagcgccggcggcggcgccgccggccatatctctttcaggctaaggtaaaataactaaagctagccccgagacaatgcgggctggctacctacgtgtgtgtgtgcgcgtgttaattaattccgtttgtctttgtgctaaactgtagtagcactttccaattgaatgacgaagtagctagctagcctccggttaatcatggatcaatgccagattaccgataatgcacatgactcctcctacccgtcgtgtatcaagcttgcatgagtggaagtaatcaagtaaactgtaatattgagtgtaagtgtgt

SEQ ID NO: 11409 - DNA, 1280 bp, Oryza sativa
  ref <308>: DATABASE ACCESSION NUMBER: AK108757
  ref <309>: DATABASE ENTRY DATE: 2002-08-28
tcaagaagatggagcagatcgtcggcaactcgtcttccccgcttcctccaaggcgttggtggcctccgacgacgacaacaagccacggcaaccgcagcagcatagcagcaaaaggcacgctccttctggcagtagcacccccaccttcggcggcagctccagattggcccctccatcaaatccaaaatggaaaagggtgcttctcaagattgggggcacagcattggctggagcgcctcctcaaaatgttgatcctaaggtaattatgctgattgcccgagaagttcaagtggcatgccgccatggtgttgaggtgtcaattgttgtgggaggtcggaatatattctgcggcgacacttgggtttctgcaacgggcactgatagagcttcaacatactcaatcgggatgatggcatcagtgatgaatgcagtactgctccaagcgtcactagaaaagataggtgtggagacacgagtccaaactgcactgatgatgcaagaagttgcagagccatacataaggcgacgagccatacgccatcttgaaaaaggaagggtcgttatctttgctggtattggtgctggcataggaaatccacttttcaccacagatacagctgctgccttgagagcttctgaaatcaatgcagatgttgtgcttaaaggtaccgccggagatgacgattatggttgtcctcctaggggcaacaacaatccaccttttgagcacatctcatttagggagttagcggctagaggattcagcagaatggatatgacagcgattacatgttgtcaggaaaataatattcctgttgtcatcttcaacatgttagagcctggcaatatctccaaagcaatttgtggggatcaagtaggtacattagttgaccaatcaggaaggattacataaactttaagaaggttagctgcggtagagcattgggtcatgcccgtactatgggggtagcctgcatattggttgatttttgtggatgcgagagcgggcatgttccttggacagaaggctcccaccttgatttgtctgggatgcttgttgtgtactatctgttcagtgccaattctctacaacggaggagaaaaaaaattgtagtatccatttgtaatgtgatatgtagattagattagtttgatgggcatgtatccttgtataaattggttcacgggtaaccgcatcaaagtagggctgtaaccttgtaaggctgttgttgaagtttagtgttgtattggggaacagcattttatctcttttctttgcc

SEQ ID NO: 11410 - DNA, 1292 bp, Oryza sativa
  ref <308>: DATABASE ACCESSION NUMBER: AK108758
  ref <309>: DATABASE ENTRY DATE: 2002-08-28
gactcctcctcctcctcctcctcgtcggcggtgctgcggcgctgatctccacgatggcggagcggtcttcttcttcgtcggagtcgactggtaatgatgagaaaaaaagttcaaaaccacaaggatcatccaatgatcatcaagggtttctgccaggaggctctcctgcaaatacttttgattttgcttctttgcacagcttgctcaatgatccatctgtaaaggagatagcagatcagattgcaaaggaccctgcgttcacccagatggcggagcaggcactggaaggcgaaggagaacagggcatgcctgcaatagacccttacattgaaacaatgcaaaagttcatggaaagcccccatttttttacaatggcagagcgtcttggggatgctcttgtgaaggatcctgcaatgtccagtctgctggaaaacttgactagtccaatgcataatgcaaagatagaagagcgtgtttctcgtatgaaggaagatccagccgtgaaatcaattatggatgagttagagactggtgatcctgctgcactgataaagtactggaatgacccagaaacatttcgaaagatcagccaggcaatggggcctttaggcggccctgattttgctgaaccttctggaactgaaggaactgaggaagaaggtgaatatggagatgaatccattgtccattggtgatgatgagggtctgaagaaggctttagatggtggagcagacaaagacgaagaagattcagagggcagaagggccttacactttgcatgtgggtatggggagttgaagtgtgcccaagtacttcttgaggcgggtgctgcagtggatgctttggacaagaacaagaacactccgctgcattacgccgctggctatggtatgaaggggtgcgtggatcttctgctgaagaacggagccgctgtcaccctcgaaaacatggatggcaagacggccattgacgttgcgaagctcaacaaccaggacgaggttctcaggttgctggaaaaggatgccttcctgtagatcgcctttgttattctcatgggcgcatgaacagtttggctccaggatcatcattctttaatttctttggtgccgccattcatatttctttgcaacccagtggcagttcataagatacggtgaaggggctgccacacaactgctgtggttcacgatgacttgcgtaccccagctttgtttctcttgttttcattagtgcaatcgagattgtgtatccacattttttttttcaatattgcgcatatattaaagatgat

SEQ ID NO: 11411 - DNA, 1388 bp, Oryza sativa
  ref <308>: DATABASE ACCESSION NUMBER: AK108759
  ref <309>: DATABASE ENTRY DATE: 2002-08-28
aaggcagagtccgaagcgtgcgttcaccgttccgcccgtccacctacctcgtcgagcgactccggcggtacgaggcccggcacaagcggtgcggccccggctccgcccttttccaggaagccgtcgagcacctgcgctccggccgcaacgccgcgcgttccgagtgccagtacgtggtgtggacgccgttcaacgggctcggcaaccgcatgctcgcgctcgcgtcaaccttcctctacgcgctcctcaccgaccgcgtcctgctagtgcacgcgccgccggagttcgacggcctcttctgcgagcccttccccggaagctcatggacattgcccgccgacttcctgatcaccgacttcgacggcgtcttcaccatgtggtcgccgacgagctacaagaacatgaggcaggccggcacgataagcaacgctaccgcggagcagagcctgccagcctacgtgttccttgatctcatccagtcgttcaccgatgccgccttctgcgacgacgaccagcaggtcctagccaagttcaactggatggtgataaagtccgacgtctacttcgccgccatgttattcctcatgccggcctatgagcgcgagctgacgcagctgttcccggagaaggaggccgtgttccaccacctggcgcggtatctcttccatccgtcgaacgacgtgtggggcatcgtgcacaggttctacgaggcctatctcgccagggccgacgagcttgtcggcctccaggtgcgcgtgttcccggagatgcccataccgttcgacaacatgtacgagcagatcatccggtgctcggagcaggaggggttgctgcccaagctaggacagacggtcgtcgtcaccgcggcgaacggctcgtcggtggtggcgccgagcacgaagctgacttccatactggtgacgtcgctgttcccggactactacgaccgcatccgcggcgtgtaccacgcgaggccgacggagacgggggagtacgtagcggtgcaccagccgagccacgagcgggagcagcgcacggaggcgcgcggccacaaccagcgcgcgctggccgagatatacctgctgagcttctgcgaccgcgtcgtgacgagcgccgtgtcgacgttcgggtacatcgcgcacgggctagccggggtgcggccgtgggtgttgctgcggccgccgtccccggtggcgcgcgccgagccggcgtgcgtccggtcggagaccgtcgagccgtgcctgcaggcgctgcctcgacggatgtgcggcgcggcggaaggcagtgacattggggctctggtgcctcatatccggcattgcgaggatgtacaaaaaggtatcaaactgtttagctagcgctttaatctgtctgcgtaatttgttcgt

SEQ ID NO: 11412 - DNA, 2076 bp, Oryza sativa
  ref <308>: DATABASE ACCESSION NUMBER: AK108760
  ref <309>: DATABASE ENTRY DATE: 2002-08-28
aaaaaaacaacaagtggatcgatcgatcgagtaaaaggagcaacgatcactagtgtctctccacggaggaggaggaggtttgacaaggtggcagagacggagggaggaggaggatgagtagcctggccattgtggagaagaggccggcgccgttcgtcggcggcggcggcgggtgcgcgggcggcgtgctgctccacctcctggactggcaccgccgcctcgcccgcaagcgccgcctcttctcgccgcgcaggctcctccccacctcgctccgctcttccccgcgcaggctcccgtccccgcctcaggcctcgcatcctcctcccgcgcctcgcttgtcctccgccgcaaccgccgccggtgtcgccgctccgggcgtgggcgtcgtcgcgcgcctcatgggtctcgagtcgtggcccgccactggccccgtcggcgcgcccccggcggcgcggaggccgcagaagcagaggaaggtggaggtggcatcaccgacgccgcgggccgacgagccagacgtggtcctggtgttgcctccgagccagcgtccgccgccgctatcgcctgcggcaaggaaccatcacggcgccgacctgccggcgaggagcccgaggcggagccgactcgtgcatgccgcggcgaccaagctgttggagcctagcgctcgcgcgagctcgagggcgagtgccaggttggccctcgcgtacgcctgctcctccccgcagcatcgcatggatggccattccaatgcgttgcaaagctcaagtatgcctgatgacttcctgtctcgctctgatagcctgccattagagcgttcgtccagattgcagccggtcgttgcccagcctcctgttcttccggcggagacagaatgggacaatgtcattacttccagtaggcatgagaagcattccattgacacaataagcagctctgatgctgcagatgtagtaagtggtgatgcaatagtggtgctaagatcgggttttgatgatgcaaatgtgagtagaagcagctctggtgcggacgccatgcccaaggatcacaaggcaagaactgacagactgagcaactgttcaagaatgagatcgagtggtgctggcgttcgagctggagaagagaggtcattgcgcaagcgaggaactcactctctgcaagatgttgaggggaatattggatctcggagcttggttagttccactcatcctgctgctggtagtgctcgcgaactgatgtctggcagtaggagagctgcacaccatggttctggtcaaagaagggagttgatgggtacaatcactccacaaagaagcagtcgcagggaggtaatgggttcaagcaatccacaaagaaacactcgccgaagctcgattgaccggagtggattgacatccacaaccacaagtaggattgcagtcagtactgtatctgggcaaaaaaggggatcacggaagaatgtaggccgtgacaatgcagcctgtaacagagaagttaataatccagttgcatttgcatctagttcatctgtgaacccagtgacaaggaattcatcgcaaagcaaagtttcagagaagagagggtgcagaaggacacaagttattagtaccagttgtagtacaagattgccggtagttgaatcttcaccttctgttgtgggtagttctgagaaagaggagtttagcaggctactgaaagcaaaaattaatgagcttggtttgtctgataggattgaatcaagtgatgctctttcaggaaaattaactgcatcagtgcttcaagagctcatttctgccctcactaatgatacaaacacttcagattctcaacatagtaactgttccaatgcatacaattctcagcatagcaactactctgatgcagtagactgtctaaacaacaatatgagtgcatgcaattccaatgatcagtcgcatgactttcagaactgttaccagagggacagagaggttgaatcttctgctacttgcatgaacaatgagcccaaccaaccaagtccaacttcagtcctcgaagcatgcttctcgaatgatacttcatcgttaggaagtccaaccg

SEQ ID NO: 11413 - DNA, 1153 bp, Oryza sativa
  ref <308>: DATABASE ACCESSION NUMBER: AK108761
  ref <309>: DATABASE ENTRY DATE: 2002-08-28
tgctgatgacacaagaagtcttttaagcttatataatgcggcatatatgaggactcatggtgaaaaagtacttgatgaagcagttgttttcactactaaccgcctaagatcagaattgaaacatttgaaatctccggtagccgatgaagtgtctcttgctcttgatacaccactattccggagggttagaataatagaaacacaaaactatattcctatttatgaaagcgcgactacacgaaatgaagccatattagaatttgcaaagttgaatgtcaatctccttcaacttatttattgtgaggagttaaaaactatcacacgatggtggaaagagcttaacgttgaatccaacttaagcttcattcgggatagaatagtggaaatgcatttttggatgacaggagcatgctcggagccccattattctcttttacgaattatacttacaaagatgacagcatttatcaccattctagatgatatatttgatacatatgctacaaccgaggagagcatgatgcttgccaaagcgatatatatgtgcaatgaatctgcaacagttctacttccaaaatacatgaaggatttctacttatattatttaaagacatttgattcatttgaagaggcactaggtccaaacaaaagttatcgagtgctttatttcaaagagctgcgtgaacaagcaggggaccactatgcttccacaattcagtgttacatgctgcagcatggtacaacaatacatgaagcatgcattgggataaaggagttgatagaagattcgtggaaggatatgatgaaagaataccttgcaccaacaaaccttcagccaaaaatcgtggcaagaacagttattgattttgcacgaactggggattatatatacaagcaagcagattcattcaccttttcacatacaatcaaggatatgatagcatcactttacgttgagccatatagcatttaaatcaccacacgcatttacattataaatattatattatcaagtaaggagtttcacaattgtaacaaatattaattagttttcaataatgtgatggtggctgctgatcatgaaaccatcgttagttaagcttcattagaaagtttccatggttaaagaattgtttttccttatcttgttgtc

SEQ ID NO: 11414 - DNA, 1619 bp, Oryza sativa
  ref <308>: DATABASE ACCESSION NUMBER: AK108762
  ref <309>: DATABASE ENTRY DATE: 2002-08-28
ttggatggatgcccgggcattgagaaggaaggacgctttcagaggcgaaaggccatggggagagagagcgtctgtgatccatggatctccgatcgggaaaccgtatccaagctccgtggctagtctgcgctctttggacttttcaaacttagcgaactgaaacatctgagtagctaaaggaaggaaaatcaaccgagaccccgttagtagcggcgagcgagagcggaacaagggttttcatcaaaagaaatccgaagcggtttcattcgatttgttgtggattggatgatggaaaaaccagcaagcagcaagcgtaggctgtgttgccgtagcgcgccctacggagttgtacaaagtcagcaaccgttttggggcgcaagcataggcaacacaggactgatgacggggtggggcgcgcagtgaactggttttctaaaaagattggaagatccggccaaagaaggtgatagccctgttcattcgttcccatggttcgatccttcccagtaaaacgcggcgtgttcgaatgatgatcgcttttacgcgagaaagggggaccaccctctaagcctaagtattcctcaatgaccgatagcgtacaagtaccgtgagggaaaggtgaaaagaaccccaatcggggagtgcaatagagaacctgagatccgatgcgaacaacaaaaccccacttagagcaggtacaataatggcggtagtagatccacgtaggatttttcgctgagctggaggagagaagggaagagagagaacggacgggcgactaaattgccgcccggctacacacgcggcccgaggtcgtggggcccgcagcgaggaaaccgtcctcccgcgcgtcgtcctcttcctccgcggccacgacagtcagccagtcgtcctcgcccttctccgacgttgtcaccgttagcccgtcctcgtcctcccgcgacaaccttcgtcgcccgcgtccatcccgccgtcgtcgcccgcatccgccgcaccgcggtcgctgtcctcgtccgcatccgccaccctgcagccgccgtcctcgtcctcagcggctgtcgtcgtcctcgcgcacatccgctgcgccgtggctgccatccttgcccgcatccttccgccgtcgtcgctcgcatccgccacgccgcgaccgttgtcctcatccttagcggctgccgtcgttgccagcgtccatcccgtcgtcttgcccgcatccgccgcgccccgctgtcctcgcccacatccgccgcgcgcccgcgccccgctgtcctctaacgcgcccgtcctgccacctcgtccgcgcctgcagcggccgccgtccccggccaccacagccgtcgccgtctcctgcgcccatcccaccccttctcccgcggttgccggccctctcccgcgtttgtggccctcgtcctccgcggccgccaccttcgcccgcgttctccgtggcttccgtcgccgtcgccgccgccggtgtccgccgcagctgccgtcatctcccccgcctccggccgcatgcatgcgttggctgggagcctgggacactgcctcatcctaaccgggaagaaaaaagctgaaagggaaggatgggagcaagaaagggaatagagggatggtgggcccat

SEQ ID NO: 11415 - DNA, 1203 bp, Oryza sativa
  ref <308>: DATABASE ACCESSION NUMBER: AK108763
  ref <309>: DATABASE ENTRY DATE: 2002-08-28
atcacgtctcctcgatctcatcttccgtgtttcgccatgttcgctcgtcaggctctccgatcggctcaggccacctcgccccgcttcttctccacctcggcctcggccaatcgtgccgtcgccgtgctcggtgcttcgggcggtattggacagcccctctcgctgctgctcaagcagaaccctctcgtgaccgacctccgcctctacgatgtgcgcctcgctcccggtgtcgccgccgacatctcgcacgtcaacaccccctccaccaccactggctaccaggccgaccagctcggtgaggcgctcaaggacgtcgaggtcatcgtcatccccgccggcgtgccccgcaagcccggcatgacccgtgacgacctcttcaacaccaacgcctccatcgtccgcgacctcgccaagaaggccgccgaggtcgcccccaacgcccacctcctcatcatctccaaccccgtcaactccaccgtgcccatcgtcgccgaggtcttcaagaaggccggcgtctacgaccctaagaagctctatggcgtcaccaccctcgacgtcacccgtgcctccaccttcctctcgggcatctcgggcaagaagcccgccgagaccatcgtccccgtcgtcggtggccactcgggtgtcaccatcgtgccgctcctctcgcaggccaacggcggcgacgccgtcgccaagggcgagcagtacgagaagctcgtccaccgcatccagttcggcggtgacgaggtcgtcaaggccaaggacggcgccggctccgccaccctctccatggcctacgccgccgccgtcttctccgactcgctcctcaaggccctcaacggcgagcagggcgtcaaggagtgcgcctacgtcgagtcgcccctctacaaggaccagggcgccaccttcttcgccagccccgtcaccctcggcaagaacggtgtcgaagagatccactctgtcggcaaggtctccgccgaggaggagaagctcctcgaggccgccatccccgagctcgccaagaacatcaagaagggtgtcgactggtacgccgcttccccctagatgctccgtgccctgcaaccgtgatgctcgagcgatcagcggagttggtgcctgatccgttgccattgacctgcacttgcacgttaatcgctttgctcgcgcactaatctcatgtcaatgccatcaaaactccccacc

SEQ ID NO: 11416 - DNA, 1866 bp, Oryza sativa
  ref <308>: DATABASE ACCESSION NUMBER: AK108764
  ref <309>: DATABASE ENTRY DATE: 2002-08-28
ggatcgtccgttgctccacaggagcatttaactgtccatttgtccacacccctctccatccggtaaattgcaaaccgtctttcaccaccaatgcacctgcctttgatgtggacagccccctttgctccaaacaagggcttgatttgtgttgtgtcgcttgcagttgcacaatcaagaagctggtcagctacaaaactctgtaacattaggtagatgtctcgaaatgctctcgcagcctcccctttgagatcagcgatagttgctgcctgtggaagagttatgagctctgctgggatacaaggtggatcatcaacctggtcagctagttccacttggcaccaaatgtgcaactgggatgggttttgaggtaagaagtcttcttccagatcataatgcttgatgaattgcttgcagtccaaaaggatcattgcagacctcttggcatgctgataattttcttctggcatataaggatgcattgtgtatgggtagagaagcgcatcatacaagaacttgatgtcacggaataggtggtcttgggttagggtgcacacgttgtttggtgggaagagggtttcagtcgtaagcctgcagtgagatagtagttagaatttggatcatgaaacaagcacttagttagcatgcaagttgtaacaaagatatgagccaccaacctgtactctacagtgttcatctcactgttgcatcgaattgcaacaaccatcccatcgtcagttcttgtaccaccaagggtcttgatgcagtaatcgaccagctgtggcgaaccaattggatgggatgtaactgcctttagtgtccgtgtagcaacccatctatctgcagcacggagaattttgagagcaatgtttgttgctcgctgtaattcctcttcagggaattcctcttgataattggcatcatatgccattttctctttgtgcacactcttgccggtggcaagctccattatataggcgaacagttcacggattgtggtgagagggtgccttgagagagattggtagaatgcaatggtattttgtaactggtttcgtggagatcgggtgtgagggaagaagttagagagtggcactgaggataggctttctacagctttggagtagtcttgaggtgtgattccaaagcttccgctgctaagtttgaatccccacaggccataccaagaacagccagtggcaacagcatggaggcttcggtagtcagctccatacttcttcgaaacatctatcactgagacttttctgcaatttatcaagttttttgacatgttagtatcatctgctgattataaattagaagtgttgaattgaatgatattggctttgtttgtgttgagttcattaatcataaatcatcactttacctgaccctgaggtatctgcagagccgatcccagaagttaatcagttgggatcctgtcatgacgctggagcctccctcacggccattaatccgaacaaggtggccaaacccgttttcatggactatgccatgcagcagatgccgtggactctccagctgcacatagtcccaatcttccggatcatcccgtgagaggccaacgtggttgcaggacggacatctgaggacaacattcacaagatgaggccacacatgccaccatgaacccgcaacgcctgcaggttttggaggtgccagtttcattctcattgcgaattatgaagtggtacctcttggagcaaacagggtgcttgctccagcctatgtaacaataaggcaagtaaatttagatttcatccagaattgagttgcaataataagcaatcaaacatatctatatatcaatcaatccagctcattttatagcgctggaatagttataat

SEQ ID NO: 11417 - DNA, 1325 bp, Oryza sativa
  ref <308>: DATABASE ACCESSION NUMBER: AK108765
  ref <309>: DATABASE ENTRY DATE: 2002-08-28
tgcaagaggttggtcacaacacgtttcacctgtgtcaattttcacttcaccttcactgtctgtggaaagttacacctggtctcctaaaattttttagttctctgctgacagcaaattcattccttactgtacaaaaaagagttggcgagaggggttttgattgaaagcgcgcgagagagagcccaggggctccccgaaccccgagcccgctagggttgggggaaatccccggcgtgttagcgcattttagttagtgggcttcgccggaggcaggaaaactctctcagagatatcctcacaccggttcactggattcgattaacagtgattagtcgcgggggccagaagaagcaggcggtaaccaacaacacacagggccggctggcatggttctctgaccccggggggctctcaacaaggcgcgcgccaaacaacaaacccgatcgagctcggctccgccgccgatcaaagtggcgtcacgcgcgagccgagccttaccctcgccaactctaccctccgaagctggagtgacaggcccgcgctaccaggcccggcgaccgagccggggatggcgccggatttatcggccgcgcattccgcgtgaaatggcgaggtgggactaaagcgtcggtcgatccgctagctgtagctgatgacgaagaaattaaacacaggagggtcttcgtcgtcggcgtcgatcgggaccgctggccggcgagtggcctgggccggggcctgccctccgtcgatggacggagtccgcgccgccgccgccgcctgacgagctcaggctcagccagccgccggtggacggacggcgatcgaaacgccgctgcttctgttgccaggtccgccgttcgatctcgagctaaactttgctctgttcttgggcctagttcgggctacacatggggatggagagacgatcgtgcccgctcgcgtcgtatacgggccggaccgtgcacgtttcggaagcagtaatatacttaacatagtaggacgacgtttgccaagccatattggagttcgtttgtggtgcttcctaaacggagtgttttttttaaaaaaaaagaaattctacatgaaaattgttttaaaaaagtcatattaatcatttttaaaatattttaactaatacttaatttatcatacgactaatttgctgctcgtgcatgggattagttcctaacccacacaaaacaacacagccattgtctcgttccaaactcacaagtagacaaaaaaaaacctggcttaagctagtcgggtgagttgtgttcactgttcactgttcaggacttcagggttctacttgtttttaagcc

SEQ ID NO: 11418 - DNA, 1723 bp, Oryza sativa
  ref <308>: DATABASE ACCESSION NUMBER: AK108766
  ref <309>: DATABASE ENTRY DATE: 2002-08-28
aagattggcagtggaaagggcaaccagcaaaaccagaacgagtcgtcgacaatgagcgcatcacagtcgatgaacttgggcgaggaggcgcacatgttgatgaagaagagcctcggattgactgagagcagctcagagcagcagacttcggcgaccgctagcggtgacgacaaacagccgcacttctacgacaagaacgtctcgttcttcgaccgcatctcgtgcgaggccaacgagaagacccagaagaagccggtgaactggaaagaggagcgcaagatcaacgccgagacgttcggtatcaaggagaaccagaaccgtaactacaacaactacaactacaactacaaccgatcgcgcaacatgaacatgaactcgcgtccacaaggcaacaaaccaggccaacagcaatcgcaacagcaacgatcctcgcaaaaccagcagccgcgttacaacaacaacaaccagaacggcatgcgtcaaaccggagtggtcgcttccggacgcactggatacggacagcaatcgaacaactcgatgcagcaacgaaacggatcgggtcgacgatatggttcgcgataaatactgattctatcgtgattgaataattatattctattatagactaaatttaataatcaaacactacttcttgttatagtccttttttattattaaaaaaactcatatatatatttatagagaagaaagtctactttaaaattatactaaacactgaagaaaagaaaaaaaagaaaatatttttatttccgttttatttttaaccgtttatgtttgtttttgttttgttatttacggtttagattctctatatctcttgtttttgttgagtggttctatttttgtttttgcaggtttttttctctcattgcctctccctcattgtttggatcacaacttcctccctctttatattttccataaaattgtaaattatttcgagtcgcctgaatcagatatttttagtaagtgcgacctcttatattcttatctttttatgtcatagtcgattagttttggaggaaacgactattctattctaaaatccactctagttttttatttattaaaaaaaaaaattcgattttttcctgctttgatgtttcaattatcaaaaaaagcaatttcaattttaaaaatatgcggtctaaattcaattagattagcattgctatctatttatttatgttgtttatttatttctttttaagagaggtttatattttacatgttttttttgttgttgctttgttagtagtattcatatgatgatccaaacaaactagatttaagtgaaatctatctatctatatttatatgatgaaattatactactactactactaatactagttcttttttgttagtcattcttatactgatttcacgtttctataatcatttataaattattgattatgactgattattattatattcttagtatttaagttgtctttttctgtcattttgtgactctatttatttatttttctctatttataacatcaatagaatcaacgacaacttgagtctaaaacaaaaaagaatctattttagtctctcaaactactattattataaacgcaccaactaatttgtttgagtgtattgttttctttgtttttttataaaaaactgttttttagtattttttgcgatataaaattacatcaataaattgcaacttttaacaccaaat

SEQ ID NO: 11419 - DNA, 1447 bp, Oryza sativa
  ref <308>: DATABASE ACCESSION NUMBER: AK108767
  ref <309>: DATABASE ENTRY DATE: 2002-08-28
gtagagcaggcctttagtgtaacatagaccatctccacctttgtaggtaaaagataagcacacgcagctgtccatacaaatcctcatgcattcttcaagcgagattgacttgtttgaagtcagatcaaagccataatagtcaccatgaggaatcttgacgaacgtaaaatcctcgcgttgctggccacagctgacgctgaatgttggcctgcagcctctactccagttctcgggatcagtcatctcgtatcctggaggacaagtacatctgagacctggtgagtactcacaaattccatttcttccacacaatccatgcacatagcacatctgcaatacaccttcccctgtgatagtccagttgccatctgatgcattcaagctgtacattctgaggttgccatcataatcaattgtgatccttctctgtatccctaaacctgaatccagggctaccattttgaacccgtcgcttgacaagaacctgccctcgtcgtccaggaccgctatcttgctgctgttgaatctagtccggccgttctgcactgcggtgtagtctggacttggccagtatatgcttgtgatttctggtccattgtactggagccggaggacattatcgttgtcgaaatacaggaaatggttaccagattgggagactaacctcttctctcttgtgagacgctgcgatggtagcagggtgtcagtaggccagtcgaagctctgccacacgatcttatcctcggagtcggatgccttcattaccatattgccactgttgagcagagccaccgtggtgtgcttgccccagccagtcttgctctcccagaccgtggtgccattgacatcggtaaaagccaggttgccctcatggctcagggatatcttggagccatggccgttcaccggaaggccagagtctgcggtccagaccaccgtcctgtcggtggcatgggtgaaccagatggagaagtagaaggcgtttgtgtcatctccagatgggtagaagccgcaggagaaggttgtgtctggtgaaacaaggaaggtttctccatgatctacctggagagatgtacctgtgcctgtggtttgccatggggatgcagatgcggcgcagcacaaaagaacggagatgaaggaaatgaagagtgggcacaggaacttacccatctggatttttggttgttggggggtgacgagtggaaaggatattggcttctttgtgtgtgcgcaggctgtgccctgtggcctgtgggacactgattcttgtcaatcttgtgaccatatctcttgagatatcagatacccatatgcgttaactgtaggacgagatgccacattgccactggatggtgactggtgactggtgagtttggctggcttattttcatctgcagcgagtgttactttactcgcgtgatcttgttcattggattggatcaccgag

SEQ ID NO: 11420 - DNA, 1957 bp, Oryza sativa
  ref <308>: DATABASE ACCESSION NUMBER: AK108768
  ref <309>: DATABASE ENTRY DATE: 2002-08-28
gtgcagttgtgcgggttggccggcccgcccgtggatcgtcttccaaccgggcgcgagtcggagtcgcgaccgcgaccgcgacctcacccaccgtttctcgatcgtttctctccctcctcctcccgcgatccggtcttcttcctcctccccgtcgtgctcgccgcccacgactcctcctcctcctccaccaccacccctccacgacgcggcgggcggcgagcgcgcgcctcgtctcaccctcacgcctcccacgccttggaacccaattggagatagaagaggggagcgcgaggtcaaaccaggggaatcggaatcggaatcggaatccgcgacgagacgaccctacccccgcgctccggcgaccgaccggcggcgatggagggcggaaaccacggtgggggagggtacccctacccgccgccgcagcagtatccttacccgtacgggcagtacccataccagtatcctccaccgcagcagcagccgccgccgccctccgcctacctctcgccgtcccgttcgttccacggttacccctccgcgccgccgccgcagccgcagccgcagccgtacgcgcaccattccgccccgctccagccttacccgccgccgccgcagcaccatgcctacccgccgccgcagccgcatccgccctcgccgtacgtctacgacccttaccacgcgcccgccgcggcgtacccttcctacccgagccccaaccccagcccgtccatctccccgagctccagcttccaccaccaccctgaaccgccatcgccatcgccctccgcgccgtcgtacccctccattgcggatgggctcgccaacatgcacgtctccgaccgccacgactacccgccgccgccgtcgccggcggccgtgcccgcggcgtcgtccccctccgtgctcccgccttccgcgtcgttccccggcggcgggagcagccacggcggtggcgggatgcagatggtgccgtacggccctcctgccggagggtcgcagcacggtgggatgcagatggtggcgtacggctcgccggccggagggtcgcagcacggcagcgtgaggccatccctgaaggtggtgctgctccacggcaccctcgacgtctgggtgtacgacgctcggaacctcccgaacaaggatctcttctccaagagggtcggcgacctcctcggtccgcgcctcatcggcgccgtcggcagcaaaatgtccagcgccaacatgaccagcgacccctatgttaccatccaggtctcctatgccaccgtcgcacgcacctacgtcgttcccaacaatgagaaccccgtttggacgcagaatttccttgtccctgttgggcatgatgccgccgaggtcgagttcgttgtcaaggacaatgatgtcttcggtgctcagctcataggcacagtgtcgattcctgctgagaagctcctttttggagaaaggattaacggcatctacgatgtgcttgagtccaatgggaagccatgcgctcaaggtgctgtgttgcggctgtccatacagtacatcccggtggctcagctcaaaatgtatcaccatggtgtcattgccggcccagatagcctgggagttcctaatacttacttcccgatgcggcgtggcaatagagtgacactgtatcaggacgcacatgtgcctgatggttgtctcccggatttctgtcttgatcacggaatgcgctatcagcacgggcagtgttggcgtgatatctacgatgctatatgccaagcacggcggttgatttacattgtgggatggtcagtgttccacacaatccacctcatcagggaaggagttgagaagatgccatcacttggggaactgttgaagatgaagtcacaggaaggggtgagggtgttgcttcttgtgtgggacgatccaacatcaaggagtattcttggaattaagacggtatgagttattcattgagttc

SEQ ID NO: 11421 - DNA, 1709 bp, Oryza sativa
  ref <308>: DATABASE ACCESSION NUMBER: AK108769
  ref <309>: DATABASE ENTRY DATE: 2002-08-28
tcaaatgttctcaagccaggtgttgatgtctgtgtgcagtcatctcatacacccgaagcaagttcacaaggaggaacaaacttctgtgttactgcgtcatgatgcaaggcttatcacaatcaagaagaatcatcaagaagataagtgtctctgcttgtttgttgttatactctacaagaaccagtgtcctggcaatgcagaaaaagtgataactgatagaagagcagaggtagtaaccataaacgatattttcctcctgcaaaagcttcaacctgaggtccatgaaggaagcatgaaatggagtttttcaaaggatcgcctctctcttaataaaggcaggctaataagtgctagattctcctcaggaattacacatctgatagtcttgtcgatcttgaggggaatggaattcaacatcaaattggtagaaggccagatcgtttatcaaataatcaaaggagatcaagcacaatggaatcttgattccatggccatccctccaggcttcgggaatacaatggagataatatcattccaattgcgtgatgaggccttgcgcccaacaatcacaaatatccctatcactcatgtgaaaaagaacaatatcacagaagacatgagattcactgtgaagagtgaaatggatagtgaactggatagggcattagatgttgagatcttgtatgagcatgtggatctgaggcgttcaaagcgcttgaagactcagccagatcgctttacaagttacgatacacctaggttccttagtggctacaagaagaaagaagcaagttcatcacccaccaagcatgtaaggggagctgtgcattgtgattcaccggtagacgattccaaaaaagaagtagaatcatgctgtgtagagattccagggaatgttacacagaagcaaacaggtgtacactctcccatggtcgatgaaaagtcaaactctccagaaggacagcataagaacacaactaagagaactacatgctctcttgtgaaggaaaaagcaagctctccagaaggacagcatgagaaaacaacaaagagaactacatgcgctttgcctgtgaaggaaaaagcaagctctccagaaggacagcataagaacacaataaagagaactacgtgctctttgcctgtgaaggaagagccaagctcagtggaaatagaggagaaaagctcaaaagagcaaagtgcaccggagtttcacattccacggacacctgcacagaataaagagaagcataatcgtcctcctttctcatgtaagccgaagctatttacttcatcaggcacccttggtgttaactgtgaaccagcattctgccaaaaggtgggcgggaaaagaaagaggcacatgtgcgagagagaatacaaacaaatgattgaccaatgcataggaaacattgagagtgaaatggagagggactctatgtttaacttcgatgccaatatgatgaattacgttcagcattcttatcgagaagaggattttacatggccaccttctgctgataaccaagaggtggaggaggatgagcttgaagaactgtggaaagaaatggattattcactgacgacattagcacttcttgagcaaaagcaggtgatggctcaaagtaggataaacatgctggtggataattttgatgggttgaggctggattgtttaactttgacggatgattacagatgctattatc

SEQ ID NO: 11422 - DNA, 1436 bp, Oryza sativa
  ref <308>: DATABASE ACCESSION NUMBER: AK108770
  ref <309>: DATABASE ENTRY DATE: 2002-08-28
atgcacaaccacaaccaatcaaagcatccaagaagaagcttagctactcacctagcaaagcttgccatccatccatggcgctcctcccttgcattgccattgccgtgctgctctcctcctcgctggcggcggcggtgaccggaccgccgggaacgatcgagcgcgtcgtcaagcagcagatcctcgccagcatcccgccgggtggccacggcgccggcgacgtccacccgcccgtgctgttcctcacctcgccgtccggcaagtacgcggcgtacttcgtgcgctcgcacaccgtccccggcgccggcgggctcggcgccgacttctgctacgtcgaggtggtcgtgaacaagggcggcgagggcgacgcggcggtggcggcgggcggggggatgagcgtgtgggagtcggagtgccggccggtgagcacggtgaacacgtgcactctgctcttctcgtggcacgggctggaggtgttcgacggcagccaggaggtgtggcacggcgagaccaacaccgacggcaccaacttcctgcagaggctcgagctcgtcgacgacggcgacatgcgcatccgcgacaaggacggcgagctcgcctggcgggccagcgacgagccccgccacgcgcagcactgcggcgcgccgggatcccctggcctcgccaccgcgttcccgcccttcgccgagcccatcggcgcccacagcagcgacctccccttcggaatgttccccggcggaaacggccgcgccgccgagctgccgcaggccgcggatgccgccgcgggagcactgggcggcgtcggagctgtcgcgccgctgccgggagccgtcggcggcgccggagctgtcgcgccattgccgggagccgcgggcggcgacgcggcagccgcgccattgccaggtgacatgggtggcgacgcggctcttgcgccactcccaggggcccttggcggcgtcgacccggcgttctcgccattgccaggggacctgcctgaccctgctgctgctgctgctgccggcggcgccgccgcaggggttggtggtgtcggtgccggcgctctcggcgccggcgctgtcggggcgttcggaagccagccgctggtggacaacagcccgtacgacagcggggcgtggaaggtcgacggccacctcgtcgccattgtcgtcgctctcggcgtcgtgctcggcgccatctgaggattgggaagcaagcttgggaattgggttgagatttgaggaggaaaagcataatggcagcttatttgggtaattaattggtgtgggtttaattttcctttttccgtatggattgtaaattagtcgtcggaggccatggccaccgaacgatcgaatttagtgttttcatcggggtttaatcaatcgcgaacaattgtaatcaaatacacttgtttaaatctcatcaatgttttcatg

SEQ ID NO: 11423 - DNA, 1403 bp, Oryza sativa
  ref <308>: DATABASE ACCESSION NUMBER: AK108771
  ref <309>: DATABASE ENTRY DATE: 2002-08-28
aaaccacagccaagggaacgggcttggcggaatcagcggggaaagaagactctctctctcctcgcgtgactcgcgcgtgccctcgccgccgccctcgcccacgccgcctccctcccccgcgcgcaacaggcggcgacggtgccgtcgccgtcgtccgcggcggcgcgatcgcccccgaggatccctccgcatctaatccccttaccccgtcgcccgcaccgcccgtcgtccctcgccggccgctgtccaccgatccgagttttctcaagaaatggctagagctccaagagaccgtactctatcaagccggcgtgctagttcagctaccagtgctgtaccttcgtattaccagaaaacaaaaaaggcatccaaggaaaatggattgcaactaacctcagagaaaaaggactggaaacgtgccacttgctcaatatgtttggagcatccacataaagctgttctcctcctctgttcttctcacagcaaaggttgtcgtccgtacatgtgtgacaccaaccgtcagcactctaattgtcttgagcagttcaaaaatgcttattcgaggggaaagccagcttgtgaattatcaggtgcagtggcacaagctagcaagaagccacaggagatggagcttgtgtgccctatctgccgtggggatgttaaaggatggacagtggttgagccagccagaagatttctcaaccgcaagaggaggacttgcatgcatgagggatgctcttttggtggatcatacagaaaactccgcaaccatgtgaggtccaatcatccttcatcaaatcctcgtgaaatcgattctgcaagcttagctgagtggaaggagcttgaatatgagaaggataggcaggatgcaataagcataattacagcattgaatccagggtcaacaatcatgggggactatttcattgaccccaacagtgacagcaacgactcgtttgactatagctctgactctttgacattctcagatagtgatcctggaactcagcttaatggttccactagttctcgaaggcccgctcggattattcctaatgcccgtgtaagatactaaagggccacaattgacagctgagaaatggaaccatttgagcttcagcattctatcctgtccatgacgtgctctgatgcactataggatgaatggagtggcgcgtttgtgaatgtcgtctggttagaatttcattcccttttttttatcaaagtaaattaagaaacaggttaggctaaagaccacagtttagttagtcggtattatgtcacgggaaacaaaatgtaaatcctggtctcgattatggttagttaagcagttacatgtgttcttcttgtccagtggatctgcaactttcagtgataacaatgtgctagcagttctggtgatt

SEQ ID NO: 11424 - DNA, 1156 bp, Oryza sativa
  ref <308>: DATABASE ACCESSION NUMBER: AK108772
  ref <309>: DATABASE ENTRY DATE: 2002-08-28
acctccggtaacctcaagctcgaaccaaaccatggcttgcaagaacgcctcctcctcggccatgccgctcctcctcgtcgccggcaccgtcgtcctcgcgctgctggcgtcaccggcggcggccttcaacatcaccaggatcctcggcgagttctccgacttctccaccttcaaccacctcctcacgcagacgaagctggcggacgagatcaaccggcggcagaccatcacggtgctcgcactcgacaacggcgccgcgggcggcgtctcctcgctcccttccgacgagcagcggaaggtgctctccgtccacgtcgtcctcgactactacgacaccgaaaagctcggcggcatgaagatgaagaaccgctccgccgtgctcaccaccctcttccagtcctccggccaggccaccgaccgcatgggcttcctcaactacaccaaacgctccgacggcatcatggtgttcggctccgccgagcccggcgcgcaggccacgtcccagatggtcaaggtcgtcgtcacccgcccctacaacatctccgtgctgcaggtcaactcccccatcgtgccgcccggcatcgcctccgtcagcaacagcaacaccggcgcgccaccgccccacccggccaagtccagcgcgccggcaccctcgccgtccaagtccaaggggaagaagtcggatgccccggcaccgggcccgtccgacgacgtcgacgacgacaccgccgccgacgcgccgggaccggcggtggatggccccacggcggacgggccggcggcggacggtcctgcggcggatggtccgactgaggcagacgcgccggcgcacgacaagggcgacgtcgcagacgcgccgtccgccgccggcagggcggtggccagcagcgcaggccttggcgtcgttgcacttgtggttctcatcttcccctcagtctcactctgatcaatgctaaaatggtggaggccgagaaatcggaagagtttataaatagaatgaccattaggaaacgatatagtcagggttcactctatcggttgagacgtttgtatcgggggtcaccgaaattccgaaatttcgaaaatttcggtccgaaatttggaaaatttcgagtaaaatttagttgaatttgaataaatattacccaaattcatg

SEQ ID NO: 11425 - DNA, 1480 bp, Oryza sativa
  ref <308>: DATABASE ACCESSION NUMBER: AK108773
  ref <309>: DATABASE ENTRY DATE: 2002-08-28
tgatgctgctgctgcaccggcggcgggggatgcggaggggagattgggtggtggtggtggtggcagctcggcccccgccgctgcgggggacgctgatgtgacgatgacggaggccgtggaggaggaggtggaggtggaggttgcgggtgatgccgaggcggaggctgcggtggtggcgggggatgcggcgggtgatccgttgtatgggacggagtcggctggtatggttgtggatgagcccgttgacgccgccgagggaggggtagatgggggagatggtggcgaggaggggttggaagcggaggctagggttttgcagggtgaggctgcgacggagcccgttccggcaggaggagatgttgccattgcttctgaagtggtggcggaagcacatgattctgctactcctgagcatgccgaggccgaatccaatgatctcgaagaaaaccatgttgatagaggaaaagataatggcgtggcggtggcgcactgtgacgacgaaatgcagaataatgtggaggggagctccgagatccaagaagatgatggagctcccacacttgagcagcaggatgatgagtctgaaatgcccctgccttctagtgtgtcgaattttgaattatgcgctagatacagccttcctcctcttgataaaggagaatttcgagtttctgaccttgtctggggtaaagtaaaaagccatccttggtggcctggtgagatttttgacccttcagatgcgtctgagttggcattgaagcaccagaagaagggcagccatttgatagcatatttcggtgacaatacttttgcatggtgcgatgaatcccaattgaagccttttgtatcaaattattcacaaatggagaaacagagcagttcagatgcctttgttagttcagttaactatgcccttgaagaactctcaaggcggatattgtcagggatgagctgttcttgtttaccggaagagctatctgacaatgggatgtcctatatggtcgagaatgctgggctcaaggatggagttacttgctctgcagttaaccggtctgagattttgtcatgttgcagcccagaaaatcttcttaattatgttaagtctttggctctgttccctggccaaggtggtgacttgctggaattagtgatagcttgctctcaacttacatctttttatcgatctaagggatgccctgaacttgcatcattccaaacaggcagtgcatgggttgagaatggtgtggacccttcttccatcaaggatgatgtggttgatgaagttgtcactaatgaagagcctcctgctaatgataagcccaaaagaggcagggggcgacctcgtaagcagaaacctcaggatggtctagagctgacagagaaaaagtcaacatccaatctttctactgataatgcctatgatcatcctgcggaaaggcagatggatatggagtttgatgaatttgacggtttacagagc

SEQ ID NO: 11426 - DNA, 1510 bp, Oryza sativa
  ref <308>: DATABASE ACCESSION NUMBER: AK108774
  ref <309>: DATABASE ENTRY DATE: 2002-08-28
accagtgcacgcagtcgttgtacagcgtcacgttctcgtgcgcccagtgcccgtaccggctcgggtgcccgtccgcccgcgccaccatcgccgccgtcgcgtccatcagcagcatcctcaccgcgctcccgctcgccgccgccgccgcctccgccctcctgaactcctccacctgcgccgcgtggaagtccacgtccagcccggacatccgcgcctcgctcgccgcggtcggccgcgtgcgccggcagtcgccgcccttgtcccactcgccgccctcgaagtgcgacgtcggcgacagcgtgcgcacgatcaccgtgccgttgaacacgcttgcggcggtgagcgcgcgcagcgcggtgcggaacgccaggggcagggagtagcggagggtgaggtcggggacgcccgggaggcggcagctgtagcagccgacgaggcggccgcgctcgtagaacatggtcgggcggttgaaccagatccccgtggagacgacgacgtagtcgaagcccgccacggcggtcgcccaggcggcgtccggctcgtcgaggtagaggtcccacatcccgccggcggggtccgactggttcgccgtcacgaggtacggcgaccggaagacggcgacggtgaagttgtgggactcgtaccgcaccgccctgaactctggatccgccgtcttggggacttctctcggattctccaccttcaaaagaagaaaaaaaacaaatgacatttcgacgcgaatttatcctgaaatgtgcgaaaatgtttttgttgttaccttggagaggaggcacaggagagactgcatatggttcctggagagcgagtcgccgacgaacgccatggacttgcccctgaggaggtccaggaacgccgccgcgtcgaaccgcgggagctcgcagcgctccgggcgccaccgccaccggaggaagccgaggtcggggcggccgtacttcatgcagttctggtgctcctggatctccccgcaggtggcgttcgtgtagtacggcgccgcgccgtcgtcggcggcggtggcgggcacccactcaccgcggaagatgtcgcagtccgccggcgcggcgcgccgggcggccctcggcagcgacgcgatgctgggctcgaacctccggaggaacgaagggcggcttgccgacgccgtgagcagcacgacgacggcgagcgccgtgagcgacgccgctgccgtggggttgacgcgctgaagcagcttcatcggcgacaaccagcaatgtgcaagcaagcaagcagctcagagcagctccagcagcagagacgccgctccgccgccgccgacgctcgcgccgccggccgcgggagagagaaggggatcgggggattttctttctttgttttttttttggggtttgtttcgaccgacgcagttgaatttaaaggggacagaggcgagcagaatcagtttgtcaattgttaaatgtatcagattctgctcattcgaaaacatttgatttatataatatatggtcattttcat

SEQ ID NO: 11427 - DNA, 1325 bp, Oryza sativa
  ref <308>: DATABASE ACCESSION NUMBER: AK108775
  ref <309>: DATABASE ENTRY DATE: 2002-08-28
cgggatctcctgctcacaatgcggcgcctccggttgatattaggcccagacagccagcacggcccgtattcggcactgccatgaataatacttctgcagctctgcgaaatatgataatctcgcctgtgaaacgtcctcagctttcccgaaaccgtccacatatgttcacgttgtagaattggaagagctgatgtggcatcctgctttggaatctgtcacggtcttgtcatggacttgctaactgtaaatgcagtaagatcaatctgtctctttccctcacttcaatttctgccccatcatcttggtgtatagaaactgttacagaagtcccttggaagaagattgttagggaggttctgatatatacttggggcgcaaagtcactccttcctgattgcaataacacgtagtgtatctgcagctaaattcttggactttgtgactgtcatcacactaaccatctactattagtagtaataatttactactgctcggggtggactaacccctgaatgatggggacggtttttctaggattatgttctagggaccagtactgacttgtcggatgcgggttctatagctggaaactacaaagggatctgttgtaatcgtgccttctgttgtttattatatttgtagttacctaaaatgcacttaaccagttcttcattgagctatagtacagcacatcgtggtcctgaattgtagaagtggtacgtggcatgctatttgtatgcaccctagcaaactcatcagctcgagactagcgcctttcggcctacctggacgaatttttatacctttctgtcaacaacccaagggatatgtcacgccatcgcccatcgatgatcagctgacggccaccgatcgtgaaggcgagaggtacaggataaatactatccgtgatggctgcgtctgcatttttttttttgtttagcattgttcgggtgactatttatggcagcgggccagctgctccaccgagctgaagcctcgtcaccgcccacgtacggtgcggcgattggctgggcttgcgctcgccggagacgctcctgatttaaattaatcgaatgatgaggagattttgttccagctaatccctcttgaggttgacagcgaaagcggagaaaacgaaacctgccgctccaatccggagggtgacgctgggccggctgagcacgtcagcactcgccattgaaaaggattacggggtgtttgatttgatgcttcttgtcgcaacgtgatagtactttaatttgaggaatgtgttgggttaattgtactaacaatcatggttaatcgtactactctgttaaaaaacc

SEQ ID NO: 11428 - DNA, 1288 bp, Oryza sativa
  ref <308>: DATABASE ACCESSION NUMBER: AK108776
  ref <309>: DATABASE ENTRY DATE: 2002-08-28
gcaaatatcgcaattagccctaaccccctttcttccttttcttccttcctacgcacacgcacgcagccgagagcaacggcagcggcaacggggggcggtctcgccggaggcggtcacggggggatcgatgctggaagagaggaagctgttcgtggcgggcctcccgcagcagacgcgggagggcgacctgcggggccacttcgcccggtacggcgaggtggtgcacacccgggtggtgctcgacatggccagcggcaacagccgcggcttcggcttcgtggagttcgccgacgaggcggcgacgctgagggcgctcgccgacgacgagatgcccaaccacgtcttccgtggccgcaaggttatggttatggaggacctattgattattcatgttatgcttatggaggaccaattggacatcagcatgatcttgtgggttcttactattatgctaaagattatagcaaaactactcctatcgacctcgataccacagataccacaaagaaatgacttgctgcggcagcgtcggtcctggatggggcggaggtgatgggtagcgccttgtgaggatggtgctccgagaagactgtgcggttggtgccaacgccgacgcggaacggggtggtgagtgcgaagccagcagcggaacggggtggtgggtgcgaagccgtcagcgtccaacaggagcgaggtggagccgaggagtgtgaggttgctcgtccacgagatgtgctggtaggaggcgccggtcccttatttcctctgccatcagcacaaccccctacggcgccggcttggagatcgggcggaggcttcccaagacgatgacgcctcttgctccttccttccatggcttcggttgggacgatacgagacggtaacggacgaggacgtaggcagtggaggcggtgacccggcgggcgggaggcctctccgtccactggcggaagaggcgacgacacagcgggcagattccggtggatcagagagtattcagggaaagagagataggggaagaaggcatgggccccactgatggtaagccggctttggctggccatgtttggttagtgaaggaggtttggctagggagatggcttggccatctagattgtaagtctgttggaatccattttttatttaaaattgttaaattttgatttggagagtaggatagcaacactgctgaagatgcttactcctatgtttaatgaagcagaaactagtggcgctgtaaatgtcacttctctcttaaactagtcgcgctgtaaatggcatttttctc

SEQ ID NO: 11429 - DNA, 1312 bp, Oryza sativa
  ref <308>: DATABASE ACCESSION NUMBER: AK108777
  ref <309>: DATABASE ENTRY DATE: 2002-08-28
gtctccttctgtcaccattcgattcccaaactctcgccgccgccgccgccgccggggacgatggggaaggtgccgcacgccatgcgcgccgccaagctccccctcgccgtccttgccaagcccacccatgcttcggcttcccagccccctgcgccgccgaggcccagcaatcccaggcaccggaaaaccccagccaaggcttccaaaaccccggctccggccacggccgccgcgccgccgccggtagagaagaggccgatcaagactgcctccgacctcgccgcagccatccgcgcggcggccgacgccgacgtcgacgcggcggtcgacctcgcgcggtccgcggcccgcaccatcccgctcccgccgcactccctctcgctgctcctccgccgcctcgcccgccaccgctccgtcgccgcggcgaggggcctcctcgcggagctccacccctcgcccgcctccccgccgccacgccccgcgctgctcgcgctgtccgacgccgtctgccgccgcggggagccccgggagatcgcgcagctcctccccgtcctcgccgaccacggcgtcaaggccgacgcccccgtctacaacgccctcatgaaggcgcactgcgccgcctccgaccccgcgggtgtcctcggcgtcctccgccgcatgaaggacgacggcgtcgagcccgacctcgtcacctacaacaccctcgtcttcggcctcgcgcgcgccgggatggtcaccaaggcaagaacctatctcgacgccatggccgccgctggccacttcccggacgtcatcacatacacctcgctgatgaacgggatgtgcgtcaagggcgacgccatgggagcgcttgctctcctcgaggagatggaggccaagggatgcgagccgaatgagcgaacatacaacactctgctcatggggctctgcaagaacaagaagctcgacaaggccgtcgatgtttacaaatccatggttggtgccgcgatgaagcttgaagctccagcttatgcgacattcgtcagggcgttgtgtcgtgcagggagaataccggatgcatacgaggtgttcgactacgggatcgagagcaagagctttgcggaggtgacgttgtatactgagctcgagaactcgctcaagtggctgcaccggatgaaatcataaagtaggctgcatggccagtatctttgtccctggtacttgcttcagccttagtttttttttccatgaaaagctagttgcctgccttaatttgttgtattacaatgaaatatgcaaattcagatgaatctgtgatatgattgtttgatct

SEQ ID NO: 11430 - DNA, 1503 bp, Oryza sativa
  ref <308>: DATABASE ACCESSION NUMBER: AK108778
  ref <309>: DATABASE ENTRY DATE: 2002-08-28
tacaagaaaggtaaattgctgagttgtattaggaaggggaaaatgcattgttcaagaagtgtttgcttgttggtcctgacgcctttgtcatcaatacttgttagaatgagcgacacaaacatgacaaataataaaatcacatctacggactacaatatgctcagtctagagatatctcagtggttgtgattcatgatgaggcctcagtacaatggaataagggcatcttggcatacactgagaaggaagatgttcccataacaagctttgtaatgtgatgttgatcaataagctcaacaatgccatttgcaacactgttcttctcaatcaccaatttttcagcttgcacctgcaaatttggtgattttgctgagatgacatagaatgggaagcaacttctgattagcataaaggatataaaatattgcatagatttctgtaatttgatgttcttattcaatccacttcatcagaacaattagtcataaagcttaatttgtctaggcctggtacaaaatgtggttaaaatattgattgttatctttccataaattgatcctcaagctgaccatagttcactttgttgaaaaataaaattcccatttcatatgacttgagtgagagtgcttatctgacctttggaaatgctctgcagtaactcaggtactgttctaaaagtttattcatatcgtccttctcaatctttctgtatgctctgagctccttttcttctagctgttttgcaggaaccttacacaagcctgcaaggatggcatcatcgcaggaaaccatgagcaccggcgtggacttctttttttttttttggcagagcaacatgtaacactaaaacaagttcattgtttgtatgatagctgcggtacagtctcttgagaagcagggcatatggaaaagaaaaaatgtgtgtgctgctgctttcccaattgaacagaccaaaggtgtctttcccagaagttgcagagaaaaacaacaatttgtggaaatggaaatacaaccgttgttgcctgctacgtggctggtggacatgcagcagcacaagaagcttgttgacatcaccctgctgaggctggagtttcctagctgcccactggatgttggccttgccgtccttgaggtccttgccgaccgacacgtactaccggctgaggagacaagggcggcaatggtgacgacgacgacgacggcaacgaagaacgagcacttgccacggccatgcagcgcaaacaacttaaattaactgccctgccaccacacaaccgacagaataagaagcaaacaactgggagtagctagctaggcaggagaaagaacaagtacctactatatctttgcttgctttattatagtttctgctgctgctgctgctggaggcgacggcaacaacaaagcaaacaaaaggatcgaatctctcacaaaggggacttttggcttcgcttgtatgtcgtctggcaacttttataaactcatctgcttcagttattcgac

SEQ ID NO: 11431 - DNA, 1171 bp, Oryza sativa
  ref <308>: DATABASE ACCESSION NUMBER: AK108779
  ref <309>: DATABASE ENTRY DATE: 2002-08-28
agcagaggtggcttcggcaccgtgtaccacggctacctgagcagcatgaacatggaggtggccgtcaagcgggtggcagcgaacaacaaatccagttccaaccgaggagagcaggagttcgtcgcggaggtgaacacgatcagcaagctctcgcaccgcaacctcgtgaagctgatcgggtggtgccacgagggaggcgagctgctcctcgtctacgagtacttccccatgggtagcctggacaagctcctgtatggcggtgctagaccggctgagctgacctgggagcgacggtacaagataatctgcggcgtggcgtccgcgctggagtacctgcaccacgggagcagcagccggatcctccacagggacgtcaaggcgagcaacgccatgctcgacgaggagtacagcgcgcgcctcggcgacttcggcctcgcccgtgtcatccacctcgacgaggtgacgcaccactcgacgcaggccgtggcgggcacccgcggctacatggcgtacgagtgcttcttcaccggacgcgccagcctcgacacggacgtgtacgcgttcggggtgttcgtcatggaggtgctcaccgggaggagcccgagcagctccgtaacgtaccacaaccgccagcaggagcatgaccacgacggccgccgccagccgatgtacatcgtggactggatgtggaggcactacggcgacgggacggtcctggaggcggccgacgcggtgctcggtggcgcgtacgacgaggctcaggtggagcgcgcggcgaggctggcgctggcgtgctgccaccccagcccgagggagaggccgtccatgaggacggccgtgcaggtgctggtcggcggagcccctgcgccggagccaccgttcgagaagcctgcgtttgtttggcctcccgacggcaagcggcaggagatcgagctgccgcacgtcggcgtgctgttcaccggagggcagctcagtttctgctccatgacatccactcccatcaccgggaggtgagtatagcagagagttgtatgcttcgtacggtcgtaccgcgagccgagccgccgcgcgatgatttggtttgttgccgtatgtaaaaagtgtagcagagttgcacgactttcttgttcttgtaacttgttcgtatcgtgtaacatgttcagttcttgct

SEQ ID NO: 11432 - DNA, 1195 bp, Oryza sativa
  ref <308>: DATABASE ACCESSION NUMBER: AK108780
  ref <309>: DATABASE ENTRY DATE: 2002-08-28
gtgtcgttgcttcgttcgatctgcacaatgtcggcgggcggccggcaccgcgacgactgctccgcgtcgccgccgccgtcgccgtcgccgccgccctccacgctcctccagttgctcgaggtcaccgtcatctccgcgcaggacctgcaccgccgcctcggccgccgcgtgcgcgccgcctacgccgtggcctgggccgacgccgcccacaagctccgcaccggcgtcgacctcgccggcggcgccgacccgacgtggaacgaccggttcctgttccgcgtcgaagaagccttcctccggtccgacacggccgccgtcaccgtcgaggtgcgcgcgccgcggaggttcggcggtgacgccgtcctcggcgtcacgcggatcgtggtcagcacgttcgtcgggtcggcgtcgtcctccgcgcgaggcaccaccggccggcaggtggcggcgctgcagctccggcggccgcggtcgctgcggccgcagggcatcgtgaacgtggcggtggcggtgctcgacgccaccgacgcgcgcgccgtgccgctctgcagctcgccggactccccggacgcgttctccgtgaaggacctcctggtgaggaggcccgggtcgctggcgaggatcgtggaggtgagcgagacggaggaggccgacgacgagccgccggcggcggcggcggcggtcgtcgagcactccggggcgatggacacgaggggctccgccgtggagcagaggaagctggagctgctgctggagaagtggaaggcggatctgtcgccggaccagcagaaggagaaggccaacagccgccggagcagtgggccgcggcggcatcgccggaggagctcctgcttcggcggcggcagcgcggagtgggagaggtgatcatcacccgtgcttcacgtgtactgatcgtctgatcgcaagactgcatgctgcgaatgcccatctgtttagggttttttttagcagttatttattttttatttttgccagagatgttcattctctgtttctttttataaaaaaagaagaagaagaagaagaagaagaaagaacttgcaggacattaagcagcaagggcagaataaaatgctgctcaggcagttctgtagtggaaaaaaaaggttatgtaaaatgtgtccaaatcaagctctatattctttcgatggacaaataaataagcaggtttact

SEQ ID NO: 11433 - DNA, 1225 bp, Oryza sativa
  ref <308>: DATABASE ACCESSION NUMBER: AK108781
  ref <309>: DATABASE ENTRY DATE: 2002-08-28
caagcaagaagtaaatgtgttcataaaatcagaatgccagctgatggggcctggatcagaacaaagaggaaaggatctccttggtagaaagattaagaaaacaacagagctctcttctggctcatatcaatacccatttgccttcagattgcctgacgcaattcctccaacctactcttgcccttacggcgaaattgagtacgaaatcaaagttattgcaacctcaggcaacaagaatgtctcagacttaactagcattgcaccccttcctgttggaggtagtcttttcgatctgagcttcttgggcaacaattcaacaccagtccaagtcaaagaagccaaaaccttcttgctaacaaagggaacgcttgatgtaagcgtaaaccttgaaagcagagttttcctcagtggcgatccagtcaaaattcgctgcgatatgatgaacggcactggcaagaccatttccaacataaccatccagcttctgcaaaagattgacgtcataatgtacggaagaactgcaaaacaagaagagtacgcactggcaaagattagtctcggaaatttggaatcaaagcaacaaaagcacccagcagtcgacatcctcatacctaccactgccccagaaagtgtattccaaaagtcctttgcaggtggtggcaaagtgggaaagcaacttcttatctcctatgaaatctatgtccacggtgaagtttctttgggcacagacttgaaaatgaatattccaatattcattgtgcgacgagcaagacaccaagctctcctacaacaggcaggtattgcacaaaatccacagcagtcgcaggttcctccacaacaacctcctcaacaaatccctcaacagcctcagcaacctccgcaacaagcgctgcctctccctccaacgcactatgcaattccgcaaacagctcctcaagaaggaagtctctacccttctctctacgcaccaactcaaggtactcttcctcctgcttatggtagcaacatgtcatattatgcacctcaacaagcacctcctcaatatccacaacaagcatatgctccaccagcatacagtgctccagctcaacaaataactctgccacctccaccaacaatgacaagatccgttccacagcaacaacctgctatggctccacaaggatcgtcaaacaactatgacgaatttttcgagtaaacattctcaagcaatgctttcatttgt

SEQ ID NO: 11434 - DNA, 2081 bp, Oryza sativa
  ref <308>: DATABASE ACCESSION NUMBER: AK108782
  ref <309>: DATABASE ENTRY DATE: 2002-08-28
ttctttgaacagaaccaaattattccaccttggatgaggagtattgtcaaatagaagtcaagtaaacagattcaagttacctggtgtggaacactggaaagtagttcaaattgaacccaaaagcattagctggcaatttaattaagtttgggttgtgtagctaactagttttcacatggtggagctggtattccatgttcaagagtagacattacttgcggcctgcctcactgttttttacatggactgacccttttatttgctgtgcagactatattccggaatccaagtgaacttaaatcatatttacttccaaatccagatcgctgcaatgttccggccagtaccatgtttgtatccaatgactctattgtagttgtagatgtaaatgtgcctgctgctcatgtggcacttcaccattggcaaccaaatactccagatggccaagggacaccctttctatttcatcatggtagaaatgctgcaaattcaaccggtggtgcactgatgcgcatttttaaaggatctgctagttctggagaagattatgacttcccaagagctatagcatttgctgcttctggcatccgtagttcagcagttgttgctgtcacatgtgacaaagagattatcactggtgggcatgctgatggttctgtgaagttgatctccccagatggagcgaagactattgaaactgctactggacatcttgctcctgttacctgccttgcactttctcatgatagcaactaccttgtaacagggtctcgagataccacagttatactctggaggattcatcaggcaggctccttacataagaaaaatgcccctgagcctccaccaacaactccgacaacaccacgcagtcctagtgtgagcaaccttacagaaatcaggaggcgtcgaattgaaggtcctatgcatgtattgagaggacatcttgaggaagtgactagctgttcagtcagtcctgacttgggacttgttgtatcctcatcaaacatgtcaggtgttcttctacattctttgaggactggtcgtctgataaggaagcttaatgtagcggaggcacatgctgtatgcttatcttctcaaggggtcattctggtttggaatgaatcaaagaaaagactatctacattcactgtcaatggactccctattgctaccacagttctatcacctttttgtggacgggttagttgcattgagatttctactgatggccatttcgccttaatgggaacatgttcttcaagcaattataagtgtgaggacagtactgagactggggatcatgaacctaatgaaccaaatggcaaggatggcatatctaaacaagctgaaactaggcaatctgttcatgtgccttctgtatgctttgttgatctgcataaacttaaggtatttcatacaatggagctggggaaaggccaggacgtcacagcaatcgctctaaacaaagagaacacaaatcttctactgtctactgctgataagcagctaatagtgttcactgatcctgctttgagcttgaaggtagtggatcagatgttacgtcttggttgggaaggtgacgggcttcttcagtcatgagcaaaaagcatttattttggtaaatcattactagcttaaagatcattttctgttcgtgttagcataatgaatcgatggctcgagatgtactatctgtacaaagtggataagtaataggacctgcgagttaggctgagcaaaggctaggtcgtacaccatatccagcagatcatattattcagcgaactgctgagtaaacgaactttatcgagtagccctgtaaaaatcccgatggtttttctttttgtagaatgggtgaatagtcattttacattgtttgcagcgttgtatccatttttggttgctcggttcagacagttttctgtcttacaattctctgtagggtgaaccagtgtgagcaaccccatttttgtacatgtaaattttggcatttggctatgttttgagtatacggatgcaaccatcacatagaggttatgctgagactattcgccgttaattggtcaaagattttatgt

SEQ ID NO: 11435 - DNA, 1440 bp, Oryza sativa
  ref <308>: DATABASE ACCESSION NUMBER: AK108783
  ref <309>: DATABASE ENTRY DATE: 2002-08-28
gaaagaaactgcaaactgcccactgcccactccctcctctccggtctccatctcccagtttcttcttcctctccgctctctccgctgctctcgtcccgtctctgtccggattgctccgatttcttgctctttacacctgtccatggcggggtgagtggagagcgcgaatcttggatccaacccttcgcgttcttgctcggcgaggatggaattcgggggcgccattgatgatcagagtgaaatgtggggatggcaaagtcaggagtatgatctgcagaaagatttgcttgctgaagaagctgcagatccatctagctgtttgtggagtgaagcaaatcagaatgccggtgatgcttggaccatgtttgatgagcaaactccaataaaacattgtacagacatagattttcagttctgtgatataggagatatcattgtcaaggattttgatgaaggaaaggaaactttacaagctaaacgaagacgcatgctgcagttctgttcagacaatgttgagatggattgtgctatggcagcagatggactatcggaaaatcttcaattgaatttgggtttctctggtgatcagtgtttattaaactgtgatgggacagaggaactaccagaagaatggctagtagattgttcaccacaagagagtgagcctcaatgcccgcctgaagatatgtccgttcatttgagtagtcctgctgtggccatggaagaagccaatctttccgtgcacaaaaattcttcgtctcgggagcagggcaacacagtccagaagaacactgtgcaagctcgaccaacacctctgaaagctggaaaaaatattattagagcaagaaaggtgaaaacatcagtcgtctatcctttcgagcttatcaagccatgcggttttcatggtgatgtcacattgcatgatatcaatcagaggatccacgccccgcccccatacaagataaagcacaagatcgacgaggagcagctctcctatcagacttcagctatttccgggaagcctgtagtccacaagacaaagattcatacagaaggaggaaagggcagtatcacaatcacaagaactagaggttaattaggtcaatggtatgcatatatggtgccaatatggtccttgtaccatgcatttctgatatattgggttgtgtcaatgttttgtggccaaggaaatgcatgcccttgttggaatattgttagccatttttttttcactttatttcttccattgtccccccttcggaacttctttgcctgtacttgcttggttagtgtgagatagtatgataatagagtgtgtaggcagggtgtggcagtggcaaagtgtgctgcttttttggttcttggttgaagggggaaagttgatgtaatcagataagtcagtaattgtggacatattggtttggtgagattatattttgc

SEQ ID NO: 11436 - DNA, 1845 bp, Oryza sativa
  ref <308>: DATABASE ACCESSION NUMBER: AK108784
  ref <309>: DATABASE ENTRY DATE: 2002-08-28
atcgctcgcggtcgcagtcgcagtcgcccacacccttgccgcaccatggctggaacccgcggcggattcgagaatcattagatgattacttgtggctttcttgcaagttgtgcagttgctgcctcaagcttgctgcctccctctgccaaatctatcagcaaaaaaagaaaatcatgtcagtttccttgaactatatacatatgattaatctagaaacgcagtatgttgccaaaaatcacacacaactcaatcacatatgcatttgagatgaggtaaaatgctatctgattcacatagttccaatatctcaagatgtgggatatgcgtagcacaagtgcatcagagtgttatagttgttcagtcttcagtacttattattctagattaatttggaccaacttgtcaattcagctgacacttgtttttgtctagtgctccagtagcttggttgtttcatcatcattagacttttaaacctttggtcctaaactcctagctgaaaaatttgcacactgaacttccctgtgttctaaggaaaaaaaaaatctagacataaccttgctgatctgtattatggaccggccattggagtgcataatgcataactgctgatcactttgttggcacaaaacttacgcatagacataggaggtacttatgtataattgtatctttaatcaggactttgttttcaaccattttgttgatataacagttatactgtagtaatgatgagtacagtctccaatgtaaactcagggcaaatcagatttatccctttttggtgcttggtatctttttgtatttttcatgagcgatggcatttttgaacccaaaatagagggaaagagaaggatctctgtgggggcatgctatgtactacagttctttgagaccatgtaggtgtggatgcttgttttgaccttttccttaacatatagaaagaataaacattaaataaatgatgacatggaaatgaaattcataaaggagtacataagctagtactcctgaaaatatcacttcatattcccccatgattcagtaacatgaatatcataccatcagcagcagtgaaatttttatgcgtagacggtttgtttcttaaggtatatattttttatgtttacaattgtctgtcgagtttactggtcaattgagcaacaacggtacttttaactgttaatatcacttggtttgctatgtatccttgttgttctggctttgttgctttacagccattctgcttacgctattggcatctgttatttagaaaaccattttctaacagtttttagatttcctttcgagtctccaactgtttttaacctccaagttgccacataatgcataaatataccgagtaagtttgcccccctctgaaatatggatgttagatactcagacaggttcagtatgtgttgggtgttgttttctgagtttgtggttgtcataagatgcagcgaaattactgcgctgtatcttggaccaatgcaatcagcgaagtccttatcgtgccaaaaggatgtgcatggattttccatcatttgcaaacttgaggatggcctgccctgatgccctcagatgctgatgaagtgtgtggttcatgaaaacgtgagaagctaagtagtggagtaacgggagtgagtaccagtgtggccactatgaagaaagttaattactgagaaattaagacttgagcatgttattttcaagcaacttgtacagcattatattgcactaccatcaaatgcttctcctgcctatacaatactctgcaagctcttgtattgtacactgttttatcttgtttaaagtatgcttgtttttgcttatgttgagatt

SEQ ID NO: 11437 - DNA, 1080 bp, Oryza sativa
  ref <308>: DATABASE ACCESSION NUMBER: AK108785
  ref <309>: DATABASE ENTRY DATE: 2002-08-28
cagtcaatagatgtgaatggaaaccaaattgaaggtaaactacctagatcactatcatactgccaatatttggagctcctggatgctggaaataatcagattgttgattcttttccattttggttgggtaaacttccaaatctccgagtccttgtcttaagatccaacaaactcaatggcacaataaggggtcttaaaggttgtcaccaaaattgtaatcacttcaaaaggttgcaaataattgatttggcctccaaccatttctctggcaacatacatccagaatggtttgagcattttcaatcaatgatggaaaatgacaacgatgagggacacatattagagcataccacaaacacaaaaataccattgctctatcaggatattacggttgtcaattacaaagggggcactcttatgttcactaaaatcctaaccaccttcaaagtaattgatctctcagataactcatttggtggtcctattccaaagtcattggggaagcttgtttcactacgtggacttaacctgtcacacaatgccttcacaggacacattccatcgcagcttaattctctgactcagctggagtcattggatctttcttggaacaaactctcaggggaaatccctcctgagttagcttctctaacttctcttgcttggttgaatctttcgtacaacaacttgaccagaagaataccgcagggtaaccagttcgggtcatttagcaacagctcctttgaaggtaatgtcaacctctgtggaaagccactctctaaacaatgtgatactccaggctcaacatctccaagtgcatcagctccttcaggtaccaacagtttctggcaggacagacttggcgtgatccttttgttcatcttttctggcctggggttcacagtgggcttcatattggcagtctggttcgaatcattgtgccacatagaacgatggaatcgcaaaaaacgatgattgttagtatacactatatgtatggtgtttatccacctacggacatgatatatgtgtatgtgtgtactcgtaattagtgagaatttaaattcattttctgttgat

SEQ ID NO: 11438 - DNA, 1262 bp, Oryza sativa
  ref <308>: DATABASE ACCESSION NUMBER: AK108786
  ref <309>: DATABASE ENTRY DATE: 2002-08-28
agctagctctctctctctcgttgcctcctcgatctccttgaatcgatcagcggcaaccagcctgatcgttgtttgctagttagttaatttccgtcgccgatgccgacgacgcctcgtcgcaaggagccatgaaccgctgcaccgacgtcgagatcaggaacgcgctgcgcctcctcgcgcccaagcccaccgaggacatgtcccgcctccaccaggcctacgaccgcggctagcttagcgagtagctgctactagcgtccataatcattctgtgttccatcgctcgagttcttgaacacgaagaggagcttagtagtttgtgtcagctgttagtttagtttgtgcatagttcgctgcgcgcggcgacgacgacgatgaaggaaggaggaggaggaggaggggagaggaggaacatcctggccaagacgatcgacaggtgccggtcgtcgctggggcaccggacaacgaggcgccccgcctccgccgccggcggcggcggctacggcggcgcggccgtgccggcggggttcttcgcggtgctggtggggccggagaaggagcggttcgcggtgcgggcgcggtgcgccaaccacccgctgttccgggctctgctggaccaggcggagacggagtacgggttcgccgggtgcgagggccccctcgagctcccctgcgacgtcgacgccttcatggacgtcatgtgggagatggagcaggccgaccccgccgcgtccccgcgctgcggcgcgcgcttcggcggtcccgccgccgccggcagcggcaggggctacgggggccacggccaccaccaccaacaccaggggtaccagatgatgagcaccccggcgaggctcctcgtcgccggccgctcgtgatcgatgtctcggcatctctcgcgacgccggccatcgccggcgatctcgtcgtgcccgtccttagttaatcaatttgctgtctgcttgtaagtactatagtaggcacgtgttgggcgcatgcagagagaggtttgttcacctgcttgcttgctttgctatgctatgactgtgatagggtaggggtgttcaagttcaactgttcatgtcaacgtttgtttccatgtcgcgttcgatgtatctctgtaatcgtagttttgtatgtgtgagtgatctcatgcgtgttcaaccaacccctaagtcgataaaagatcgatgcatgtacatgcatggtgttttgttcagtgttaactgtgaatcactatgaataaaaagactatagtgaatctc

SEQ ID NO: 11439 - DNA, 814 bp, Oryza sativa
  ref <308>: DATABASE ACCESSION NUMBER: AK108787
  ref <309>: DATABASE ENTRY DATE: 2002-08-28
aaacctccaactcgaatcgaaagagaggaaaccaccgaaccctagcgatgtcggcggcgtggatgctcagccgcgccgtgtcccagaggcttctccgccaccgctcccgatccttctgcagcagcttgtcttcctcctcctcgggaaaggtcaaaaggatcgaacgatttgatgaatttgaggagatggtgcaaagggaaattgttgaggatgtggagaaggtggagagagcgaagactgaagatagagattgtatcaaccggctgttgacttcttgtgggatgcccaaaggggaatttcgagataagctaatgtggggctgtaatgttgctgccatatttgttgcatccggtgcagttgggtcattgattgctaaaattaaaatagatgggagtgtgtaagcatgccgagtttggtggaagacggttttttttaaacgttttcaatttttaattttaaaaataaatcctttcaaaacttaatttcaagatatgaaccttttggcccagctagccggactgggttgacaaaacaacattatcacgctagccagaccggcgtgatagcgttatttggtcaagccggtctagctggcgtgacagcgttatttggccacgccaggataaaactcagtattgttttggccaaaaggtttagattcgagaaataagttttagaaaggggttatttttaaaattaaaaaataaaaaagttcaaaaaaaataaaaaaaatctttggtggaaatgcttctgtgcgttacgtaagcacactaaactattgtaaactattgctgtcctgtcttcggctggaatc

SEQ ID NO: 11440 - DNA, 1650 bp, Oryza sativa
  ref <308>: DATABASE ACCESSION NUMBER: AK108788
  ref <309>: DATABASE ENTRY DATE: 2002-08-28
acttttctcctcactcacaccttcacctcctctctccactccaccacatacacacatttcttctcacattcacaatggtatttactcgttccgctctcaacctcgcccgcccggccggctcgctgctcgcccagcgcgccgcgccccgcactgccttctccaaacttggtggggttagaacgctgacggcctcttcctcccgacagggcaaggttctactttgtttgtacgatggcaaggaacacgccaagcaggagccccgtctcctaggtaccactgagaacgagcttggtattcgcaagtggctcgaggaccagggacacactctcgttactacttccgacaaggagggcgagaacagcgttttcgagaaggagatggttgatgccgaggtcatcattactactcccttccaccccggttacctcaccgccgagcgcctgaagaagtgcaagaacctcaagatcgccgtcaccgccggtattggctccgaccacgtcgaccttaacgtcgccaatgagaccaatggcggtatcaccgtcgccgaagtcaccggctctaacgtcgtctccgtcgccgagcacgtcgtcatgaccatcctcactctcgtccgcaacttcggtcccgcccgtgagcaaatcgcccgtggtgactgggacgtcgccgaggccgccaagaacgagttcgaccttgagggcaaggttgtcggcaccgtcgctgttggccgtattggtgagcgtgtcctccgccgcctgaagcccttcgactgcaaggagcttctctacttcgactaccagcccctcagcgccgagaaggagaaggagattggctgtcgtcgtgttgagaacctcgaggagatgctcgcccagtgcgatgtcgtcaccatcaactgccctcttcacgagaagacccgcggcctcttcaacaaggagctcatcagcaagatgaagcctggctcctggctcgtcaacaccgcccgcggcgccatcgtcgtcaaggaagacgtggccgacgccctcaagtccggccaactccgcggctacggtggcgacgtctggttccctcagcccgctcccaaggaccaccccctgcgcaccgccagctacctgggctggggcggcagcgccggcaacgccaccgtcccccacatgtcaggcacttccctcgacgcccagaagcgctacgccgacggcaccaaggccatcctccagtcttacttcagcggcaagcacgactaccgccccgaggacctcattgtcaccaagggtgactatgccaccaaggcttatggccagaggaacaagaagtaaatgcttcgcaatgatggggtaatttgatgatcagctaggaagaagagggggataacactacatccgatatgctagggatgatggaggtatacctgccttgaccgctgtgctaccagggggaaaagctccgcatcatgaattcttgtgggcttggactctttggtttttttgtttctttcggagcggaagaaagtttgcctgccgtcctgttcttgtcgacaagacggtttggttgtgctgcatttcctgctacgctactgcaatcagtagctagctagccagcgagagaggctcttatttacttttgaaaatgtcccgactttttatcttaaccttcttc

SEQ ID NO: 11441 - DNA, 1298 bp, Oryza sativa
  ref <308>: DATABASE ACCESSION NUMBER: AK108789
  ref <309>: DATABASE ENTRY DATE: 2002-08-28
gaatgataaaaagttgcttcaataatattttgctcagcgaccagggacactcgctgaccgtcggcatcgtgcagccgcgcaagctcatcgtggacaccggcagcgacctcatctggacgcagtgcaagctgtcctcctccaccgccgcggcggcgaggcacggctcgccgccggtctacgaccccggcgagtcctccactttcgccttcctcccctgcagcgacaggctgtgccaggaggggcagttcagcttcaagaactgcaccagcaagaacaggtgcgtctacgaggacgtgtacggcagcgcggcggccgtcggcgtcctcgcgtcggagaccttcaccttcggcgcgcgccgcgccgtctccctccgcctcggcttcggctgcggcgcgctctccgccggaagcctcatcggcgccaccggcatcctggggcttagcccggagagcttgtccctcatcacgcagctgaaaatacagagattctcctactgcctcacccctttcgccgacaagaagacgagcccgttgctgttcggcgcaatggccgacctgtccaggcacaagacgacgaggccgatccaaaccaccgcgatagtgagcaatccggtggagaccgtctactactacgtgccgctggttggcatctcgctcgggcacaagcggctcgccgtgccggcggcgagcctcgcaatgaggcccgacggcggcggcggcacgatcgtcggctctggcagcacggtggcgtacctcgtggaggcggcgttcgaggccgtcaaggaggccgtgatggacgtggtgaggctgccggtggcgaaccggaccgtcgaggactacgagctctgcttcgtgctgccgcgccgcacggctgcggcggcgatggaggcggtgcaggttccgccgctggtgctgcacttcgacggcggcgcggcgatggtgctgccgcgggacaactacttccaggagccgagagccgggctgatgtgcctggccgtgggcaagacgacggacggctccggcgtgtccatcatcggcaacgtccagcagcagaacatgcacgtactcttcgatgtgcaacaccacaagttctcctttgcgcccacgcagtgtgatcaaatctgaaacactcttactactaacacagttgttcttacaattttcccttttatttttccctgaaaatgttattagccttccggattaagatatccaataataaaaaggattcatcgatcaagtattgacgtttcgaaacgacaaaagagaataagaggaaatgcaccacagatgtatttg

SEQ ID NO: 11442 - DNA, 1382 bp, Oryza sativa
  ref <308>: DATABASE ACCESSION NUMBER: AK108790
  ref <309>: DATABASE ENTRY DATE: 2002-08-28
atataataacgcggatcagctaagagcgatttcttcttcttcttcttcttcttcttcttcttcttcttcttgcttgttgttgtagcatttgattttagatatggcggcacttcccaaggccggcaagccgctcgtcgagaatgacgccggctcttacctcgcgtggtccggcaagaaccagccggccctcgccggcgagaagctcggctgcggcctgctcgtcctgaagcccctcggcttcgcgctgccgcactacgccgactccggcaagttcggctacgttcttggcggcagcgcggtggtcggggttcttccggtggggttggacgccagggagagggtggtgcggctcgaggccggcgacgtgatcgccatgcgcgccggggaggtcacgtggtggtacaacgacgcggacggtgaggatgtcaccatcgtgttcatgggcgacaccgcccgcgccgccagccccggcgacatctcgtacttcgtcctcgccggcccgatgggcgtccttggaggcctcgacgccggcctcctcgccacggcgtcggggctgacgtcgccggagcaggcggccaccgccttccgcagccagcccgccgtgctgctcaccaggctgagccgcaagctgcaagacgtccgcccacgcgagcacgacaggcacgggatcgtcgtgaacgccgcgcgcatgccggcggacagcagcaccggcggtgccgccgccgggacgaagattgtcaccgcggcgcacctgccggtgctggggcagctcgggttcagcgtcgggctcacgcctctcgacgcgggcgccgcggtgcgcgggccctgggtgctccgcgacgccgcggcgcaggcggtgtacgtcgcccgtggaagcgggcgcgtccaggtcgccggcgccggcggcgcgtcgacgctgctcgacgcggaggccgcggcgggcagcctgctcgtcgtgccgcggtacgcggtggcgctcgtgggcgtggacgccggcggcatggagctggtgtcgctgatcaaaagccccaggccggcgatgaagcagttcaccgggaagggatcggtgatcggcggcctgacgccggagatcgtgcaggcggcgctcaacgtgtcgccggagttggtcgagcagctcaggatgaccaagtgagcgaagccaactccggatttgatctctccggcgatggggtgtggtgatgcccacagtagaacactgcgcgtgtctttgtctttcagtcttcaccttgcgagaagtcatggcaggattaagtgttgatcagtctcagcatgcgaataatgtcaccaagtacaataataatcggaactagcagtgcaataattaaagctgaaaatggatggatcgatgaaattttactttt

SEQ ID NO: 11443 - DNA, 1296 bp, Oryza sativa
  ref <308>: DATABASE ACCESSION NUMBER: AK108791
  ref <309>: DATABASE ENTRY DATE: 2002-08-28
atatctgtttagagcttttctggtgaggactaatacagtgtggtttgttcactctgttgtttgtttgaaggcaagaaaaagaagccgccatggcagtggggagaaggggatgaaggaatacttagacacgtggcatgatctcaggagccgaggggcctcaagtcggtacagctattgaaccaagagagcaagaaccaccggccgtgaagttcgcagcggggaaatggaattcgaggaggattcggcctccttccatggcggcgagggcgtcaccggcgtactgcgctggcacacgacgacgctatcggattcgcccatcggcgattaagaacccctctcactgggccacgacgtcaccagcctcttctccttgtgccgcgacttccgccggtgcagggttgtgattccgaaccccatctacggcggtgacgccggccttctacatgtgcacaacaacaagaagacgctggccatccgcgagcaggtgtcagtgtcgcctggccgcgaacccggcgtcaagaacaggacatccgtgtgcaagcggcgtcctcggacgtttcatctcccttcgtctgcttctcagaagcagtgggctccatatacatcacattgtatcagattacaaggataggaatgaagaggaatatgagggaatgaacatatcactcttggaggaggcctcagtgcagaaggctgatgcaaaacctgtgtactgcacaaagtttctatctgactgggtttgcagcttaagaaattttaagtggaaagtagtggcagggattcaccaagcattagtaccgaatgaatacagttgggaagaagtaatgggctcaccaattattcaatacgcaggaggctgctcgctctcggcgtgcagtgtatgtatcgaccggcttgcgtttgagagaatccatgggagaggatcctttgcatggagggtagaatcaccccctgcaaaactcagaaaagaatgccttaagaggaatgcctggtcacaggaaagtggtgggaaatctgacagggtgctggatgtaatcattgacaacggagggctaccaacgactgacggaattatcatgttaccttggttgctttgcagcgtcaaatggtagatgtccaaaagcatttcaggggtggctcataatccggctgcaatagatttgatgctgcatgttttcatttaacactgtaaaatgatgaatccttctttgtgatgttgatcagggataagatgcccatactatatatgtttctttgtcatttgagatcaagcattatgttccatttacgtgaact

SEQ ID NO: 11444 - DNA, 837 bp, Oryza sativa
  ref <308>: DATABASE ACCESSION NUMBER: AK108792
  ref <309>: DATABASE ENTRY DATE: 2002-08-28
aggatgactttccttcactccgcctgctaaaaatcaaggatagccacgagttgaggtacctcccacaggagctatcttcctccctcacaaagttagttatcaaggattgcagcaaacttgctagtctaccagctattccaaacctcactactttggtcttgaagagcaagataaatgaacaaattctgaatgatttgcactttccgcatctcagatcactgaaagtgttactgtcacggagcatcgagcaccttttacttgacaatcagaatcacccattgctcgaagtcttggttatcagtgtttgcccacgtcttcactctataatgggtcttagcagccttgggtcactcaaatttttgaagatacatagatgtccttatctgcagctaccatctgataaaccactgtcaacacagcttcagcgacttaccatcacaaagtgcccattgctagcagactggttggaagtccaaatttcgcaccagcaatgccagttacatgagtctaaagatgcttggtatgaagagcaacaagctctgaatgaattgaatgatgcaagtgaggacgagcacagagaggagtttgggcttttgtacgaagatgacaatggagaggacaacgatgagcaagaccatgagcagtcagaagatgaggaaattcagtacggcagtgatgacagtagcgaagaggatgaatagatagcttaatttggtataaaaattagaaagaacactgcaacctataagtaataatcacctaatcaacgtcatgctttacaggtgaggagctcataccatattagctacatatatattttaccgtctctcatgggtc

SEQ ID NO: 11445 - DNA, 1359 bp, Oryza sativa
  ref <308>: DATABASE ACCESSION NUMBER: AK108793
  ref <309>: DATABASE ENTRY DATE: 2002-08-28
atcgccactcgcctccctcctcctctcaggccggcggctgcggcagcggcggcggcggcggaggcgatccatcaggcaatcaatcaactaccaataaatttaaagaattttggtaaaggggaaaaatcatggctatgaagacattatcgatcaaactcttgattgataccaaggctcagaaagtctgctttgccgaggccggtaatgatgtcgtagagttcctcgccagtctcctttgcctaccaatgagcaccatcatcaacttgctgaccaaggagcgtatggttggcagtatggggaacgtgcttgacagtatggagaagctggaagacaagcatgtaaccacaaaccagagtaagcaacgctacctgagcccgacggctgcccccaacgcactctgcccattgcagcagctgctggatacagagttaaatgccaataccagcttcttcacatgtgaagggaaattgaacagcaccagctacaatgccactcgttttgcttgtggatatttttcggttgtgaaaggcagcatatgccctctttgctacactccaatgcacaaggcaataccacatgtcaacacctcaagggttatggctgggacaggcacatacactatcaaggatgatctctcaatgactccagcgtccagtgtctcaagcatcagccttcttgcacagtgtggtgtcaaggacttgaccacgctgcaggaaaggaccatgaagattggcaaggaagaggcgctggagatactccttgcttccctgaagtctaagaccgtgctgactgatgtttttctcccaaagaagaaagaaagttgcaagagggaggtatctgcttagttatgatgcattgatgcatgagcagttttaccaggcatcacaagtgaaaattacaacagcttgttattaagccgacagtagatttcagtaggtctttattgtgaagtgtcactttgcatttcttattgtatccatttagcaaaagtagtatttccttcgttttcgttaatgaaagcgggagaggtgcggcctctttttatcaaaaaaaaaaaagaagcaaaagtagtcttgcaaatagttggcttactagtttggtagtgatatgcaattatgcagtatccacccaatgaaatctttctactatcaatttgggtgtctcactagaaatatgtttttgtgttctttttgtgtcattatctaaaaaaatgtacctgtgtgccttctacatgcaaaagagacgggtgtgatttcggttcttgtagaattggttcagaagtgatccaatgctatctgtgtatatgaattccaaattcagatattttactgttagccgtcatagtccagatccattgcc

SEQ ID NO: 11446 - DNA, 1091 bp, Oryza sativa
  ref <308>: DATABASE ACCESSION NUMBER: AK108794
  ref <309>: DATABASE ENTRY DATE: 2002-08-28
atcttgaacaccacctccacgtccgcctgcgagctcgccacgccgacgatctcctgcaccgcgccggcgcctagcctggtgcctcgccggagaccggcggcgcgcttcctcctcagcgtctcgatctcctcgattggccactgcagcagctgcttgccgtccttggcgatccacatcttcctcgggaacgtctgcacgccggaccagccgcgggcgacgtcgtcggcctggctgtcggactcgttcgcccacgcccacagaacgtgccggtcttgcgcgcgtcgaagaacgacttggacgcgtacacgtggccgtagtccagccgccgccatctccggcagtcgtcgccgcgctcgggctccgccggcgagaaggcgtccgccgcgtcgtcgtacgtgccgaccatgtagtagtcctggagcgtgtccatcacgctcagcttcaggacgtggcgcacgccgccggcgccgttcgtcgacgtgtcgaggccatcctcgccgttctccgccacggggaacatgtccgggcactccaccatgccggcggcgcgcgacgcgtgcagcggcgcggcgttccgctcccaccggacgaagtcctcgctcctgtagacgagcgtggacgccacgccgtccacctcggcggagacggcgatccgccacaggccatcgcgcccgagccacgccgtcgaggggtcgcggaagttgtcgccggggacgtcgggcgggagcgcgatgaccggattgtacgcgggcttctcccactcacggaggagcggatcggaggggttcttggcgaaggcgacgttctgcacctgctccttgccggcgtcaatgccggtgtagaggatggccgggaggccgccggggaggatggtggcggagcccgaccagcagccattggcgtcaaaaggcgaggtggggtcgagcgcggtgtcgagagcggcccagttgaggaggtcgccggagacaaagtggccccaggagaggttgccgatgtcccagagcgcgctatgcgggttgtacttgtagaacaaatggtacataccgttatggtacaaaggccctgcacgtataaaatgaataactgtcaac

SEQ ID NO: 11447 - DNA, 1486 bp, Oryza sativa
  ref <308>: DATABASE ACCESSION NUMBER: AK108795
  ref <309>: DATABASE ENTRY DATE: 2002-08-28
gctcctagcggctctctctctctctctctctcttccctcttttttaagcagccgcctttccccggcggccggcggccggcgacgccatgctccacctccggcagtgcctcctcccgctgctccgcgccgccgccgccgcccatccccacacctccgccgcatcctcctcctctctccacctcagccgccgcctcttctccaccgccgccgggcccgacaccgcgccccccttctccgtcgaggagtacctcgtcgccacctgcggccccacgggcgcccaggcgctcaaagcgtccaagaagctctcccacctcaggtcgcccgccaagcccgacgccgtgctcgccgtcctctccggcgtcggcctctcccgcgccgacctcgccgccgtggtcgccgccgacccgatgctgctctgcgccagggcgcgcaacgtcgcccgccggctgcattcgctccgcgaccgcgtcggtctgtccgatgccgacgtcgcccgtttcctcctcgccggcggcgcaatgggcctccgcaaatgcgacatcgccccgaggctcgagttctggatcggcttcgtcggatcgttcgacaagctcctaccggcactgaaggggaacaacggaatcctcatgagtgacctggacaaggtcgtgaagccgaacatcgcgctgctccaggagtgcgggctaagtgtttgtgaaattgccaagctgtctacgctcaagtggacggtgctgtcgttgagtccagagcgagtcaaggcgtcggtgctgtgcgtcgagaagttggtcgtgccccgctcctcggatcggttcaagcacgtgctcaagtccgcctgttggatctccgaagatatgctcgccatgaaaatggagttcttgaggagcactcttggttgctccgaggacaagctccgtgccgcggtctgcatttcgccacatattttctacctgtccgacaagaacctttgccgaaagatagacttcctgatctccgaggttggcttggagtgtgagttcattgtggaaaggccttgggtgctcggctacagcctcgagaagcgtatggtgccacggcattctgtcatgaagatcctgaggaccatgggattgatgaaggatgctgttgacttcagcagttcacttgtttactctgagaaaaaattcgttgcaagatacattgatccttacaagcaagcagctcccacgctcgcagattcctacgctgctgcttgtgccgggaaaatgcctgctcatgttcaccgttgaatgtagattttcccaggttgctgctaatatcttgtgctgttttttgaggcgggctacagaggaggcaagcttgtaggtataccttatcgtatgtgttacacaaatttaggctgttctcattcgaaggttggttatctgttgcatgaactgcagaaaccttccaagatgaccaagcatgtaacatttgatcgttttgctacctaggatgcatgtttgatgat

SEQ ID NO: 11448 - DNA, 1190 bp, Oryza sativa
  ref <308>: DATABASE ACCESSION NUMBER: AK108796
  ref <309>: DATABASE ENTRY DATE: 2002-08-28
ggggaaaaagatgtgttaatgcaacaactaactgagtcagaggcagctaatgcgcatctaaggtctgagctaaaagctgagaaggatcgttttgtccgggagaagaaggaactttctgagcagatgctggagatggagaatcagttggaatgggtacgatcagaaaaagatgagcaaattgtaaagctaactgctgataagaaaaatcttcatgatcgtctacatgaagcagagacacaactatcccagttcaaagcatggaaacgcgaggaactaaagaaaataaccaaggagaagaatgctttggcagagaggcttaagggtgttgaagcttcaaggaaaagggttgatgatgaattcaaacggtttgttgctgaagcacagactcgtgaagagattcggaaatcacttgaaggtgaagtaagaaggctgactcagacagttggacaaaccgagggagaaaagaaagaaaaagaagaccaaattactcgttgtgaagcttacatagatggaatggagtcaaaactacaagtttgccagcaatatattcacaccctggagacctcaattcaggaagagatggcacggcatgctcccgtgtatggtgtcggcgtggaagctttatcactggatgagcttgagacactcacaaacatccacgagcggggtttaagacagatacatgcaattcggcaaaggaaaggtagcagtcatcgcttgagtgccccttcgctcccgcacgtcccaggtttatactcctcgcctccttcaatggcagttggtctgccgtcctcgctgatccccacatcgtccgtagcacctaatggtgcaggcatccatggaaatggccacatgaatggttccatgggtagctggttcaatccaacctaattcagaagatgcagcaccgcaacaccggtgtccattttgtgcatcaattcgacgtatcacattttgcctggccgtatttaccagctgctgagcaatccaacgtgataccctttttgtcctcgccatttggtttggcttttcttgcttgtattttgaactggtagcgccgtcggcttgatagatcaaagagcgttaagggggtttccgcatggaataagttgtaataatcaagataatccgatggaactaccaggtattcaggtgcaagtgggaaagctatcgaaatggttgatatcacc

SEQ ID NO: 11449 - DNA, 1266 bp, Oryza sativa
  ref <308>: DATABASE ACCESSION NUMBER: AK108797
  ref <309>: DATABASE ENTRY DATE: 2002-08-28
aatgcacagctcacggcagcacagaattgttttccctttcgatcgatcaagatgacgaggacgccggcgtctctctccttggccgtcgtcgccgtctcggtggcggcggcggcgctcctcctcgcggcgctggtggcggcggacggccagaaacaacaaggctacgtgcagccggcgtaccggcggccggccgccgggctgaaggccgactactaccaccagtcgtgcccggacatggagggcatcgtccagcgagccgtcaagaaggccatcgccgccgactccaccctcgcccccgccctcctccgcctcttcttccacgacttcgccgtcggggggatcgacgcgtccgtgctggtggactcgccggggagcgagaggtacgccaaggcgagcaagacgctgcgcgggttcgagctcatcgagtccatcaaggccgagctggaggccaagtgccccaagaccgtctcctgcgccgacatcctcgccgccgccgcccgcgacgccagcaccgaggtgaaggtggactactggccgctgatgtacgggaggaaggacgggaggaggtcgagcatggtggacgccgaccagtacgtgcccatggggcgggagagcgtcaccgacctcatcgccttcttcgagtcgagggggctcaccgtgctggacctcgccgtgctctccggtgcgcacaccatcggccgcgccacgtgcgccgccgtgaagccgaggctgtgggactacgccggcacggggaggcccgacgccagcatgagcccgcggtacggcgacttcctccgccgcaagtgcgccgccgccggcgacggcgggtacgtctacctcgacgccgacacgccgacggagttcgacaacggctactacaagaacctgctgcgcgacatgggcctcctggagacggaccagaagctgctgccggactcgaggacgggggagttcgtcagggagctcgccggcgcgcgcccggagctgatcaggcaccagttcgccgactccatgcgccgcctcggcgccgcgcaggtgctcaccggcgacgaaggcgaggtccgcctcaagtgctccgccatcaacagcaactcctactgattgattgatctgattagcatatatgtcaatatatcgaattatattatcgatcgatatctattatcaattgcttatgcgagtaatgtcaatggttttccattttggcttcttggtaatttcctcaagagaaaaaaaatgcttgtgttttggagcttaatccacttt

SEQ ID NO: 11450 - DNA, 1204 bp, Oryza sativa
  ref <308>: DATABASE ACCESSION NUMBER: AK108798
  ref <309>: DATABASE ENTRY DATE: 2002-08-28
gcatatacacacgagaaatcatcaagaaggagaagaaggctagagaaatcaagaagagatcgatcgccattggcgaggtggagaggagctcgcggcaatgtcgtacctgcagaagccatcctactacaccatctcgctcgtcgtcgtcctcctcctcccgttcaccatcctcttcgcgagcttcctcctccccttctccgcttacctgcgcggcccgccgccgatcgccgccggctccgtcgtggccggcggctgccgccatggcgcggcagacggtggcggcggcggcggcggtggtggtggtgttcgtccggagatcagcatcctcgtcggcgtgcacacgatggccaagaagcactcgcggcggcacctggtgcgcatggcgtacgcggtgcagcagacggcggcgctccgcggcgcggcgcgcgtggacgtccggttcgcgctgtgcgcgcggccgatgccgcaggagcaccgcgcgttcgtggcgctggaggcccgcgcctacggcgacgtgatgttgatcgactgcgacgagagccctgacaaggggaagacgtacgactacttcgccggcctgccggcgatgctgtcctccggcggcggcggcggcggcggtggcgaggggcggccgtacgactacgtgatgaaggtggacgacgacacgtacctccggctggacgagctggcggagacgctccggcgagcgccgagggaggacatgtactacggcgccgggctgccgttcctcgacaaggagtcgccgccgttcatgctcggcatgggctacgtgctgtcctgggatctcgtcgagtggatcgccggctccgacatggccaaagcgctagccataggtgcagaagatgtgacaacagggacatggctgaacatgggcaacaaggccaagaatagggtgaacattttccctaggatgtatgacttcaagggtgtcaagccagaggacttcttggaggacactattggtgtgcaccagctaaagcaagacctgagatgggcacaaaccttggagcacttcaatgtcacctgccttgatccctccagcaagatgaccaactcactactctcctagctactggcagccatctagttagctcttctagaatcatccgtgtaattaatcaagattagtctgtaaatcaaacccgtaattaattgttcataagttttctctgtggtgaatttc

SEQ ID NO: 11451 - DNA, 1494 bp, Oryza sativa
  ref <308>: DATABASE ACCESSION NUMBER: AK108799
  ref <309>: DATABASE ENTRY DATE: 2002-08-28
ctgatgaccaacaagaatttagagttgcagcgcttggtgggggttcagacaaacatgctaaagaattctggggtcactataattgaaggccgtggaaaggttgttgatccacatactgtcagtgttgatggaaagctttatactgcaaaaaacatactcattgcagttggtggtcggccatccatgccagacattccagggatagagcatgttattgattcagatgcagcattggacctgccttcaagacctgagaagattgcgatagtaggaggagggtatattgctttggagtttgctggcattttcaatggcttaaaaagtggtgttcatgttttcatccgacagaagaaagtactgagaggctttgatgaggaggtcagggattttgttgccgatcagatgtctttgaggggtatcacatttcataccgaagagactcctcaagcagtaatgaaatcagacgatggcttgctgactctgacgacaaacaaaggaagcataaatgggttctcacatgtaatgtttgcaacaggacgaaaaccaaatacaaagaatttgggtctagaagaggttggggtcaaaatggacaagcatggtgctattgtggttgatgagttctctcgaacctcagttgattctatatgggctgtgggtgatgttactaacagggtgaacttgacaccggttgcattaatggaaggtggggcattagcaaggactatttttggcaatgaacctacaaaaccagattacagtgctgtgccatctgcggtgttttcccaacctccaattggacaagttggactcactgaagagaaggcgatcgaaaagtatggagatgttgatgtctacacatcaaacttcagacctctcagggccactctttctggtctacctgatcgtgtatacatgaaggttatcgtgtgtgctaatactaacaaagttctaggagtgcacgtgtgtggtgaagatgcacccgagattattcagggtattgcaattgctgtaaaggctgggttgatgaagcaaaactttgatgccaccataggtgtccacccaaccactgcagaagaacttgtcacaatgagaagcccgactaggaaggtccggagagatgctgtggatgaggccaaaatgaaagatgaggccacaagtcagaagtagatacacctgccctgcataaatgagtctgaccagtcgatttctaaccgcggaaacaacagacagatatcggtatttcgagcagtaccagagaaatccaacccacgattgcagccagtgaagaacggagatgagttacagcaaatggctagctatctcgtatattgcatggtttataagttcattattatagaaaccagctcaagttccttttatttttttggcctaacatgttactgaaagaaatgcttcaggtcccggtcaaaaaaaagaaagaaatgcttcaggatgttgatagtattgccgcatgaaattttttgattaaacaac

SEQ ID NO: 11452 - DNA, 804 bp, Oryza sativa
  ref <308>: DATABASE ACCESSION NUMBER: AK108800
  ref <309>: DATABASE ENTRY DATE: 2002-08-28
ttcaacaactgcttaaagaaaagactgataggaaaaacaaacaggaaaaggtgtccttgaaaaaaaaaaagctaagaaaggtcaatcgactaaaaggatatcatagcaactctcagctacaagcagtacattctaaaagaaagagagtccaatgcgacgcagctgatcgagaagacctcctgagtcagcaaagatatccattcaaggacatatatgaggacgatgacttgtcattctctactgaaaaggaagaaccccattatcaagaagcaccaccatcaccatggtccgctcattcctttcgacaagaagagatggctaaagaagggcagaaaatgttcgtaaagagcacggacaatgcacatgatcaagtgattcaaagccgtgtgcgttcaaagaagacgcgcccttcaccagtggaggtggtgttgagataggcaaccatttttggaaagtacgaatcaaccatcctattcgtaaaaatgaggagcttgtaagaccattggatcattgcaagacaattaatgatgcccatgccaaaggagtggtgattgcgtggccttcaatatgtgtttggaagattaatggttgatttcgcttccatctcaccctatggattgataaaccggcaaagactttcaagaagaagaagaagaagacgaatagattatcattttgttatattttagtatgaaagactgttattctgaagacttgcttttctcaaatggattatcatttatgttttgtaatgatgggaaggatgttttaactattttgttatgcaatgcaatctttattttc

SEQ ID NO: 11453 - DNA, 540 bp, Oryza sativa
  ref <308>: DATABASE ACCESSION NUMBER: AK108801
  ref <309>: DATABASE ENTRY DATE: 2002-08-28
aaatccttcccccgaacccccaatcccggcggcggcggcgaagatgatcataccagtgcgctgcttcacctgcggcaaggtgatcggcaacaagtgggatctctacctcgacctcctccaggcagactacaccgagggggatgctctggatgctttgggcttagtccgttactgctgtaggcgaatgctgatgacccatgttgacctcattgagaagctgctcaactacaacactctggagaagactgagaccactgctggcaattagatgagcctcgcatactccaccgcttcattgcacctagtatcctttagtctagtgtttatgctgtgtttgacacatctaaacaaacagtgctgctatgcttatgcaaaaagctgttctttgcacattagtgaatatggatggacttgaccatttccaatgtacccaggaattctccagctgtgtttcttctatcatctatgtaactgttgctaatgtgtattgacagcttgaaagccaactttattctgaatgtcatctcgtcatttcacggc

SEQ ID NO: 11454 - DNA, 1336 bp, Oryza sativa
  ref <308>: DATABASE ACCESSION NUMBER: AK108802
  ref <309>: DATABASE ENTRY DATE: 2002-08-28
atcaaactcaaccatccttgctttggctgcgtagcgtgtagcgcgcgcgaacgaacgaacacaccaagctttgctctgcttttcctctgtccaaaacagccggccatggtggtgcttgccaagggcgagctcgagcagatagccctgccggcggcgcacccgccgccagccgacatgcgcgcgatcgacctgtccgccacgggtcccgcccgcgcggcggaggcgcgcgcgctggtggcggcgtgcgaggagcaggggttcttccgggtgacgggccacggcgtgccgccggggctggtgcgcgccgcggaggccgccgcggcgcggttcttcgcgctgccgcagcccgacaaggaggccgccgcaggggcgccgctcgggtacgccagcaagcggatcggcagcgccggcgacctcggctggatcgagtacctgctactctgcctcgcccccgccgccgccgccgcggcattgccgtgcgccgcgacgtcgcccacgcctccttgccccttacgggagcttctacgcgagtacagcgcggcggtgcggcgggtggcgtgcggcgtgctggagctgatggcggaggggctcggcgtcgggccggcggacgcgctggcgcggctggtggcgcgcgaggacagcgactccatcctcagggtgaaccactacccgccgcgccccgatcagctgggcggcggcggcgggccgaacctgacggggttcggcgagcacaccgacccgcagatcatctccgtgctccgctccaacggcgcccccgggctggagatctccctccgtgacggcgcccgggcgtccgtgccgcacgacggcgacggcgactcctttttcgtcaacgtcggcgacaccctccaggtgctaacgaacgggaggttcaggagcgtgaagcacagggtggtggtgaacagcgagaagtcgagggtgtccatggtcttcttcggcggcccgccgcccggcgagaggctggcgccgctgccggcgttattaggggacggcggccggagccggtacagggagttcacctggaaggagtacaagggcagcggctgcaagggccggctcgccgacgacaggctctgcagatttgagaactagtagtagcagtcatctgacttctatgtacgtttgtgtatattaattcgcaagtagtgattatcactgtggtttgcctctagcaatagccttgtacgtaaatttcagtatgtgttaatctgtttatatataagcttccagcaaaagttgcatgcatgtaagtgctctgtggacagtttagttttattacaattaaatgagctctcttaagatgatggttgctagt

SEQ ID NO: 11455 - DNA, 671 bp, Oryza sativa
  ref <308>: DATABASE ACCESSION NUMBER: AK108803
  ref <309>: DATABASE ENTRY DATE: 2002-08-28
aacacgaactccccgacgacatcaccagccacgccgccgccgccgccgccgcctccccgtgcgcgggttcgtcggggtgccccctcacctgtcgcccccctcgcgtcgacggccttcggcgcctcaacgtcgccggcggccagccagccagccagccccgctgcccggctgctcgcgcgacgcgcctcgcccgccgcgaagggaccccgcccaggagctctacggacgacatctccctcgatgcatcgaatactatcgagagccgctcgccggtgcaccaattcctccgcggcattcaagcccccgcagattgtaacgaagagtttcttccttgcgtccttatgtattttctgtgcgttggtgtgtattctggatgctgaagttgcacgttttgcaggcgcaagccaatgtggttagtggagttcactccggagaggcctcaacttgttcaaacggtgctgggctttacaccttttcgttgtactgtcatgttctccttatggaaggccataactgttgtttctaatctagttacccagttctatgcttgcaaattgtatatgaacggtatattgcaagaaacgtgatgatcaaatggggaactaagcgttttccttttattttttttttggggtaaattcatatagtttggagcctgaggttcccttttt

SEQ ID NO: 11456 - DNA, 1295 bp, Oryza sativa
  ref <308>: DATABASE ACCESSION NUMBER: AK108804
  ref <309>: DATABASE ENTRY DATE: 2002-08-28
gggcaaagttggcacgatctctcgctgccttggactcttctagttctagtttagtttgccttctttcttctccgtctcctcctcgcggcggcgcgcatggagcggctgatctccaagtccgtcgccgcccggatctctctgccggggggcggatccccatcccgccgcctcgccgtcgcgggtctcggcggcggcggcggcgtcgagccgtgggcggggaggctacgggcgcagccgcgtctcgggccgatcgcggcgcggccgcacgatggtgtgtcggccccgccgcgggaggccgctccggcggcggcggttggacctccgtggaagttgctgtggagtctgctccccaaggcttccagagctgctcttttcctattggtggcgcttgttaccggcaccctgcaatctagcattccttatcctgcccatgcatcagtgcaatcaataaccaaaactggtggactatttacatcagagatactaagcagtggttgggctggtttcattgctggatgcttgcataccttgtctgggcctgaccatctcgttgctttggcaccactgtcgattggaagatcaagactggaaagtggactggtcggtgccctttggggttgtggtcatgatgcaggacaagttatttttggcctgctattcttattactcaaggatcgattgcacattgagattctccggacatggggaacaagagtggttggtctgacccttctaatcataggaggtatgggcatccgagaagctacagaggttcaggaatcgtcgctcgccctggaaggcgtggactgcaacataaccagcagtgagcctttacaaacccctgctgctcccaggaagaagaaagttggttttgcaacatttgccactggagttgttcatggtctccaaccagatgctctactgatggtgttgccttcattggcccttccctcacgcttcgctggtgcagcatttcttggcatgtttttgatggggactgtattttcgatggggagttacactgcttttgtaggttcttgtagtgaggccttgaaagaaaaggtccctaggataacagagaaactgacctgggcggcttcacttgtagcaatatgcatgggaatagctcttctagttgggcagttcttcggtttcagcctatactaatgtattcgcaatacgacattgtttccttaatattgttggcaattagattggtaacagaggattttatttgtatgactgcaaattgtatactggtagacacagactttacaccgatttttttcctccag

SEQ ID NO: 11457 - DNA, 1344 bp, Oryza sativa
  ref <308>: DATABASE ACCESSION NUMBER: AK108805
  ref <309>: DATABASE ENTRY DATE: 2002-08-28
gggagattgctagctgatcacaaggaacccgtcgttgcagcagcagcagcgtagtgcgcttgcttgcactagcagcagcacagtgacgacgacgctagctaagggcagaggagaggagggtgataaatacaggcaattactagctagctgtttcactgcaaggattagatagatcgtagagagtagcaagaagagaagagaatagtagagaagagagagatgaggcagtcgaggttcaagaggatctgcgtcttctgcggcagcagccaggggaagaagaggagctaccatgacgccgccattgagctcggcaacgagctggtggcgaggagcatagacctggtgtacggcggcggcagcatcggcctcatggggctcgtctctcaggcggtcttcgacggcggccgccacgtcatcggggtcattcccaagactctcatgacgccagagataagtggtgagacagtgggggaggtgaggccagttgctgatatgcaccaaaggaaggcagagatggcaaggcagtctgatgccttcatagccctacctggagggtacgggactctggaggagctgctcgaggtgattacatgggcacagcttggcatccatcataagccggttgggctgctcaacgtcgacgggtactacaactcgctgctgacgttcatcgacaaggcggtggaggaagggttcatcaacaccagcgcgcggcggatcatcgtcatggcgccgacggcggaggagctgatggacaagctagaggagtacgtgccttaccacgacagggtggcatcgaagctgaactgggagatgggccacctaggttactgacgtactcacttacagctgcagcaaattgccagacagcaatggcgatcgatcgatcagaagacgtaggaggaggaggaagaagaagaagaagaatcaagtcgatcgactcatcatcaagaagctgggaaagatttggttgatgcagctagaaagccaagaacgagagtgtggcgtgcgtgcgtccattttgtatatgtttgcttcgatcaggggcagcttgaatactgtagtaacttggatgcttgatgtcctcttgatcttctacctagctaccgagataagaactagtagtagtagtagtagtagtagtagtagtagtagtagtagtagtagtagtagtagtagtattccagtagcgtatgtatgtcagtaattttcaagatatccagattcgattgaccacagcaaagttgtttttgtatcaccctcgtaatgcaatgtgtgtaactaagcgttgagaggctgactcattgatctgactgaggtctgaattggattggttccaaaatc

SEQ ID NO: 11458 - DNA, 1407 bp, Oryza sativa
  ref <308>: DATABASE ACCESSION NUMBER: AK108806
  ref <309>: DATABASE ENTRY DATE: 2002-08-28
atatccagacttccagaaggaaatttaaataatgatgcagccttatctagtgaaaagacggggaatgtgggtccttgcagtagcattgcacatcgtaatgaaaagccccctgatgaactacagagcagtggactgcctgctaacagtaagactggaacccaatcagggaaatctcctaatgaagaagtgtccagtgtattagtttcaggcagtgcggattcaacaaatgataccttgcatgagcagaaatctcatgaaatttctggggaaaaatgctcagacaactcttctattgttgcttctgaagcaaatatcaagtcaaaagcagactctgagctcatttcgggcagagatgtggaaatggttgataatgatataccaccaaaggatcaaaccaacaacattgccactgaggacaaacccagtactcaagaaacctctgaagcacataaaatggtagttgtggaggtgagcgccaatactggaatacaaataagccagggtgacagtgctggcactgaagagaatctccacactgaagtaacttctgttccacacatgatcaatgatgtggcaatggctaccaatgctggaacaccaatatgtccaagcaacaacgttgccattgaagaaaagcccaagtctactgtaatttccgaggtatgtacaaccaaagatacggaaatgactactgatgccactttagatcaaaacaccaatgttgctacagaagaaattcctttgcctgaatcaatttctgcaactgaggatgctgacatgactactgatactggaataccaacaaatcaaagacaggaagtaaatggattggctgaaaatggcagaaaagaacatcccctgggagaaacagataaacacaaatctgaccatagtacgatgcctgatatgtctacagccccacagataacatcaaatggagttatgcattcaaaagatgaagctgcatgtggccatgaaggtgaaattgtggacatcagtgcagcagcaacagaggaaaacaattagattcagatatagtagattgcatccaattccatttgcagacgcgatcgtgatgaagccacctgtagttcggttagtgccaagcgtagcttcagtgattaaccatgctgtcaacattcttttggaccagtcaccataagttcatcatgtgctgccggccatttcccatgagtgcttacttcctactggacttgctggaatcaatgtagcgcgcatgaaggatgttgttaccttaccgtagttccttcggctatcactcctagctatatttagtttctttacctgtcttgtcttcctctgcgctgatcttataaaggctgtaattacataggatttggttgagtgactcataggttctgtcgtaatgatatgattttttaccgt

SEQ ID NO: 11459 - DNA, 1465 bp, Oryza sativa
  ref <308>: DATABASE ACCESSION NUMBER: AK108807
  ref <309>: DATABASE ENTRY DATE: 2002-08-28
aaatcaaaacaaatcgcccgtgcttctctctcccctcctcttacccttccattggctccctgggttgagctcggcggcggcgcaatggcgtgccacctgctgctcgtcgccgtcgtcgccggcttcgccgtgagcctcgccggtgcgacggaccatatcgtcggcgctaaccacggctggaacccaaacatcgactactccctctggtccggcaaccagaccttctacgtcggcgacctcatctcgttcaggtaccagaaggggacgcacaacgtgttcgaggtgaaccagacggggtacgacaactgcaccatggccggggtcgccggcaactggacctccggcaaggacttcatcccgctcaacgactcacgccgctactacttcatctgcggcaacggcttctgccaggccggcatgaaggtcgccatcaccgtccacccgctgaagcacaatgccaccggcgacggcgccaagaaccacggcggcgacggagccgcacaggaggccgccgctgccgccatgccgggcgccgccgtgtggatggcagtgctcgccgtggccgccgcagctgtcgccatattgccatgattaattaatctctgcacttgtgcttggaagaactcaagaacattggcacattgtgtgttttgctcgcatttttatcagggacttgattaatgtagcaccaaaatcagatttatattcaagtattaattcagcaagaatattggttcatgatagagcatcaggattcaggaaaaaatttccaggcggagaaagcagcgacaggatggagcattggaaaattcatgcatttcacacaacccagttcgattaagcaacatggcatgtattacaggttgtggtgcaagaaaaagatgctagttgaaagaaagaacaaaccctatagtgactgtagaatagaatcccttttcttatatacaccacttactatcctttttgtctatcaccggttggaactccatggttcggtctcggcctgctacttgtttggatcgcttgggccatcatcaagctcgctgttcacaaaggtaagggctcaaattctgaaaggggaactcaggcttttacaatgcgagatttcgtgatctggaatatggtttaggtgcgacggttaaaggaagctcactttggtcgcatctcttctgaagagacagattgatttgtgcttgaagtagcagctgacttgcttggcttcttgaatttgactatgatcactgtcatattatcacagccatcaccaccggatacaggtgccaagcaatggtcaagcaacttctcgcagacagcagataggctatcctcctgtagttgttttcccagtaaattaggaaaccataacataagcatattgcaaaacacaacactatgaactatatatttttagtgcataatgtaaattctgtgaatatcagttgcttacagtgttcatttctttgtg

SEQ ID NO: 11460 - DNA, 3427 bp, Oryza sativa
  ref <308>: DATABASE ACCESSION NUMBER: AK108808
  ref <309>: DATABASE ENTRY DATE: 2002-08-28
acgcacggataaagcggccttggccgcaccaccgaccggcgaccacaaagcccaagcccgtaacccccttcgataccgcctctcgcggcaccgccgcgccgccgccgcaaacgaggctacggaggccgaggccatggcggcgagcgatgatggccagctcaggacgtgggtctccgaccgcctcatggcgctcctcggatactcccagggcctcgtggcgcggcttgtcgtccgcctcgcgcgggagtgcgcctccgcgggtgacctcgcggcgcggctcgtcgacctcgccgggttcccgccttcccccgacaccgccgcgttcgccgaggacgtgtacgggagggtgccccgcagttgcggcggcggcggcgacgacgccggggtcagcgagtaccagaggcagatgcaggaggctgcggcgatggccaagaagcagagcaccatcaagctgctcgacgacgacggcgagatcggcgtttccgcgtcgccctccagcggcggcaggaagcgtttcaggaggaaggccgtgggcgaagacgatgacgatgccggacggaacgcgcgacggcggcgtagcccggacgacgaggaggaggacggcgacgccggcgaggaagaagagatggagcgggatcagatcgagagggcgcagctcgagcggaacatcagggagcgcgacgcggcgagcacgaggaggctgacggatcggaagacgaccaagcgggagcagggcgagctcgcgcgccggtcggacgccatggacaagaacgacacctcggggctcaggaggctctcccggcgcgcgtacctgcagaggcggaaggagaagaaggtcgaggagatgcgcgacgagatcgtcgaccacgagttcctcttccccggcgtccagctgacggccgccgaggagagggacatgaggcacaagaagcaagtctacggcctcgtgcacgatcgcgacgactactacagaatgccggacgcctacgacgccgccgcgaacgtcgatcaggagaagaggttctcggtggcgcggcggcggtacgaggagccagctgaggcggcgagggacggcaagacggcgaacgccttgtccgagcaggaggcctgggaggagcagcagatacggaagtcgaggctgcagttcggatccatggatcgcggccggcgcggcgacgagtacgagctcctgttcgacgacggcgtcgagttcgtcaggtcgacggtgatggcgggcaccgcgcctgcagacgacgacgacacggcggcggcggcggcggccgacgagtaccatgccgaggccatggatgccaaggccacgttgcaagacgagaggaagactctcccggcgtacaagctcaaggacgacctgctcaaggccatcgacgagcacaaggtcctgatcgtcgtcggcgagaccggctccggcaagacgacgcagataccgcagtacctccacgaggtcgggtacacggcgggggggaggaagaaggtggcgtgcacgcagccgcggcgcgtggcggcgatgagcgtggcggcgagggtggcggaggagatgggcgtcaagctcgggcacgaggtcggctactccatccggttcgaggactgcacgtcggagaagacggtgatcaagtacatgaccgacgggatgctcctccgcgagttcctcagcgagcccgacctgggcagctacagcgtcgtcgtcgtcgacgaggcccacgagcggacgctcgccaccgacatcctcttcggcctcgtcaaggacatcgcccgcctccgccctgacatgaagctgctcatctccagcgcgacgctcaacgccgacaagttcagcgacttcttcgacgcggcgcccgtcttccggatccccgggcggcggttcgaggtgggcatccactacaccgtggcgccggaggcggactacatcgacgccgccgtcgtgacggtgctgcagctgcacgtcacggagccccccggcggcggcgacatcctgctgttcctcacggggcaggaggagatcgagacggtggaggagatcctgaggcatcggctgcgggtgctcggcggcaaggtggcggagctggtgatctgccccatctacgccaacctccccgccgagctgcaggccaagatcttcgagccggcgccggcgggcgcgcgcaaggtggtgctcgccaccaacatcgccgagacgtcgctgaccatcgacgggatcaagtacgtggtcgacccggggttctgcaaggtgaagtcgtacaacccgcgcaccgggatggagtcgctgttggtggcgccggtgtcgagggcgtcggcggagcagcgcgccggccggtcggggcgcaccgggccgggcgagtgcttccggctctacacggagtacaacttcgtcagcgacctcgacgacgacgcggtgccggagatccagcggagcaacctcgccagcgtcgtgctggcgctcaaggcgctcgggatcaacgacctcgtcggcttcgacttcatggacccgccgccggcggagtcgctgctcagggcgctggaggagctcttcgccctcggcgcgctcaacagccgcggcgagctcaccaagaccgggaggaggatggcggagttccccctggaccccatgctctccaaggccatcgtcgcgtcggagaggtacgggtgctccgaggaggtgatcaccatcgcggccatgctgtccgccgggaacgccgtcttctaccgcccaagggacaagcgggtccacgccgacgccgcacggcgggcgttccacgccggcaacgccggcgaccacgtcgcgctgctcaacgtgtacaacgcgtgggcggagtccggctactcgccgcagtggtgccgcgagagcttcgtgcagcaccgcaccatgcggcgcgcgcgggacgtgcgggaccagctgggggcgctgcttgagcgggtggagatcgcgccgtgctcctccgccggcggcggcgacctcgacgcggtcaggaaggcggtcacggcgggctacttccgccacgctgcgcggctgcagagggacgggtcgtaccgcgccgtgaagagccggcagacggtgttcgtccacccgagctccggggtggcgcaggcgccgccgcggtgggcgttgtaccacgagctggtgctcacgaccaaggagtacatgaggcaggtgacggagctcaagccggagtggccggtggagatcgcgccgcactactacgagcgcaaggacgtcgacgagcctgagcccaagaagacggcggcggcgactacgccgcaagagcagacgacggccggctctacaccaacgaagcagactccgaatctgaatagtttcttcgacgtgtaaagagtgccattggaacttgtaaatagctgtaattataccaaaccaacaagtgaaaagttcaagacaatttgtttgttgctc

SEQ ID NO: 11461 - DNA, 2726 bp, Oryza sativa
  ref <308>: DATABASE ACCESSION NUMBER: AK108809
  ref <309>: DATABASE ENTRY DATE: 2002-08-28
acattctggggttggtcatctgatcttgcaccagttgtcgtcacaatggcactcaaggcagcacagaagcagaccgtggccactggcaaggcccagggtgcccgtgtggtcgctccacgcgtgatcaagggctcccgcatggcgcgtgtggtcgttcaggcccgcgccagcagcaccatgcaagcccctctggtggcacgccggggagccacacacgtttctcgcagcaggagcaacctggtggtgtacgctgtcaaggacggagcctccctgggtgaccgcaagctgcgtgtggcagtgattggagggggtcccagcggtgcctgcgctgcagagaccctggcaaagggcggtgtggaggcttacctcattgagcgtaagctggacaactgcaagccatgtggtggtgccatccccctgtgcatggtccaggagtttgacctgccacaggagatcattgaccgcaaggtgaccaagatgaagatgatcagccccagcaatagggaggtggatgtgggcaggaccctcagcgagacagagtacatcggaatgtgcaggcgtgaggtgatggacgcctacctgcgtgaccgtgctgagaagctgggcgccaatgtcgtcaacggcctcatgatgaggatggagcagccagaggctgacggccccatcaccatccactacaacggatatactgatggcagcaagatcggcaccccacagacccttgaggttgacatggtgatcggtgctaacggtgcaaacagccgtgttgccaaggagattgatgccggcgagtacgactacgccattgccttccaggagcgcatccgcatcccagatgacaagatgaagcactatgagaatctggctgagatgtacgtgggcgatgatgtgtccccagacttctacggctgggtgttccccaagtacgaccacgtggcagttggcacaggcacagtcgtgaacaagaccgccatcaagcagtaccagcaggccacccgcgaccgctcaaaggtgaagactgagggcggcaagatcatcagggttgaggcccatcccatcccggagcacccccggccccgccgctgcaagggccgtattgccctggtgggtgatgctgctggttacgtcaccaagtgctcaggcgagggcatctacttcgcagccaagtctggccgcatgtgtgctgaggccatcgtggaggccagcgagaacggcaagaagatgtgcggggagtcagccatccgcaactacctggacaagtgggaccgcaagtactgggccacatacaaggtgctggacatcctgcagaaggtgttctaccgcagcaacccagctcgcgaggcctttgtggagatgtgcgaggacagctacgtgcagaagatgacctttgacagctatctgtacaagactgtcgtgccaggcaacccactggacgatgtgaagctgctggtgaacacagtggcctccattgtgagagcaaacgcactccgtgccgcagacagcaagtctgtcgatgttaactttggcagcaaggcaacagaggagttccaggcacgtgccactgcataagcagctggtgtgctcttcatttgcgcttgccagctggcaacgacactgtcacttgccagcatgcagcgatgcactgcttgacaatgtgcagcggatgtgttgcgtgtttgcattgccagttggcagcctttgtgtggcaggctggcagcagcagggcggttttgcttctgctgctgcggctcttctcaagcagctaggaacagcagcagtggctgcaggccaaacctcttggaccggtcagcaagtggttaggcacgtgtatagctgcttttgttgcttggcataggtgtgtgcagctgtgtagctgcatgcagcagggcagcggcagcacgcacagtaaatgtgcaactgcgaaaccgcaaccagactgctgctccttggtgccagagtttgtaagtttgcttgtgcatagcagcagcagtttcgcaggttggggtcgctgggacatgatgatactactaaactagccaagacgaaaactggctgtttgtagggtggcgggatgcgcctgcaggggtcaatattattaggggttcagggttcacagtgggctcactcgactcaagtgactagctctggctggtgcagcattgtttactgggctgagtgcttcctctgtaaaagagcataggcacatgcagtctgtgctgtgtaggccttctctgtgccacaaattgctgtgcagcaggctctggatgtatgtcagcagtgagcatgcccgtgctgcacgggttcattccagcagattggtgttgaagcagctgtagcagctgcaatgcagtgcgcggcagcttgttactgcagcagatgcatcttgcaggcatgagtggacagcacatacaactgatcagcaactgccttttcacgcagagaagaagaaggaggagtttgcatcttggtgatgacatgtacagtcagcctgaatggtgggccaccaatacggtgaccatgcagtgtttcgtgctgtttctcttgaaaaccaatggcacatgcagtgtacaatgcacaggctgtctcagggctgttgctgtgcattgcgtgacagcggggtgcacccattgtgggtggtgacttgcagttaatacactcctggtttctttggtgcccagcgcaagtacacttgtggttgcagcttggttgctggtaaagaagacaag

SEQ ID NO: 11462 - DNA, 1169 bp, Oryza sativa
  ref <308>: DATABASE ACCESSION NUMBER: AK108810
  ref <309>: DATABASE ENTRY DATE: 2002-08-28
tttttgtagctgctcgctgcgacgagtgcggcaagcgccctcgccgcggcgtccctcttggcgacgtccctgcctgccttggccttgagcatccagatgaggcgcgggacggcgtcgccgacgtccccgcgtgtctggccgtggctggaggcgttgcagagttcggcgagcgccatggcggccaacgtgcgcatggcggccttgtcgctgctcagtgcggcgaggacgtggtcgacgaagctggccgagacggctatctcggcgatgtagcggaaggaggccatgttgcggaggaggccgaacgcgcgcggggtgccgagggagacgagctagatgagtgacgggagcacgccctcctcgcggaacatcgggaggaggtccgggaacgcggcgaggttgcggagcacgcccgcggccgcggcctgcgccgaggagagcggccagcccgccacgcgcggccacggccgctgcggcgtcccgcgagtccgtggtgagagggcgcagcgccacgaacgcctgctcggtgtcggcgccgccggactccagcgcgtggcagaggtggggcaccacggcccccgccacctacgccaagaaccagcacgtgggccgtggcgtccgaggacgcgaacgcggcgagcacggacacgaccttctcgcgtgacgccggcaggatctctcccgagtcaagcatcgcggccacggtggacaccgtgccgccgctgccggcggcagtgacccgacgaagtcaacgagcgtgggatcagcccatccgcccctaccaccaccccttcacccccaccgttcccgggcgacacgagcagccgcgcgtcggcggcgaattgggacagctcggtagccgaggacgacagtagcgacatggtgtggaggtgcccgaggttgttcgcggcgccgttcgcggcgacggacacgtgcgcggagagtgcggaggtgagggggcggaggaggagcggcgcggagtgcgggaatgcagggtgggagagcgacgccgagatggtcggcgtgttcccgcggtcatgacacgcgtgctgctcctctccttgccggccgccgccctcgcacgcgcgctgctcctctcctcccgccggctggcgcccgcgcacgcacgctgtcgctggaaacctgtgaggaaggagagaaaagatggagag

SEQ ID NO: 11463 - DNA, 1198 bp, Oryza sativa
  ref <308>: DATABASE ACCESSION NUMBER: AK108811
  ref <309>: DATABASE ENTRY DATE: 2002-08-28
gtgcaccatcattagccaatttctccctagctcgtcctggtggtactggtagcggccgttttagctagctagttggattcgtatatactttgatccatctctacagagaattgcgaagatacctgccactagcaagctacgctgagtcgctgatatactgattagggggtgaaaatatctggagaacaagctttaactaattcagctatggtgagctcgagctttcctgcggagatcatccaccctgcccgcctgggttgcatgctgaggctgcacgtggtggagcatcccaccggcgacgccgccgcggtcgccttccagtgcgacggctgcatgctacccggagaaggcacgaggtacacctccgtcgtcgacaaccacccgacacacctcgccctccacacgagctgcgccctcgcgacgcccacgctgcagcacgcgctggtgaagggcacgatggagctccgccacgaggcccccgccggcggcgccggcgtttgctccgcctgcttcgagacggtgcggggattccactactacgggtcgaggaagaccggcaagggcgagcacccgaagctgcacccgtgctgcgcgaggctgccggtgtccatcgccgtgcggggcgggctcaccttcgagcttcgcgcggaggtgtcgcaccggtgcaccggctgcagggcgatggagtggtactaccgcccttggtgctaccgctccactaatagccccgaccaccgcgtgtacctgcacgtcaagtgcatcagggagatcatggaatctccgggcggcggcggaggcggaggcgccggtgatgaagacgacagggtggtggcccgtctactggagcgcgctgaccagagcagtaagctggagaggcgcgtatgtaagatccttgtgatcttggtgcgtgtcgtcgtcaggatgctcatcggagacccgaccgcgttgttgacagaaggagtgagcgctatcgtgtctccatggtgatgctgtatatatatagcccgcgaacgcctagctagcttaaggccgtatatatgtgctcgttttcttcgtgtgatctaagtagtagtacgtactactccataaagttatttttgacaacgtagaatatatatggtatcgttttacacttcatcttcatggtggaaagctattttaaatctacaaatatatatgggactgccgcctatacatc

SEQ ID NO: 11464 - DNA, 1747 bp, Oryza sativa
  ref <308>: DATABASE ACCESSION NUMBER: AK108812
  ref <309>: DATABASE ENTRY DATE: 2002-08-28
ctcttcctcccaaattcccccacggctgctcaattcctccttcgttaataggcattgacgtcgactccccatccgcgccttctcctcctacacgcgcgtgctctctgttgggactgtataccttttaataccccttcgcttttgctgccgcttctttctcttgctcaaaagcatcttcaccaccataccggagcccgccaccagcgcgaatcctcttaatacttatcccacttaccctctgccttcgcatctctcatacatcgtcgaccatgccatccatgctcaaggtcgcccttccggctctggctgcggccagcactgcctatgccgcctgcagcgcgtctgctaccaccacaatccagaacgccggtgacgcgaccgccctcgcatcctgctcaaccttctctggcagcatcgccattgccaccggcaccacagacgacattgctctcaacggcattaagaagctcaccggcaacttggtcgctaccgagaacgagaacatcaagcgcatcagtgctaacgaccttgagacgcttgatggagagctccagctagacggcctcgtccgcctgtacggtgtcgacttccccaagcttaagaccgtcgactcgatcaagtggaatgccctgcccaacttgcagaacatcggattcaccgccgaggttgagcaagcctccaaggtccgcatcgagaacaccggtcttcgctcgctgaagggtatcaacattgaggaggttgagaccatcttcatcgccaacaatgcctacattgacgaaatcgccatgcaattgggcaacgtctccgagtccctcgactttgtcaacaacaacgagaatgtcaagatcgagctgaccaacctcatctgggccaagaacttgactttccgtttctgtggatcagtctcaatgccttcgctcgagacctgcaatggttctctcggtctctacaacaacggcttcgagcagttctctgcacccaacctcactgaagttggtgaagcccttgccctcgtcgccaacgacaacctcaacaacattaccttccccaagctcgagaagattgctggcaccctccagatcgccaacaacaccaacctcaaggaagtcactggattccccgagctcactcgtgtcgaggcttctttcgacgtaagcggaaacatgtctgacatcgagacacccaagcttgatttcgtcaagggaacttgcaacatccagtcttctgagaatgtttccgagtcatgcggatactacaagagcctcaaggagaagaagctcatccagggcaagctcttctgcaaaggacaactcgatgacccaggcatggaaggccacaaccctaccagcagcaatggcgacaacaaggacaatgccgctacggcaggcgccgtgaacgttgcccttggccttgccgctctggctgccatcatgctcttctagaatgttattgatccaggcgttttcaccatgattgcatagactaatccaaccgacctgatctcctcttcgttagcatatctgacagcagcccaaaactgctagattacagacgttcggcatttttgaggccaggagttatcatggcacagggtaatgggccagcatgcaccacattgtacgtatcacttggctgtcagagccgaggtagtgtttccctctcacaaagtacacatagcctgcactgcagcactgttatagatatgcagcatggcttcgatatggggttggaataattatatgccacc

SEQ ID NO: 11465 - DNA, 1176 bp, Oryza sativa
  ref <308>: DATABASE ACCESSION NUMBER: AK108813
  ref <309>: DATABASE ENTRY DATE: 2002-08-28
aacatactcggccccctcttccgcattcccctctatccaggtaccagcgagtcaggggtcgctttgtacctgttagcatcccggcttccagcatcgcaacctcaaacccgtcgcaaggaacagctgttgggagcaatagcggcgaggcaagcagggagtccaagtactttgcgtaatagtagacgagttcgcgataaatccaaagcaacaacgcgccgtccacgcagcaacacacatctgcgcctctctgctttatccacctatctacctaacctacctagccaccctggtcaagtgcgcaaaccccactgcagacagcagcaacaaaaaataaaataaaagaaagacgaaataaaacgtcgaggaaaaaaaaaggacgcatacaccatacgcacgcatactacaaaccaaacccgaagccatgtccttcatccaagatctctgggagtccatcttcacgccgggcccgaccccgtcgctgctgatcgcgaccaacgtcactttcgcggcgctgcaggccgtgctcctggcgctcctggtcgcgacctacagcattcacttcctgatcctgtcaggcctctgtggcggtctgtggtgggccatcaactggttcgcgcgcgagctcaaggaggcccagaggcgcgaggaacaggacaaggccaagcgcggcggcgcctccggacctcgttccgccgcgcccgcaaccccgtccgataccgagaccgaggtcgagaccgtggccgcgcatggaacaacagcagtaaaagcagcagcggcaagcagcgaggtcgagcccgtcgaacaaacgggtgagctgaagcaccgcgctgccgccgttgccgagccgtttgcttcatccgctccaagcaccaggtcgggtgtaagcaccgaggacgagtgggagaagttgtcggagaacgagcacgagaaggaccgctaaagatgacgtggaggaagtgcttgtttgtcagttttaagtgtggctcttgtcccggcgctcggactgtcaagcgttcattttgtactggtggaattagatggaagagagctcgctcggcgggatcgccgcctttctgtatcgacccatcgcagtcacattctttcgagccgccgcggtggtcattgcaacaggacatggcacgcgcatatctgtacagatttagacaccatgcgcac

SEQ ID NO: 11466 - DNA, 4300 bp, Oryza sativa
  ref <308>: DATABASE ACCESSION NUMBER: AK108814
  ref <309>: DATABASE ENTRY DATE: 2002-08-28
aacttgccgccccattgaccaagcctttcgttgctcgtgcaactgagcctctgctccagggctgtcctgttttgtctttcactcgtttggccagtccaccaccatcgttctttccgcactctcgttcactggcgatgcttcctgccgtcactcgctgaatcacgcacacgacaacaccgcaccaccccccgttccccataatcataacctgctgcccccagggccgacgcccacagcccggccgcgcacgcccccggactatcgctagggaagcgctctcgcggctgttgcagctacacaggagctgcgacgtctattctttagggcctagggagggagccgccgccgtctccgtaccacccacgcccgctgcattcctcgcaccacagtaatgtctctcccacggcgacccgacgactcctcgcgaggcagccgagacaaccgccatgtctttcgcgagtcgacctcgcgccgccgccggacctccgacctcgagaacacgcgctcccacgaccgctccaacagcaagagcggtgcccaagcacacgcccgaccgctcccctccccgggcacaccggtgcccatggagcgcgaccccatcatgcgcagccagaacgcgacgcccgcccaggacctgggcaggaagcgcagtctgatccgtcccgagcggcagcgaatggacccgagccatcccaactatcactatcgtaaacacgcccagcgaatgaatgtgcagccctcgaccaccggcaatgaccctatcctggaagaccacatggaggccgagacggtcagctcagacagcaccgacctcaagccaccacatctgcgcaatgcctctggcggcggctacaacgacaagcaagcccctttggacgatgacgccccgcacatgcagcgtcgcttgactcggagcaagaccgccgaagcccgcgagaagcagcgccagaaggagaacgacaagctacgaccgccgagtctgtggaatgtgtactgcgccatcatcaccttctggtgtcctgacgccatcttgaggtgctttggcaagcctgcgaaggcccaacaacgcgcctggagggagaaggttggtcttgtcagcatcatcttgatgatttgtacctttgtcggatacctcacttttggtttcactgagacagtttgcccgtctggcggcaacatgcgcatgcaggccaacaaggttgataacggctccttgatcattcacggcaaggcatacgcattagctgagtcgaagcatcctcccgcgcgcaacattctctccggcgccaatgccttgttcgatcttcccgagaaatacggaggcatggacgccagctttctgttccagaacgtcaacggagcgtgcaaaggactcatcaagcccaaggacggagctgatattcccaactccaatggcaatatggcctggtatttcccttgccgtctctacaaccaggacggctccagcaaacccaacactacctttgaggagtacaatggctacatgtgccatacttccgatgcggcccgccgcgcatactacggtctcaaggatgcaggtgacgtgtactttacttgggacgacattcgcaacagctcccgcaaccttatggtctggggtggtgatgtcttggatctcaatctgctcgattggttcaaccgcacccaggtcgaaattcctccaatcttcgaccagatcaaggtcaaccccgcagtccgtggcgttgatgttacccgtgcctactcgtcgagctatgagaagcaggtagctcgctgtttcaccgagaccatcaaggttggatccattgacaccgagagcattggctgcatcgcctctaaggtggtgctgtacatgtctctcgttttcatcttagctgttgtcgtggccaaatttgttctcgctttggccttccagtggttcatcagcagaaagttcggtgctgctaagacgtctgtgggcaaaatggactcgaagcagcgcaagcaacagattgaggaatggagtgatgatatctatcgtcctccgccaaagctcagtgatccagctgccggctccgaccgctcgagcaagcgaggtagcactttcttgccgtccacgtcgagattcaccagcccctactctgtcgataagaccgcaaagacccgagctccccctaccaccatgacaagtcaaagtaacacgtctcgactcctttcttccaatactggcatgtaccgtcaattgaacaacagccagggtacgatgcccactttcgatggtaagcactcgatgcagcaatctgttcaggaatcgaggacaagtctccttctttctggcaacacggactcaaaccggtattcgagcatggttggaggagatggccccggacctgctggcttcatccacgaagctgtcgtccctcagcctccaccagaatggcagccctttggatatcccctggcccattccatctgcctggtcacagcgtactctgaaggtgctgacggcatccgaacgacaatcgactcgatcgctactacggattaccccaacagtcacaaattgattttggtcatctgtgatggtattatcaagggtaaaggcgaagacctctcaacgcccgagatctgtcttggtatgatgaaggatcacgcagttcttcctcacgaagtgcaagccttttcctacgttgcggtcgccagtggctccaagcgacacaacatggccaagatctactctggcttctacgactatggcgagaactcgcgcatccccattgacaagcagcagcgcgttcccatgatggtcgtcgtcaagtgtggaacaccggatgaagcacgcaaatccaagcccggtaaccgtggaaagcgagacagtcaaatcatcctgatgtcattcctgcagaaggtcatgttcgacgagcgtatgacagagctcgagttcgagatgttcaacggcatttggaagattactgggatttctcccgactactacgagattgtgctcatggtggacgctgataccaaggtattccctgacagcttgacccacatgatctctgccatggtcaaggaccccgagatcatgggtttgtgtggtgaaacaaagattgccaacaaacgcgattcttgggtgtcgatgatccaagttttcgaatacttcatttcgcatcacttggccaagtcgttcgaatcggtctttggtggtgtcacctgtcttcctggctgtttctgcatgtaccgcatcaaagccccgaagggcggtcaaaactactgggttccgattctggccaatcccgacgttgtagagcactactccgagaacgtggtcgacacattgcacaagaagaaccttctacttttgggtgaagatcgctacctgtcgacgcttatgctgaagacattccccaaacgcaagcaagtctttgtgccccaagctgtctgcaaaaccactgtacccgacgagttcaaggtccttttgtcgcagcgtaggcgatggatcaatagtactgtccacaacttgatggaactggtgctagtacgagatctctgtggcaccttctgtttcagcatgcagtttgttgtgttcatcgagctgatcggaacgctcgtcttgccggccgctattgccttcaccttctatctaattgccatcgccatcaaggccgccatcctacacacagcagcccctgtcatacccctcgtgcttcttgcgctgatcttgggtttgccagctgtcctgattgtggtcaccgcccatcgatggtcttatatcgcctggatgtttgtctacttgctttcgcttcccgtctggaatttcgtgctcccgacttacgcgttctggaaattcgatgatttcagctggggcgacacacggaagacggctggagagaagacaaagaaggctggtcttgaatacgagggcgagtttgacagcagcaagattaccatgaggagatggcacgactttgagcaagaacgaagactaaaggctccaagtggaggattttcgcagcagccaacgtctgctgggggatggccgcagcagcagcagcaaggatacgacccgtactacgacaattgattttgcattgtggcgccgcataggaagagaagccgatgcgctgtctaagtggcgagctaagagattgcattttgtaccacgtctctcgtattgcattgctgggggtcctggagtctattcatcatatactttattgttaggtcatctctagggacttgtcatgggatggcgagaatgcgtgttgcatagacgccgtgtagactattggcattaataattcaaaattacgacctcttc

SEQ ID NO: 11467 - DNA, 1654 bp, Oryza sativa
  ref <308>: DATABASE ACCESSION NUMBER: AK108815
  ref <309>: DATABASE ENTRY DATE: 2002-08-28
acccaccaccattgcttccctcgacgaccaccaccaaggcccaggcccaaagcccaagcccaagcccacgcacacgcacagccccgaagctgaagccccccgacgacgatggccgccgccgacccgccgccgccgcccaccgggatgggcttcctcggcctcctcagcttccgccgcagcgccaccgccgtcgcctcctttgaccccgcgcaggacgacgagctgcaggtcctccacgccctccaggcccacgtcgccgaccgcctcgccgccctctcccatcacccgccgctcctctccctcgccttcctctccaagctgctcgacgcggtgctctcctccgacgacgccttccgcgaggttctcggcatcggccccgtcgccgccgcgctctccaggccgcccgccgaccgcctcgccgctgacctcctcgaccgcaccgtcaagacgctcgacatactcaacgccgtctccctcacgctcgcctcgctccggggctcgcaccgcgccgcgctcaccgccgcctcgtgcctcctcgccccgccgctgcaccgcgcccacttcggccgcgcgcgccgggccatctccaggctgttccccgacgccgccaagctcgccgccgcgccgtccccctcgtgcagggccggccccgcgcgcgcgctgtccttcagcgtctccaggaactggtcctccggccgccacgtccacgccatggcggcgcacctcgcgccgccgccgcagtcgcccacgtccgcctcccccggcgcgggttgcgggctggggctggcgctctacaccatgagctcggtgctcgtcttctccatgtgggcgctggtcgcggcggtgccgtgccaggaccggtcgtccgcggccaccaaccccccggtggcgccgccgaagcaggtgcagtgggcggccccgatgtgtgctctccaggagcggatcgccgacgagtggaggaaaaaggacaagaaggggtcgtcgtcggggtcggcggcggcgacggggctcctcgccgagatgcaggctgtggagcgcgccgcgcgggagctgagcagtctcctcgaggaagtcgcggaggaggaggaggaagagcagctggtgatgggcgcgaccgatgagcgcgcgcgtgacgtggtcgagcgcgccgaggcgctcgccgccgcgtgccgggctctggaggagggcctcgcgccgctggagcggcaggtgcgcgccgtgttccaccgcgtggtggccagccgcggcgaggtggtgcgcatcatggagcacagcacgcgcagcaacagcagcgccaccgccagcgccgcggcggcggcggcgtccggctccggcgcgccgcctcaccaccattccttctgaggtttccttccgtggagggaaacccacgatggtagttggctgttgatttgatttaattaggaggatgataaaaaaaaatctctctttttcccctttctgtactctaccattctttgatttttatgtgctgctgctgctgcctttgtgatcctgtgaagtgtacatttgcttgtaaaaactaactttttgttgggttagtgtgtattgctgttcaatctttgtgctgaagagcaagcaaaaaaaaatgttgttgaaactagtgaaggaatgcagaaattgtaaatttcagacg

SEQ ID NO: 11468 - DNA, 1503 bp, Oryza sativa
  ref <308>: DATABASE ACCESSION NUMBER: AK108816
  ref <309>: DATABASE ENTRY DATE: 2002-08-28
gaagcgaaaaaccgagtttgtatactcgataaattaagcaaacatgcgcgttgcaacggtcgtgttggccgtcgcagtgatggcggccgccgctgcggcgatgcgttcggtggagattaaacacgaaagtgagtacccgttcgagcgctatgtgcgcgatttcggcaaaaactacgatgcgcacgagtacgtgcgtgcgttcaagacgtacagcgagaatgtggcgaagatcgcgcgccacaacgcggacgcgcgtcagacgtaccgtaagggcgtgaataagttcacggatatggacgcagccgcgcgcaagcgcttcctcggcttctccatggccaagaagctgtcggactacgtggaggcgcgtgcgcccaccaccgaagaggtgccggccgttccgctcgaggcgctgcccaaatccgttgattggcgcaacaaaaagaacccgtccgttatcacacccgtcaaggaccaggcatcctgtggttcgtgttgggcgcacgctgcgacggagcaggtggagtacgctgtggccatcgccacgaacacgctctcgccgctgtcgcgtcagaacatcgtcgattgcgcgccgaatccggaccactgcggcggtaccggcggctgtgagggcgccaccgcggagctgggctttgcgtacgtcaaggacaagggtatggcgtcggaggctgcgtacccgtacacgggtatggacggcacctgcgacgagtcgatcccgaagtccggtcaggtcaatggctgggttgtgctgccgagcaacaactacacggctgtggtgacggccgttgccaacgtcgcgccgctcgccatcaccgtcgccgccgacacgtggttcgactactcatcgggcgtgttcacgggctgcggcaccgacacggacctgaaccacgccgtgcagctcgtcggttacggcacgcagggctctcaggactactggattgtgcgcaactcgtggtcggcgggttggggtgaggccggttacatccgcattctcaaacacagcgatggctcgtcgcagtggtgcggaatcgacaccactcccggcgacggcacgggctgtgagaacggcccgtcacaggtgacggtgtgcgggtcgtgcgggatcctttacgatgtttgctgggcgactggcggcagcattccgcagttctaagcgaacccgattttcgctgtgtgcgtgaccgacgcgggtcggtggtgcgcgacgccgttccgtgaaagcgttcggcgccgcgcaattgcgtccgcactgcggtgcggctcatcagagccgccggtgtgatgcgcgccgcgcccgtgtcccgccacttccccctacgcgtcccaatgctccgtttgtgccgccgtcgcgtatgcgaaagtctgtgcgttggtgtgcgtcgaattgttgattgcatgtactgcctctgattcggcgcttccgcctgcgcacttcgcgtttcgcatccgatgcttttgggacgtaataaatcgtgtgcctttcgt

SEQ ID NO: 11469 - DNA, 917 bp, Oryza sativa
  ref <308>: DATABASE ACCESSION NUMBER: AK108817
  ref <309>: DATABASE ENTRY DATE: 2002-08-28
atcgcagatcaacacaagcattcacttccaatcaccactcactcggtcttctaataccactctcactcaaccaatcaatctttcaagatgcattccaagttcatcgctcttgcgctcccagcccttgctgctgcctacccccagtctggcagctcgcccaaccctgatgacatccagattgtcagcaccacctactctggcaacggttgccctcagggctccgtctctacctccagctccgaggacaagactgtcattacttatggcttcgatcaattccagacgtacattggccccaacatcgcctcgtccgagaagtccaagaactgccagcttcacttgaacctcaagtaccccggcggcttccagtacgccgtcgtcgacgccacctatcacggctgggcgcgcatggacgctggtgttaccggcagcttcatcaccacctactacttctcccaggatgccggcaagacgcaaaccacccgctccagcttcaccggcggcggcaagctcatcgacggccaagtctacaccaagcaggacagcgtcgagaccaccgccaccatctggtcgccctgcggcagcaacggcatcctcaacatcaacaaccgcatctcgctcaccagcaaggacgccaaggcgtacggtgagctctccaacgacgatgcgaccgtcgccttcaaccagcagctccacgttgcctggaagaagtgcacacccggatctggaagcggcagcggatcagacgacaccattggcattggaatgccttcttcggatgtcatcatcaactagagtgtggaagatgagcgagtggctgagaagaggtggatgggggagagatgtatataggtgacgagaaaggagtttcttttgtgtgtagtttggattttgaattcatttattgcatctgctct

SEQ ID NO: 11470 - DNA, 1281 bp, Oryza sativa
  ref <308>: DATABASE ACCESSION NUMBER: AK108818
  ref <309>: DATABASE ENTRY DATE: 2002-08-28
acggctctccttccgccgcagttcagcatccgaatattgagtccctgtctataatatctcgacttcaagatgtatcttcagacgttgaccaccacacttttggcgtgtgcaagctcgtcactcgcggcaccgacgaacgtgacaagaccattctcgacatggatgtcatcttcatggctgtcaaaaggccagcagctgaacaatcactatgttatggctgtcatccatgagggaatccaaaaagccgcaacaactcaaaacgacgccgcgttactttcatatgcctcagatgctgtctcatccctcgtcacagagaacggcacgctcattggctggaacgcaacattctacactctggatgacatccgaatggggaataacatcctctacttctggaatgcaggaggtcgcaaagagaagaagtacgagattgccgccaaaggactgagggaccaactcgacagatggccaaggacagaaactggaggcttctggcaccgtgcgcccatctatgccaaccagatgtggctcgacggcatatacatggccgacaccttctatgccacgtacacctcgtactttgagcccgacaacacgactgcgtgggacgacatcgagcttcaattcgacttggtggaggagcattgccgaaaccacacctccaacctactcgcacacggctacagcgaggacaagtctgctgtgtgggccgacccagttactggtgcctcgccacatgtccgggaccgcgctcttggctggtacttcgtcgccctcgtcgaggtgctagaggtcttccccaagtctcaccccggattcgcaaagctcctgggctactactccacccttgccgatggcatcaagaaggcccaggatgagagtggcggatggtggttgatcatgaacgagccctacccaggccaagaggacaactacatcgagtcgagcgcgacagcaatgttcgcgtactcgtacctcaagggtatcaggctcggtctgttggacgaggagtacaagaccacagcgttgaaggcatgggacctgatggtcaacgactttgtgcagtacgagaacaacggcacattgtcctggactggaactgttgaggtggggagtctgaagggtgatgcatcgtacgaatactacgttagcgttcccctctctctcaatgacggcaagggtctcggtgcattcgtatatgcagccactgagatcgagatggctggcttgtgagtgtgtggtgtttgatcatgctagatagaaatgaagtcaatttgccat

SEQ ID NO: 11471 - DNA, 2661 bp, Oryza sativa
  ref <308>: DATABASE ACCESSION NUMBER: AK108819
  ref <309>: DATABASE ENTRY DATE: 2002-08-28
gcgttcaaaacgattacggttccagcgacggtgatcactgcgcttcaagccgccaacacgctctacacatcagcgctcccgccaaacacctacacgattgctgtaagtgtcgcagccgccagcgtggcggcaacgtcagtgacaggctccatctccgtgaacggcgtgacgtacactgagacgcagcgccgctgggctgagctcattgcgctgagcggcgcggtgcatgcgctctatcaagaaaacagcaccgccgcttcggctgtccctgttgcagcgaacaacttcccaggcttcaagccggacgggggtttcaccgcgtccgctgctgcgaggtccctcgcgcttgacactggtgtgatcgtcttcgctggaaacggtgccgccatcgccgaccttgacgcgacaaagggcaactgcgatcctcgtcggtccacgtggacacgattcggcgcccccgcgcgctcaaccaacgacgcgctcgctgctctggcgccgaacatcgtccccggctacctctcttacacggcctccagcaacatggccacccgcacctacggcatccggaatgcccctgtcgggtgcatcgaagcggtcgcagtgatggcgttgttgacagcgatcgctgctgccatccgccgtcgtcgcgacctgcgtctcatcggcggcttgctgggtctgatgcctgcgctgttcgccattacggcggcaggcgtgacgtgcatcgcagtcgtagcaggtgtgcacaccgcgtactcggacgctgctaacgctcttgactccactgttggcgaccacggccgccgcacagtgagcgttctcgtcagcgcggcgagcgtcgcggaggcgctggacggcgtccaacgagcagtcgcgttccaggccatcgccttgtcgccgagctcggccgcggtgtcggctgccgtgtcgaacgcgcagtcaaagatcgtcgcacacggcactatcttcacctcgggctcagacggcgcggcttccgcgtccctcatcgcgtggctggagacgatccgcactgcctccgcagccgccgcagcgcaggtgggcagcttcatcgccggcaccataacgtacgatcgcaatgccgcgggcacaccaccgtcaaccacgcagcaactcctctcgcctcgcgcagtgggctgcgttgccgctggcgctgacatgactttcggctggctgtcttcgctcgcgacgctgcagctcactaacagcgacatctccacgttcggagccgccgccaacatcacttcgaataacagcgccgccatcccgaccatcggcatggatccggaagtcgaaggcgcatcggctgcgctcgcgcgtgccgtccgcggtgcgctcagtctcagcaaacccttcagcgccgccacactgctcgtctacggcgcgactccatcagccaacaccaccgtgacagcagcccgcgcagccatcgtggtgaacctcgcggtcgcatcgacggcgttcagtcgtgcgctgcgagtgctgacgccggccctgcagcagtcatccgtcggacgcgtcaacgaaggcgcggcgaccgacgccttgagcgcgtgccaagccgcgaagaccgcgtcgacgacggcaaccacaactgttgcggcgttgctccagaacgcagcgttgtccgcgaacgccgccgcgagccttaacgccattttagcaaacgtttcatccaacgcggatcgcctcgtcaccacggcaggtgccctctacagcgtcgcgcgacacgtcacaggcggtgcgagcgcattcgtcaacgtatccacgtccgcgagcgcgctccaggccgtcgtcgggggtggtgacgccgtctacctggcgctgaccacaacgctctctgtcacgcaaattcaagcgcaggctcagaacgtcggtgcttccatgcgcaacctgcgccccgatgacgtgcttggcgcaacgctggcgtccttcgccgcctactcaccttctgcgtcgtcgacgtcggtaagtgccgctgcagcggccagcggcaaacgcacgccctcgagcgctggattgagtaacgtgttgcgcgccaatgcagcgttgctgagctccctcactaagtcagatacgggtgtgagcctgcaaacgtacctcgcccaaacggtccaggccgaagccatcgcgccgtggacggatttcgtgacgcaggtggccaacagcttctccaacccgcccgtgtcgacgctaggcaccgctgaagacttttcgcagcgtatcgccgccggtggcacgtggatcattgcttgcatcgcggcgctgctcgctatggcgaaccgccttggcgccgttcagtaagcagcaagctgagtagaaaacacgatgtgcctatgccgcccgagagagagagagagagactggaagaatgtactcacaccttttgttacggggatgccccccccattctccccttgaggtcttcgcgcttgctcgctcactcgctaccctgacgccactacccccctttcagctggacatgatgtgccatctccattcttcgttgaattgaattatgtgatccagtgccccccaagagcaccccttcgttaatgcttccccggggcctcctctgaagggggggttgtggcgtgagcgagtggagccgcggagaacagaaagaaggcgtcgacacacaac

SEQ ID NO: 11472 - DNA, 1801 bp, Oryza sativa
  ref <308>: DATABASE ACCESSION NUMBER: AK108820
  ref <309>: DATABASE ENTRY DATE: 2002-08-28
aagctagtggggttaagagcgagttgacactccatatatatctttcatgtacacctctgaaacgtaagaaagctcatctgaccgcagtttagctccctcttagacagaggccagagggagaaagagagagagagagaggagaaggctgagactgaacattcaagatggccggaggtgtcatcgtggcgaacgacggtgatggctccgccgtggaccacggcggacggctgacgttctcggtggtcatcacctgcctcgtggcggcctccggcggcctcatcttcggctacgacgtcggcatctcaggcggcgtctcgacgatggagccgttcctgcggcggttcttccccggcgtggtgaggaggatggcggaggcgaggcccgggaacgagtactacgtctacgacagccaggcgctgacggcgttcacgtcgtcgctgtacgtcgccgggctggtggcgtcgctcgtggccagccgcgtcaccagggcgatggggcggcaggccgtcatggtcatgggcggcgcgctcttcttcgccggcggcgccgtcaccggcttcgccgtgaacatcgccatgctcatcgtcggccgcatgctgctcggcttcggcgtcggcttcaccaaccaggcggctcctctcttcctcgccgagatggccccgacgcggtggcgcggctcgctcacggccgggttccagttcttcctcgccgtcggcgtcgtcatcgccaccgtcaccaactacttcgcgtcgcgcgtcccctgggggtggcgcctctccctcggcctcgcgggggcgcccgccgtcgtcatcttcctgggcgcgctcttcctcaccgacacgcccagcagcctcgtcatgcgcggcgacacggcccgcgcgcgcgccgcgctgctccgggtgcgcggggctggcgccgacgtggaggcggagctgaagggcatcgtgcgcgccgtggaggtggcgcgccagggggaggacggcgcgttccggcggatggcggcgaggcgggagtaccgcccttacctggtgttcgccgtggccatgcccatgttcttccagctcacgggcgtcatcgtgatctccttcttctccccgctggtgttccgcaccgtcgggttcggcagcaacgccgcgctgatgggcaacgtcatcctcggcgccgtcaacctcgtctgcctcatgctctccaccctcgtcatcgaccgctacggccgcaaggtgctcttcatggtcggcggcgccatcatgatcatcgcccaggttggggtggcgtggatcatgggggcgcaggtggggaagaacgggtcggaggcgatggcgaggccgtacgcggtggcggtggtggcgttcacgtgcctgcacacggcggggttcgggtggtcgtggggcccgctggggtgggtgatccccggcgagatattcccggtggacatccggtcggcggggcaggcgatgaacgtgtccatcggcctcggcctcaccttcgtgcagacgcagtcgttcctcgccatgctctgccggttcaggtacggcaccttcgcctactacgccgcgtgggtcgccgtcatgaccgtcttcatcgccgtcttcctgccggagaccaagggcgtcccgctcgagtccatggccaccgtctgggcgcgacactggtactggaagcggttcgcgcgggagcaaccaaagacgagcgccgacgaaccgaccgggacgtactgatgtttcacgatgtgtagatgtacttaattctgtggagtacatgtcttgtataacttttgaatcatggtacttggtcctagttc

SEQ ID NO: 11473 - DNA, 2691 bp, Oryza sativa
  ref <308>: DATABASE ACCESSION NUMBER: AK108821
  ref <309>: DATABASE ENTRY DATE: 2002-08-28
cttgttggcctactggctgactttcttttctgcctccaattccattccatctccccgtatccatcagcaaccacaccccctctccgctcgggacactcgtagcgcgcggcacctgatccgaccagacgatcgtgagcttctcctcgtccttccttcgggctccccgtctctctcgtgcaaaccaccaagccgtcgatccctccaacaattgtgccgcgcgctcgtcttgtaaactccagtgcacgggcacgtttagtgatgatccctccttgctaaaaccccaatcgttttttctgccagttagtgcgaattcgccaagcatgcgaccggaacggcaatcgggtgaagaggccatggacgtcgtgcaggccaggctgccggacccggtgccatcgccgatcctgaggcactcgccgtcgacgtctcggtcactgcggtccgtgggcgacatgccgtcggtcacgttcgcgggcgacatgaggtcgggctcctgcagggccgagtccaccgcgtcatccttcgagagcttccggcgcgccgggtcgcggccgcaaccggttggcgccgtcgcgcggatgcccacgaggcggtccgcgtccgagcgcgccggctcgcagcgggacctccgcgacgaggacgcccggttcgtgtacgtgaacgacgcagcgcgcaccaacgcgccgccggccaagttcccggacaactcggtgacgacgaccaagtactccgtcctcaccttcatcccgcgcaacctctacgagcagttccaccgggtggcctacgtgtacttcctcatcctggcggcgctgaaccaggtgccgcagctcggcgtgttctcgccggtggcgtccgtcctgccgctggcgttcgtgctcggcgtcacggccgtcaaggacgcgtacgaggactggcggcggcaccggtctgacaagaccgagaacaaccgcacggcgtcggtgctggtcgacggcgtgttccagccgaagccgtggagggagatacaggtgggcgagctggtgcgcgtggtggccaacgagacgctgccgtgcgacatggtgctggtgtcgacgagcgaccccaccggcgttgcctacgtccagaccatcaacctcgacggcgagtccaacctcaagacgcggtacgccaagcaggagacgatgtccacgccgccggaggcgctcgcggggctcatcaagtgcgagaagcccaaccgcaacatctacggcttcctcgccaccgtcgacctcgacggccgccgcgccgtctccctcggcacctccaacatcatgctccgcggctgcgagctcaagaacacggcctgggccatcggcgtcgcggtctacaccgggcgggacaccaaggtcatgctcaacaactccggcgccccctccaagcgcagccgcctggagactcacacgaaccgcgagaccatcgtgctcgccgtcgtcctcaccctcctctgcaccctcgtctccctcctcgccggcatctggctgagcgaccacagcgacgagctgggcgtcatcccctacttccgcaagaaggacttctccaatcccaacgaggccgagaagtacaaatggtacggcacgggcgcgcaggtggtgttcacgttcatgatggcggtgatccagttccaggtgatgatccccatcgcgctcttcatctccatggagttcgtcagggtcgggctggcctacttcatggtgcaggacgagcacatgttcgacgacaagaggcaggccaagttccaatgccgggcgctcaacatcaacgaggacctgggccagatcaagtacgtcttctccgacaagaccggcacgctcaccgagaaccgcatggagttccgctgcgccagcgtgcacggcggcgacttcagcgagaccgacggcggcgacgcggacggccatgccgtggccgcggacggcgtggtcctgcggccgaagacggcggtcaagacggaccccaagctgatggcgatgctcaaggacggcaccggcgccaaggccgacgctgcccgcgacttcttcctcacgctggtcacctgcaacactatcgtgcccatcatcgtcgacgacgacgaggacaacgacgacccggcggcagcggcggcaaagctggtggagtaccagggcgagtcccccgacgagcaggcgctggtctacgctgccgctgcgtacggctacacgctcgtcgagcgcacctccgggcacatcatcatcgacgtgtttggcaccaggcaaaggataataatgggctatctagggtttagcatgattgcggggactaatgagtgtgggacaagggcaaagcaacagatcaggataaaggttgtggcaaatgtcaccaaatcttgggccctgacggctgatgatccattgctaaatgctctgcatccgatcagcaaaaagtactcccaactgctccacctcgctacaagtcaaacgtgtgtggctgcaggctgctagtgacaacagatcaggataaataagatcgttatttttttaagtagtactactaccggttaggtttgttgtttgtatcgtactagtaccgtgttaggcctcttgaccaatcatatctggcagtccttaccctggctcattatactacagtatgtacgtacgggcaacccaaatttcaggctagaatattagtgttgaaatcaattttctaagcatgattatggac

SEQ ID NO: 11474 - DNA, 1486 bp, Oryza sativa
  ref <308>: DATABASE ACCESSION NUMBER: AK108822
  ref <309>: DATABASE ENTRY DATE: 2002-08-28
tgcttatattattgaaccaaaaaaaacaaaacaaaaatgattaatacgaataacgtcgagagtaatagtagtatttttaaatcaatatcgaataacttgtcattagaaatgccctcaatcgatagctcgatgatcaccaaccccaagcatttatgtattcgactgggtacagggcctcagtactattcctgatgcaagccacactgccgcgaccgccagctccacccatcaccaccaccatcacaaccaccataacagcactagcagcagcagcaagcgagtcggaggcgagttgtcaccgccttcgtcgccgacgactgaggcagcagccgcagttgctgtcgctccaccggcggcggcggtcgtgcccgaagccgactcaccgccatctaacctcctagactcagccatcgccgacgacgacgatgtgctgtgtgtggatgcggaaggcggcatcttaaacggcagtgtgggtagtctcagcaagtacattgttccgcaccacccttctcaagccaacaccacttcaaacaacaacagcagtcaatcgacagatatcaagaactaccgaaaacagtcgagttcgtcttcgtcgtcatcggaatcttctgaatcaagctcttctacttcgtcgagctcgagcgagatgcaggagttcatcgacttcgaggagatcgccgaacaggccaattcgatccttctaagcttcaagtgccctctctccgacgaacgtgaggtcgagtggcgcactctgctcgtcaacggagtactctacgtcgacataccgactagtgttctcccagaaggctctcgtgactcgttcgtctctcttctcgagttcgccgaggacaaactcgactgcgaaaaggtctttgtctgcttcaaacgcaaccgacctgatcgtagtgctctcatgcgtgtcttcatgttcctaggcttcactgtggtccctccagactgcaaactatgccctcagaacgacgacatcatgtctatggtctacaacatccaatagactaactttctctttcttttgactgctttatatcggaaaaataacaaaaaaataaaaaaaatataaaaaaattctaaaaaaaaattaaattcatagatatcatcaatcatagttatcatttaaaagcactacttttactctatttaatcactttatcactgtttttatgaattaatttgagaaataattcctcttttaattaaattactttttattttaacttgctaactttactttttggtgtaagtttagaagctaactttaatagggagttgtttttacagtacaatatatattatgtgtcagagagaactaaaattgaagattttttgtttttctttactaaaatcattcagaaattcaaaaacactatttaattaatttggatgtttttcaaaaattatttcattttactttatatttaactgctacaaataaaaatgtttttaacaataaactaatttaactcgg

SEQ ID NO: 11475 - DNA, 858 bp, Oryza sativa
  ref <308>: DATABASE ACCESSION NUMBER: AK108823
  ref <309>: DATABASE ENTRY DATE: 2002-08-28
atcaccaattgagcagctctcgttttgcagttctagctagctagccactgatctctcagccatggcttccacttcgggtctcctcgccacggtgctcgccatggccgtcttgctcgccggcagcagccgcagctgccaagcggcgcgccacctcgccgacgcaacacctcctgccgccgtgccggtgcctaccgtgcccgctgtcacattgccaccgatgccggccattcctgccgtcccggcggcgacactgccgccgatgccggcggtgccaatcgtgctgaacaccgcgttgccgcccatgccggccgtgccgaaggtggcacttccgccaatgcccgcggtgccggctgtgcctaccgtccccgcggtgaccgtgccgccaatgcccgcggtgcccgctgtgccggcggccacgttgccaccgatgcccgcggtgcctgcagtgccggcggcgagcttgccgccgatgccagccatgcccgccgtgccgaacgccgcgttgccgcccatgccggccgtgccgaaggtgacgctgccgccgatgccgtcgatgccggccgtgcccaaggtgacgctgccgccgatgccatccgtgccaatgccgttcttggcacctcctccttcggcataaggacgctgtcgatgcttacacatttattgggtcatttgatttgatatcaagcttttggttatatatttcctctgcttgatttgttttctgtgagtaaatgtatgttgcatgcgagtttttttttttttggaatttttgttctagccgtgtttgtatatggagtatgcttggctataagtacttgtatgtggcatttgtttataaaagtttcattttggttggtt

SEQ ID NO: 11476 - DNA, 1461 bp, Oryza sativa
  ref <308>: DATABASE ACCESSION NUMBER: AK108824
  ref <309>: DATABASE ENTRY DATE: 2002-08-28
gcatcacacgtacacatctatccatcgatccagtccgccccgcagcagcagcagatagctagctagctagcaaacaatggcggcggatcatgaattgcgagctgcagcagtggtgatggtggtggtggtggtgctgggcatggtgtcgacgtcgtcggcgcacgtgttcgtgggggcgtacaacacgacgtgcccgaacgcggaggacatcgtgtacaaggagatgaccagcatcctcgccaagtcgccggagctcgccgggccggtgctgaggctcttctccgtggactgcttcgtgggcggctgcgaggggtccatcctgctggactcgacgccggggaacaaggcggagaaggactcgccgctgaacaagggagtgaaagggtacgaggtggtggacgccatcaaggccaagctcgacgccgcctgccccggcatcgtctcctgcgccgacaccctcgccctcgccgcccgcgacgtcgtgcgcctaacgaaagggccgtacatcccacttccgacaggtcggagagatggcaacagctctaacgccgccgatgtggccgccaactctcctgcccccggcgccaccgtcaacgacctcctcaccatcttcgccaagttcaacttcaccgccaaggatcttgccgtcctctcaggtgcgcacacgatcggcaaggcccactgctccgccttctccacccgcctctacagcaactcctcctccaacggcggccccacgctggacgccaactacacgacggcgctccgcgggcagtgcaaggtcggcgacgtggacaccctcgtcgacctcgaccccccaaccccgaccaccttcgacaccgactactacaagcaggtggccgcgcagcggggcctcctcgccaccgacgccgcgcttctcctcaacgccgacaccaaggcctacgtcctccgccaggccaacgccacctccgacgacgagttcttcgccgacttcatcgtctccttcgtcaacatgagcaagatcggcgtgctcacccactcccacggcgagatcaggcacaagtgctctgctgtcaacccgccgtcgccgccgtcctccgccgccgcctccatgctcgccacctcgctcgccggctcgcttctcttcctcctcgcgggggtcctcgtgctgctcttctgatcgatccatcgatcgatctcacacattttacatgcatgcgtgcgtgcaaattggacaaactgttgtactgattgttcgtacgtcgtttcgtcgtcatttctggatttgttttacaaaaaccaatgatttttccttgattttcttttaatttgtcatgtgtgcagggttataacccttgtttgtttacttaatttccaaagggacaaatttgtatcttgggagatgaaatctccgattgttgtaactgtggccggacggacgtcaatcaagggccaaatgaatcgtgatttgttgtgaat

SEQ ID NO: 11477 - DNA, 2881 bp, Oryza sativa
  ref <308>: DATABASE ACCESSION NUMBER: AK108825
  ref <309>: DATABASE ENTRY DATE: 2002-08-28
ataacatcacctgcgcactggcagtgcctgctgtgtagctagggcgctgatagccgattgccgccgggagttcaccctcttgcttttgctgccggattgccgcagtccagcctgtctgcgcgtttcaccacgtgggtcagccggcaccatgccggcctacaattttaagtctatgcaggttgtcccccctgcaaaggacttcatagatatcgtcctcagcaagacacagcgacagacgccaactgtggtgcataatggctgggcaatacagcgcattaggcagttttacatgcgcaaggtcaagtttactgcgcagagctggaatgagaagcttactcaaatcctggatgacttccccaaggtggaggacatccaccccttttacagtgacctgctgaacgtgctgtatgataaggaccactacaagctggccctgggccagctcaacacagcacgcaacctggtggacaggctggcacaagactatgtgcgcctgatcaaatacggtgactccctgtaccgctgcaaggagctcaagcgggcggcactgggccgcatgtgcaccctgatgaagggccaggacgcctccctcaagtacctggagcaggtgcgccagcacatgagcaggctgccgggcattgaccccaacacgcgcagcctgctgctgtgcggctaccccaatgtgggcaagagcagcatgatgaacatcctcacgcgcgctgacgtggaggtgcagccctacgccttcaccaccaaaagcctgtacgtgggacacatggactaccggtacatgcgctggcaggtgctggacactcctggcatcctggaccgcccgcttgaggagcgcaacaccattgagatgcagtccatcaccgcgctggcgcacctgcgctgtgcagtgctgtacctggttgacatcagtgagcagtgtggctacagcctggcccagcaggcggccctgttccacagcatcaagccgctgtttgccaacaagccgctgctggtggtggccaacaagacagacgtgcggccaatggaggctttgagtgctgaggagcagcagctgctgcagggcatggctgatgaggcacaaaggatcagcagcggaggtgctgcccctgctgttgctgctgctggtgagtcgtctgagccgcacatgatgaccatgagcacgctgactgaggatggtgtgatggctgtgaagcaggtggcctgcgacaggctgctcaacttcagggtggacatgaaggtggcgggcaagcgcatcaacgacgtgctcaaccgcatgcacgtggcagtgcccaagaggagtgacggcgtgtcccggccgccagtcatcccacccagcgtggcagcagcacgtgcagcagcggcggcaggcaagcagccgtccaagcggaaaacagagaaggagctgcaggaagagggaggaggggcaggcgtgtacagtgctgacctgcgcaagcactacgacctgaaggaccccgcctggcgctacgacataatgcctgaattcatggacggccacaacgttgctgacttcatagacccagacattgacgcaaagctggcagagctggagagggaggaggcggagcaggaggcgcagcaccaggcacagctgtctggtgtgatggacactgatgagctgactgaggagcaggctgctgacctggcagcaatacggcagcgcaagaagcagatcatagcagcgcaccggctcaagaagtcctcagccggcaaccggcccgtgatgcccgccaagcacggcggcagtggcaagctgcaggcctcacagctgcggcagaagctggacgcaatgggcattgacacagcagcagcagagcagcggttgcgggagcgcagccaatcgcgaggcaggaaacgcagcaggtctgagggccctgctggtgatggggatgcggagatgggtgaggcagacgcagcagcagccaagaagcgcgtgcacagcagcaagagcagaggcatgagcaggggccgctctgccagcttggcggctcctgcagctggcagtgggctgaaggatgccgtgcagggcaacaaagctgtcaagctggcagacaaggcgcagcgccgcatgaacaagatggccaaggtgggtgaggcggacagagtcatacccacaaagatgcccaagcacctgttcagcggcaagcggcccaagggcaagacggacgggcggtagcgcggctgcagtgcgcctgttgctgctgctgggattgcgctatttggggttgattgtcttggggaggtaggtggtgtagggcagtattgtgcaggtctgagcttgcaaggggtggtgttttttgttcacgctttgcatgtgcatagtgcactgctgtgcagctgaatgctgttgaagcagtcactagccacacaggtgctgctcttctggtaatgcctggtggcaactgagatgctgtgtggggtcaggcatcagtggtgcgagtgaccttgcatgtgtgctgctggtgcaatgcgagttgcacgcaaacagtagggggcagcagctgcagcagcagctgaccactgcactggccgctggtggtcagcgttgttgaggcagcttgtgcagtgagatcacaacacagtagcagtgcatatggtgtgttgctactaacttgagttggcccttggcagctacagctggtgtatcgtggtgatgcgcttcaatggcacgctgttcattatagctgagccttgaagctacaacagggcatggaagggggtcgcctgccatgtgaaaggcgtaggcacatgcatggcgacatgtgcggttgcttgcatcattgccatgagtatggatataagctgggctagtctgccatgaggagtggcctgtttgtgaaatactttatgc

SEQ ID NO: 11478 - DNA, 1434 bp, Oryza sativa
  ref <308>: DATABASE ACCESSION NUMBER: AK108826
  ref <309>: DATABASE ENTRY DATE: 2002-08-28
gtctttttggccagcttgctcaccttcgttgcaagcagttcacgttcgctcttcggcagcagtcactcattttattccctaccagtcttgcccattgcgatttcttaaacagctatattaattttcacaaaccccacctcgccttcaccatgcgcaccgcccttatctccctggctgtcgctgccggcgccgctgccctcccagcacccccgacatcgcctgcgccattgaccggcctagtgtccgaagtcacgggcgccctcgccaccgtcttcagtgaaatctgtgaagccctgccccttgaggccttcaacaataccaagtaccgccatgacccaatgcccatcgaggctcaaaagaccaaactggcgaactggaaaatcctaacacccccccaagccgacccggccccagtctcctccttcaaaccctacaaagtctctggctatcagagtggtggtcaatgcgcaaacgtacgtgtacgcaaagagtgggatcgcgcatccgacagcgaaaggcaagcatgggtggatggtgtcaagtgcttgctcaacaaggccccttcgggccaatggcccaacgcaaagaatcgctatgaggacatcgttgctctgcaccaagcccttacccccaacgtccataccaacgacaaatttgcgatctggcacagaggcctgatgttcctatttgagaccatgatgcgtaacgaatgtggctacaacgcgccactcctttggttcgattttactcgttatgctggtcgctttgcccagtcctctttattttcgagccgatggctaggaggtattgctgttaatggaaattgtgtcagggatggccaatttgccaacttggttgccaatgtcggtcctggtgacagcaatactgtccattgccttgcacgcaatggtgtcggctcttcaactgcccactgcagccaagaatacgtcgatctttgccagcgctatcctgattacgccggttggagacaatgcgttgagtttggttatcacggctgggggcacatgggtatcggagcggtaatgaacgacgtccaggcctctcctagtgaccctgtgttcttcatattccatgcttggattgaccgcaacttccgcatcttcactaacgccaacaaacaatgggagcgccagatcaacggtgtcgaccgcaatggcaacgccctcacactcgataccaccgttagcatggctggaatgatgcccgatctcaagatcagggatatgctggacaccaccggccccacgctgtgctacaggtacgactactagagcctggtttgtcttatcctcgcatagcgttggctgggagcctctggccgaactttacaataaaccttttcttttctcacataatctagtataatgcagctctgcatttccatattagatcttacaactccatttctgaact

SEQ ID NO: 11479 - DNA, 994 bp, Oryza sativa
  ref <308>: DATABASE ACCESSION NUMBER: AK108827
  ref <309>: DATABASE ENTRY DATE: 2002-08-28
agctgctccccaccagctctgaggccgggtcagcacatcacgtgcgccgccaacgcgcgcctgcggagcgaggcaagggaagccatggccgagggcgcagagctggtgggggagagcgcccaccaggacatgccgcgggtggtcgccgcgctcgccggcatcctggagcgcgtcgcggggcgcaacgacgcggccgcgacgcccgcggagctcgccgcggcgccggcgtcgccgttccgggcgacggccaagccgggcatctccgtccgcgcgtacgcggcgcgcatcgcgcggttcgccgggtgcagcccggcgtgctacgtcgtcgcctacatctacctcgaccggctcctgcgccgcggccggcggtgcctcgccctcgccctcgccgtcgactcctacagcgtgcatcggctcctcatcaccgccgtgctctccgcagtcaagttcatggatgacatatgctacaacaacgcctacttcgccaaggtcgggggcatcagcctggcggagatgaactacctcgaggtggacttcctgttcggcgtagggttcgacctgaacgtgacgccggagacgttcgccgactactgcgccgtgctccagtccgagatgctctgcgcggcgcccccgacgaggctgcactactgctgcctgtccgaggacgatgccggcagcagcagcagcagctcgctgcgtgaagcggccatggaagcaagctagcatgtcacactgcgtacatacatgtgatctgtcctacgtgctggagtattagttagtgtggcagttgctttgattagtttagttagcctgctagctatagtagctaataggtggtcgatcgccctctcctcctgcatgatgcgtacagcagtgcattcttgctgtgcactcctttgttctttttctttttttctttttttgtttcggtgtgtactaatggtgtagatcagtgaaacatttatgcaatttgatcctatgtaaattttgatgg

SEQ ID NO: 11480 - DNA, 1157 bp, Oryza sativa
  ref <308>: DATABASE ACCESSION NUMBER: AK108828
  ref <309>: DATABASE ENTRY DATE: 2002-08-28
ggcacatgacgcggatctggcgcagttcacgctcaacttcgacgggtcgcgcatcgcgtcagccagtgagaagggcactctcattcgtctctggaactgttacactggtgaacctcttcgagaactgcgacgaggcatggatcgtgctgacatctactgcatcgccttcaacacagcgtcgacgtacatcgcatgttcgtcagacaaaggaaccatacacatcttctccctcctcgcccctccaccgaccaagaccgaaggcagtggtggtcctcctggttcaagtctgcctgcatccccatcccctgctcagcctcgatgggcgtcactggactccacgcctcctccaccaggctccttctcacagtcgccactgcccgccggagacatgcgatccatcagcatctcgtctagacatgatgcatctcgacatgatccatattccttccgcccctctgatgcctcttctcactctctcatgcctaagggcggctattccggcaagggggacatcgaggaggtttctctcggcggcactgctaacagcgcaggaggcaacaacaacaataacaataacaacaataagagcatgtcaggcatgggcatcaacttcctcaaaggcattctaccctctggcttcgttccgaagtatctggagagcgagtggtcgttcgcccaggtgcgaggcatcgagggcaaggcgatctgcgccttcagcaaagactcgacgaagctgcacatcatctgctctgatggcaacttcgtcatcgcgaatgtagaagaaggagagtgttcgcgtgtctcgacgatgaagtatctgaagtcgatcgatgagattcagaacgaggaggaggagttcgagtggaataacaatcacggagccagtgctagtaacagcactcagcagcagatagcacaggggaggacgaagagttcgagcaatactgacctcgcctcactcgcctcgaatctcaatcaagtgagtctgaacaatcacaatgcccacaacgcaccaggcaagttatatgacatctaataagatagcgatatatatcgatatagtcctatagtcttagagccatattatatagtcacaacgaagcaacgtttatctttttgtcttctattttgtgtaaagttaacttgatttctttcat

SEQ ID NO: 11481 - DNA, 1037 bp, Oryza sativa
  ref <308>: DATABASE ACCESSION NUMBER: AK108829
  ref <309>: DATABASE ENTRY DATE: 2002-08-28
tagttagtgtcatttgatggatccagcaaggtactggatcttggccaggaggaagctgggagatcagaaggcgcctctcttccccacccctcacatcaccatcggcgccggcggcagctccacctcctactacgagtcatgggaggaacgtgccttcgcggaagactccgcagggcatctcgggggctgcatctggccgccgaggtcctactcctgcagcttctgcggccgtgagttccggtcggcgcaggcgctgggcgggcacatgaacgtccaccggagggaccgggcaaggctcaagctctctggggttgtggaggacggcaccggcggcgaaagccacggcatgccgccaaaccaaaactacatgatacaaccatgccctccccaaattggcaccctgcagcacgcctacagcccaaaccctagaagtggcagtattctcgctgctgacactaaccctaattccatatgtgatgttgtcgcgtaccctgctagatccttgcttcaagttgcagctgctagaactgccttgggcaaacaagtcctgaacgcccctcttgtctcatcgaagtcgccgtcggctggtagagaacatggtaagagggagacgttgtttcttggtgctgttcgattggcacaggatcatgacacggtgagttctaatcttgacctgcgtgttgggaaaaatgaattgaagataactactgttttggggtgccgatcaagaagggactttatgtacgataacgaccgcgcggatgatgaaaagactgttgaagcaagtcacaagaaaagaagaatcgatttggaggtaaaccccctgattctaacttcttcaaccagtaatcatcaacagcaagatggtggtgatgaccaacatcatgaaaagatactaaaactttatcgtagctcctcggttgaagaactagatcttgagcttagactcggggaagccccaaaagaacagtagatttcatatccactgttgtatctcaacttgattacaaatgtttaatttgtatttattcaccact

SEQ ID NO: 11482 - DNA, 1038 bp, Oryza sativa
  ref <308>: DATABASE ACCESSION NUMBER: AK108830
  ref <309>: DATABASE ENTRY DATE: 2002-08-28
accacacaccacgccactcgcctcgcctcgcacagtcgctcgctcgcccgctctagctagctcacagctcgctcactcgctctcctcttccaaccaactccaccaccaccaccagtccaccacagcgcgcggcgccatggacgactcgtcgttcggttccgagccgaccacgtcctcctcgggcggggaggcgccggcctccccgccgtccaccgcgtcgtcgtcctcagacggcgccggcggcaagaagaagcggccgcgcaaggacgggcaccacccgacgtaccgcggggtgcgcatgcggagctggggcaagtgggtgtcggagatcagggagccgcggaagaagtcgcgcatctggctgggcaccttcgccaccgccgagatggccgcgcgcgcgcacgacgtcgccgcgctcgccatcaagggccgcgccgcgcacctcaacttcccggacctcgcccacgagctgccgcgcccggccaccgcggcgcccaaggacgtccaggccgcagccgcgctcgccgccgccgccgacttcccggcctcctccgccaatgcgggcgccagcaataaccccgacggatcggacgacgcgagcgccgggtccgcctcgccgcccccgccgccggacgccgctgacgacgcgctgttcgacctccccgacctcctcctcgacctcagatacggcccgcccagctcgggcctctcgtgcgcgtcgtcttgggaagacgaagtgggcttaatctccggcgccggtgccgccgccgccggcgtgttccgcctggaggagccacttctgtgggagtactaaaagccaaagcgccgccggtaaaacactcgtcagtgctaaaatcgagcagcctgcatgtacaacccgtaattttccacgcatgaccaaaagaattcatgcatgcaagccagctacggcctacggcgcacagaaacttgagccaaaaaatcagcgtcgttttgtcctgcgtttgcgtcgccaaatttgggaagcagaccatgtataaaaaatcatccttcttttcc

SEQ ID NO: 11483 - DNA, 1290 bp, Oryza sativa
  ref <308>: DATABASE ACCESSION NUMBER: AK108831
  ref <309>: DATABASE ENTRY DATE: 2002-08-28
ttacctatcctacccatctcttaccttctgaagccattcgcaatgccgattcgaagtgactggagcctttcgcgcgaaggagtaacccgcgacaccttcgtcaacctggtcaagctcacggccttcaatcctgcgttgacgctgccactctttctgctcgcgcgctacacgcaacagggcagtgcgcttgcatctgagcactctgctgcgttcaagcacttgaagacactgcttggactgggattactcaacacgactagtacgtggttgagcaacggggtcaccaacaattggaccagcgacaagtacgactgggaccgcgaggtcgtcgttgtgacgggcggaagtgatggtattggaaagattgtcgttcagctcctagctgagaagggaatcaagatcgctgtgctggatgtacaggacttgacgtatgaagcgcccccatctgtccgcttcttcaaatgcgatctctcctctccaaaggccatcgccgaggccgcgtcttcgatccgctccacactcggcaacccgactgtcttggtcaataacgctggtgtcgcccgcggcaagaccatcctcgactcgaccgagaaagacatcaaccttaccttccgcgtcaattccatgagccactactatcttgtgcagcagttcctgccccacatgatcaagaacaaccacggaatggtcgtcaccgttgcatccttagccgcgtaccttaccgccccctccatggtcgactatgcctcttccaaagcagctgccctggccttccacgagggtctcgctgccgagctcgtcgacaaatacaatgcgcccaaggtccgcaccgtggctatatgccagggctacacccgcactgcgctcttcgaaggcttcgatccaaaaggtgcgttgtaccccgagacggtggccgagtctattgccaaggcggtcctcagcggaaagagtcagcacatcatgctgccagagtcgggttggggatttgtgcccaaggcgaggggtctgccgctatggatgcagtatggtctgaggaagaagctgggaggactcatgaagggatggaagggaaggcaggttgagcagcccagtgaggttgagggtgagaaataagcggggggaggatggtatttatcgggccggagtagacggaaccgaaataattccctgattgtgttttggttacggggctttccttgagggtcagagttgaagtttatttggtggaccaatggcgtgtcttcttcgttacctggtatggtgtcaacattcaatgattagtttggtgtc

SEQ ID NO: 11484 - DNA, 925 bp, Oryza sativa
  ref <308>: DATABASE ACCESSION NUMBER: AK108832
  ref <309>: DATABASE ENTRY DATE: 2002-08-28
gtggaattctctctctcattcctcatcctaatttttcggatctagcaattcgcatccacagcagcggtgagaggagcaacaccagtgacatcgacggtctccggtgagcaggcaacgacggccgacggaagcctccaatacacaagcggcgggatccaggcactaggcgaggacttgctggcgtggagcaggtagcgcccacgggatctgatcggcggtggcctccggctacttcgctttccgcctaaaccgccggtgcccaatgtctagggtggcggcgctccaagctcacggccagagaggagccttgctttgtccggggccaacatgcaggagcactgtcgtcggtgaacccctccgaccgggatcaatccatcgtcgccgacgctaccccccaccaggagccttgatcctgcttgggtgtttctatgccaccaactactggcggccaggatgggaatatggaattggggctgcggctgaatttgtctcgagtacctcgcaggcccttctgctgccctctctgcatcctctttgcatgtcaagatggtagggaagcagatcttgctcgatgcagggaaggagcaattcggcatggatccagtggtcagagacgaggattgaggaggtcatcgctagcttcttactggtttagatgcagaatgttgctggggagaagcatagaggaggatgtctcctccacgctccatgaccaccatgacctcggcaactccgcgcaccgggtgcctgggtcctgtgttgtgttttgtgtttatccatgattattctttttactctaccatggtcccaagtctcatttgcaacttttttactccgggtgttcaatttatatatgtatgcattaagtgagtaaaatatattatccaccgatcaatgaaaaataatggggagtgaaatttctttc

SEQ ID NO: 11485 - DNA, 1385 bp, Oryza sativa
  ref <308>: DATABASE ACCESSION NUMBER: AK108833
  ref <309>: DATABASE ENTRY DATE: 2002-08-28
gacaccaccctccatccgcgcaacatcacgaaacgaccccatcgcctggggcgcggattgcaatgtacaaacaggcgactcagcgaaccacagaagtgctgtccatgcccccgaagtggctgggcatgtactctgacttcatcaccaagaacagcagcgccgtgtcgcagatagagtcggcactgcggtctctgacatacatcatacctgggcgcttccgcgaatctgaaatcgcctcagaatcattgcacagcggtgtccaattactctctctataccatgactctcttctctcgaaagcgatggctcaaatgcccggcacaaggaagcatccgctgaccccgcaccaccgatataccaagttctggactcagaagtcaccaacatacaagcgcattgccctcgtcctgcagatgatccagtataccgaacttttatgggagatggctgcgaaaaggaagggcgagaaggtccgctggcgcgttatcgtgctgctggaagtcgtcaaggctgtgtgccgactcctacttctgaggctgacgaactcgaggccgctgctctccccaccgctgccgcaacgagaagttgatcccagctcgctcgaggactcctcagcatcggcagacggtatggacactccaccgagtgagcgctcggtcgaggcggagaactggacaatgccgaggaccggtctgtccatgccgagtcttccagactcacgggatatctcgaactatttactctccaaggttctcacagccgacgatatcaagcctccaaaagctctactccaccgcgtcaatggtaaaggcgaatttgccgaggcactgtatatattgcgacctgtcatatacgccttggctatgcaacatttcagtggcgacaggaagagctggaggccttggctgatcggcgtgagcatcgaatatggtgcgcgacagctcgcaaagaacgacttccaggagcgactagccggcggtctacgtggactcactggctaggagcgagaggagttgaagaagcgcggctgggcattgggatggtggatgatgcgaggagctttctacgagaatatcaccaagtcttggatacactctttgactggaaagctcacgggcaaaccacttctcgatatggttggcggggtcattgaagactacgaatttctgtgggatcagtactacttccccaccgctacattgtaacgggaaattccatgtgtaagcttttccttctgtatgatatggcatgacggcttgaggatatcagcgaaggttggatagctgggttcatccttcacatattgttgatcttttttgtaacttttattttgatattttgtatacttttctctagataccaaatcttgaatgctcttcttcctt

SEQ ID NO: 11486 - DNA, 1170 bp, Oryza sativa
  ref <308>: DATABASE ACCESSION NUMBER: AK108834
  ref <309>: DATABASE ENTRY DATE: 2002-08-28
aaaaacttccttccgtccaacccagtctccatttccctcatctccatcacattcatcatgttcgctgctaggcaggctttcttccaggcccagcgccgctgcttctcggcttcggcccgccagaactccaaggtcactgttctcggtgctgccggtggcattggccagccattgtcgctgctgctcaagctgaaccccagggttagcaagctcgccctctacgatatccgccttgctccaggtgtcgctgccgatattggccacatcaacaccaagggcgaggtcactggccatgacgccaccccctccggtctcgctgaggccctcaagggtgccgagattgtcctcatccccgctggtgttccccgcaagcctggcatgacccgtgatgacctgttcaacaccaacgcctccattgtccgcgaccttgccaaggctgctgctgaccacgctcccgaggccaacatcctcatcatctccaaccccgtcaactctaccgtccccatcactgccgaggttttcaagtccaagggtgtctacaaccccaagcgcctcttcggtgtcaccaccctcgatgtcgtccgtgcctcgcgcttcatctcgcagctgaagaacaccgaccccgcctccgagaacattaccgtcattggtggtcactctggcgctaccattgttcccctcctctcccagtccggctacaacctcgagggcaccaagctcgacgagtacgtcaagcgcgtccagtttggtggtgacgaagtcgtccaggccaaggacggtgccggctctgccactctctccatggccatggctggtgcccgcttcgccgagtctctgctcaaggccgcccagggcgagaagaacgtcattgagcccacctttgccgactctcctctgttcaaggaccagggctgcgactacttcgcctccaacgtcgagctcggccccaacggtgttgagaagatccaccccgttggcaagatcaccgactacgagcagaagctcctcgatgcctgcgtctctgacctcagcaagaacatcaagaagggtgttgagtgggccaaggccaacccatagattcggtagtggagacatgggtgacgaatgtatactagtaatgacatgaggcttttgggatctggattggaataaattcttttcagtgtcctt

SEQ ID NO: 11487 - DNA, 1381 bp, Oryza sativa
  ref <308>: DATABASE ACCESSION NUMBER: AK108835
  ref <309>: DATABASE ENTRY DATE: 2002-08-28
atctcagtcacttcacgctctcttctagtcaccaccatgaaaggtctactgtctgccactgtggcctcggccgtcaccggcgctttcgcgcttccttctcctcttgagaaggctgcccgccagtctgcaccatgcagttctgccgtaacgctctctggaaacccctttgccacccgcactctctaccccaacaagttctactctgccgaggtcaaggctgctgttggcaagatcagcgactcgactcttgcagcaaaggccgccaaggttgctgatattggaactttcctctggattgacacccgtgacaagatcaagatcgttgaggaaggtatcaaggacgttccttgcaaccagattgctgggctcgtcatctacgaccttcctggccgtgactgcgccgccaaggcatccaacggtgaacttgctgttggtgaaatcaacatctacaagacgcagtacattgaccccatcgtcgccattatcaagaagtaccccaacgtggcttttgctcttgtcattgagccagactctcttcccaacttggtgaccaacaacaacctgcagacctgccaggcctctgcctcgggataccgtgagggtgtcgcgtacgcgctcaagcagctcaaccttcccaatgtagccatgtacattgatgccggtcacggaggctggcttggctgggacaacaacctgaagcccggtgcgcaagagctcgcctcggtgtacaagaacgctggcagccccaaggccgtccgcggtgtcgccaccaacgtctctggctggaactcattcgaccagtctcccggcgagttcgccaactcttccgacggccagtacaacaaggcccaaaacgagaagaagtacgttgagctcttctcgcctcaactcaccgccgctggcatgcccggccaggccatcgtcgacaccggccgcaacggcgtcactggcctccgcaaggagtggggtgactggtgcaacgtcaacggcgccggctttggtgtccgcccaacctctaacacgggcgactcgctcgttgacgcctttgtctgggtcaagcccggcggcgagagcgacggcaccagcgactcgagcgcaaagcgctacgacagcttctgcggcaaggacgacgcttacaagcccagtcccgaggccggatcctggaaccaggcttactttgagatgctggttaagaacgctaagcccgctctttaaatgatcccacatttggcgtgtagattgcggtgttctatttttgtatatagattgcaaaggaaaggggaaaaggggggggggggttgttcaaacgagatatctgcgtgctgtgtacataaaggcaaactatggaataacagtctctcgttctacaaaaaaaaaaaag

SEQ ID NO: 11488 - DNA, 1127 bp, Oryza sativa
  ref <308>: DATABASE ACCESSION NUMBER: AK108836
  ref <309>: DATABASE ENTRY DATE: 2002-08-28
accgcaccactcacttctccccccaaatcaatggcactcgaggcgcagccctccccgtcgccgtcgccccgccgctcgccggaggcggcggcgggcggcgcgggcgcggcgggggatccgccggtgacgccgatgcacagcgcggcgggcgacgagtgggcggccgaggagaagaggccccccaccccgccgcagtcctcctccgcctctcccccgctcatggtactcgtggaacggcggccgcaccgccaaaccgtatcgccccccgccgccgccgaggaagaagccgcaattccagccacccccgcagccgccgcgggcatgggatccatccccgcctcctcctcctccagcgccagcggcgcctgtgctggtgcctccgcctgctcccgcaccgaggccggctccggctccggcaccgagagtgccggctagggcggtcgagcacgaccaccgggtggtgcccgacatcctgttgcgcaagcggcgcacggctgttctgcagcgcaccgcgctggtggcgcgggttgcggccgcgctgctctgcctcgcggcgctcgcggtgctcgccgccgacagccgcaagggtttcgcccttgactcctacagcaactacagccagttgcggtactctgaggcggtgaacgtgattgggttcgtgtactcggtgctccagttctttgtgctcgcagatctcatgaggaggaacaagcatttgaatccgcggcgcaaaggagattacttcgacttcttcatggatcaggtgctggcataccttctgatatcttcgtcgttatcagcaactgcacgagtaggcgattggatcgacaactggggaagcgaccctttcccgaagatggcgaacagctccatcgccatttcattcatggcattcttggtttttgctatcagtgccctcatctctgcttacaatctcttccggcgagatatttagctgctcttagcagcaaccagcatgttacctttttcctatcttagactaagtttttcggtgcagccattcttgtgttgcacatgtatatgtaatcatgggccaaccattggagttcagtcttcagagaaaaaaaaggaacaacttctaggttatatccaatatatattggctt

SEQ ID NO: 11489 - DNA, 947 bp, Oryza sativa
  ref <308>: DATABASE ACCESSION NUMBER: AK108837
  ref <309>: DATABASE ENTRY DATE: 2002-08-28
atcgcagatcaccaccagcattcactcccagcttctcaccaatcaccactcgctcggcctaacaccgcctttgctttctaatctttaaaaatgcattccaagatcgttgctcttgtcctcccggccctcgccgcggccctaccccagtcaggaagcgcacccagcccggagcagatcaccattgagggaaccacctactctggcaatggctgcccccagggctcagtctctacctcgacctccacagacaagaccgtcattacttacggcttcgatcaattccagacctacattggccctggcatcgccgcatctgagaagagcaagaactgccagctccacctgaacctcaagtaccccggtggcttccagtacgccgtcgtagacgccacctaccacggctgggcacgtctcgacgatggtgtgacagggagcttcatcacgacctactacttctcccaggacgccggaaagactcaaaccacccgctcgtccttcaccggcggcggcgccctcgccaacggccaggtatacaccaagcaggactcagtcgagaccaccgccaccatctggagcccgtgcggcagcaacggcatcctcaacatcaacaaccgcatctcgcttacgtccaagaagtccactgctactggtgaattgtccaacgatgatgctaccgtcgctttcacccagcagcttcacgttgcctggaggaagtgcactggctctggctccggctctggctctggcggcgacaacactattggcattggaaccccaagctcagatactaccattccttccaactagagcggggatgttgaagggtcgatgggggaggaggaggcgagtgagtgagaagctaggagtgggtgcgttgtaaatagtgcggtgtaaatagttttggtgggttttcgtatgttggtgtgaatggatgcatttattttctg

SEQ ID NO: 11490 - DNA, 983 bp, Oryza sativa
  ref <308>: DATABASE ACCESSION NUMBER: AK108838
  ref <309>: DATABASE ENTRY DATE: 2002-08-28
cttttttccgtcagcggttggcataggagcagcaaaatggctcccaaaaagaaggccgcaccaacacctgctgccgtcaagaaggcggcagcccccaagaaggagaccaaccctctgtttgagaagaggccaaagaattttggtctgggcggccagcctgcccccaagcgtgacctgcgccgctttgtgaagtggcccaagtatgtgcgcctgcagcgccagcgccgcgtgctgagcatgcgcctcaaggtgccacctgtgctcaaccagttcgtgactcgcgccctggacaagaaccaggctgagacactgttcaagctgctgctgaagtacaggccggaggacaagaaggagaaggcagagaggcttaaggcagaggcagacgcacgtgcagccggcaaggagcctgagaagaagaagcccctggtggtgaagtacggcctgaaccacatcaccaccctggtggaggctggcaaggcgcagctggtggtcatcgcccacgacgtggaccccattgagctggtggtgtggctgccagcactgtgcaagaagatgggcgtgccatactgcatcgtcaagggcaaggctcgtctgggtgccattgtgcaccagaagaacgctgctgccctggccgtgactggcgtgaagaacgaggaccagcgtgagttcggcaagctggttgagtcgttcaagagccagttcaatgagggcgcccgcgtgcagtggggcggtggcatcatgggcatcaagagccagcacaagcagaagcagaaggagcgcatcctggcaaaggagctggcgcagcgcatgaccgtgtaacgcagctactggtcttgaggcagccaggcctggttgctggggttctaggcttgcaggctggctttgctgggtggtatgcgtatgctgtgccactgctgctgagcagtctagggacgggctgctgcggttggcagctgcccacaccgtgtaactagcaggacatg

SEQ ID NO: 11491 - DNA, 2480 bp, Oryza sativa
  ref <308>: DATABASE ACCESSION NUMBER: AK108839
  ref <309>: DATABASE ENTRY DATE: 2002-08-28
aaggctgacttcgagatatcttctcctcttcttcgctgatgcgcgtcgatacctcaacaacgcgaaagcccgcgtccacgaaaagcggaacgacaccagggaagaagcgatggcggacgacagcgacccgccgcggccggctgacgatgccgtgtccctacacacgatcgccgaccacgagatttacgcgacgcaagagcaggaagacgcagactttgcgctagcgttatcgcttgaggaagaagagcaggatcgcgcgcaacgagtctctcgattgacagcagaagcgcaggaacgtgaagcgctgatcgctcgcgaacgtgggcagcgaggtcgtccaaatacggacggtgcaccagcgccctatcgtgacgaccccgatgacggagatgcgatcccgtttagcgacgacgacttgccgccctatcgcgatgatcctgaggctgctatcgaagatacggatcgacgagcggaggtacctgtaaaagtgaggtggtggcgacgatgcatcgggcgctgcgcagattgggcaggaaacctgaagcaaagaccgacggcaagactatccaggccagcgaaaatcgttctcgggattgctgtgatcttgatcttcgcattccccaccctttacggcatttccctcctctttgaggcgccggaacatccgcggccacagccctcgccttcggcaaaggaacttgctttcgaagcatcaggatcgcgcaacggatatttagttttacgggagctgtacccggacctcgagaatggggtgagtaaagagtgtagggcggcatgggaggagcatgcatcagcattgcgatgtcaccaaggcatcctgtcgtcggtatgggacagaggagacggggatctcatcaaaaagacaggaatggacatctgggcgtatggccagctggtttgcgatgagtacaagacgtgtgagaaacagactcatcttctcgaaaagaggatacgcgaagcgtgcacgctacgatcagatcggttcgacctggacgggttccaatcgagagagttgaagtatttcgaggactctgaggtggaatcgagcccgcggcaagtggcgcaaaatctcaaagcgcgatatgagagcctctgcgacaggcctgccaaccgcccctacaaatggaaccagatcattctgggtacctaccccgcccagctgtggaagatttggggcatcgccgacggaaaggacgcggcgaagcatcttcgctacctagacacgttcctcgatgcgacgagcgaggccaaaaccattaaccgaaccaagcttaacgtgtgggctcaggtagagggtaagaccctccgagaagactcgcacatgccggagcgcagagtcggcccaggaaagggcgagacgacttgctaccgcagcatagtgagctggttggacaggaagatgtcgagcttcgagtacggcgctgtaatggaccccaaggccggcataccgctatcgttgacgaagttcaatgaaaagatggaaaacgcacttcgaagatgcgaagagcccgaagctcttcaggtcgttgagcgagtgcacgagatgtggaaggagtatggttggtgctccagcagatcgcagtgtcgcgaagaattcatctcggagaatattgtgcgacttcttcatggcttaaaggtcaacgaataccctctcccacaaattcgcgaggtagccaaaagaccttccaccaagcccataacaaaacaagcgctacgtgctatgtacgacagcctgctgcaaacgccatgcagcatctgggtatccccccaagaaattctttccggaatcataccatccgattaccgcatacacaagtactgtagcaacgagtgccgaaacgacgtcgtagaccgcatgcgacaaaagaccgcggcgatattcgacaaactgtcacacgacgatgagggcagcgaattgatctgggactggcagcgcgctctcaaagctcagaatatgacgtgcaaaggccctgagtacaacgagattgtgactgaaacgacggtattctgtgcacctggatatgcggcgatagagagacctgcgtggttgcttttcccgaagtcagttccatccaagaaattcattctcaagacgtttgcaccgcacgtcgatgcgctggctacttcgatgcctgagtatatgcgcagacctgaggaggatcaggaaacgcagcggaggcttgcgcgccggatgtcggagagcgtgtgcaataagtgcctgaggccgctactgcttggcgggaagaaagatcaagatagcggactcgatgaagtggagtacaagcgagtgaaggcgctgtatagtatgacctgcgcgaagatggaagtgggctcaacgctggcgaaagagcctcaagtacggagaaggctagggctgcaataggacgggaaagtggggctggatcgtggggtttagcgtggattttagcgtgtcaccttccatctcatctcgtctgttg

SEQ ID NO: 11492 - DNA, 3910 bp, Oryza sativa
  ref <308>: DATABASE ACCESSION NUMBER: AK108840
  ref <309>: DATABASE ENTRY DATE: 2002-08-28
atataccgctgcacaacagcttcaggctgcatcctgctgccatcgcccacgctcgctacactcgcccagcagaccttctcccaaccgagtctgtttggccctttctggcaggatggctcagatcactactggcactttcggttttcctcgcattggcgcgcggagagagatgaagacggcgctggagaagtactgggccaatagtatgtcccagaacgacctgatgcaggtctaccaacaagtcactgcagcagactgggaactgcaggcaaaggccaacattgcacgcattggcattgatggcactctatatgatcagatgctggacatgaccttcaccctgggcctcaccccagtgaggtttgccaacttcaatggcctggaggcatactttgcaatggctcggggagccagcggcgttggcgccctggatatgagcaagttctttgacaccaactaccattacctggtgcctgagctggagggcggcttctcctgcaagtctcccaacttcgcccaactgctggacaaggtggcgcgcgcccaggcgcttcttggaaagaagcgcgccatcccaatgctcatcggccctgttacctacgtcctcctgtccaagcgtgacctggcactcgagcacgccgttgagcgcctgctgccgtgctacgcccagctgctgcgcaagctgcagctgcttggctgcccagaggtgcagctccacgaaccctgcctggctactgatgccggtgccgctgctcgcagcgtctacgagtttgcctacgcccagctggctgctgtcggctgccccatcgacctcgtcacgtactatgacgatctgggtgctgcatacccttgggcggtcaagctgcctgtggcggccgtaagcctggacttttgtggcgtccctggcagcgcagcaggcaatgccacactggagctcatccgtcagcacggcttcccatctgacaagcgcctgggtgccggcctcattgacgcccgctccgtgtgggccgatgacctgcctgccgccgcggctgtcttgcacgagctcaccacctccctgggcatcaccaacgtcagcgtgcagccatcaaccaccctgcagcacctcccctacaccacagccgcagaagagggacacctgccagctgacctgctgccaaagctggcctttgctgtgcagaagctggaggcactggctgccctggcaagcggcgctgtcacacctgcaagtcctgctgctgcccaggcctggggccagcctccagatggcgctgctgctgccaagtctggcactctgcctggtgtggatgatgcactgctggccaggagcgagagctatgaggtgcggcggcccaagcagccgcagttccacgcctaccccacaagcaccattggctcgttcccacagacagcggaggtacgccgcctgcgcacgctgctgcgcacgggtaagctatcccgcacagagtatgagcgtcaagtggaccagcagattgcctttgcagttggtgtacaggaggctgtggggctggatgtgctggtgcatggagagcctgagcgcacagacatggtggagtacttcggtgtgcagctgggagggctcgccttcacactgcagggctgggtccagagctacggatcacgttatgtccggccgccaatcatcactggcgatgtggcattcctgcagcccatgactgtgcgtgagtttattgtggctcagcagctgactgccaagcctgtcaagggcatgctcacaggccctgtcaccatcctgaactggtcctttccccgcaaggacatcagccgagcagcacaggctgcccagctggggctggcactgaggcaggaggtggaggcactgcagaccgcaggctgcaagatcatccaggttgatgagccagcgctgcgcgaggggctgccgctcaaggtggagcgctgggcaggatacttgggctgggcagtggatgccttcaggctgagcaccagcattgcaaagcccagtgtgcagattgtgacgcacctgtgctactcagactttgaggacatcatggagccagtggatgcaatggacgctgacgtgctgaccattgagaacagccgctctagtgatgccatggtgtcagccctggctgctgccaactatggccgcgatctgggaccaggcgtgtatgatgtgcacagcccacaggtgcctgacgttgactggctggtggagaagcttcagggctttgtggacagtggcgtgctcaagggccgcccggagcacatctgggtcaacccagattgcggcctgaagactcgccgctggtcagaggtgatcccatcactgcgcaacatggtgcaggctgcagcaatcatgagggacagactggcagcacctgcagctgcacctgccgacactgccaatggcagtaaggctgcggcttcagcacccaggggaggatgcactgctggcggctgttgccactgaacagcagctgccggtgggcacatgaggcctgcctgtgtgacacggcagggcctgcagtaccgtactgtgacagccatatgttatagagctggtggactggtgcaaagcacacctggtgacgataggtgctgatttgtgaataatagcttagtagttcagcagtcttgctgccttgctgctgcagggtggtgcctgataatgggtcgttggggccgtttaactggcagtggtgcatttgtgacatgtcacaagcaatggtatgcttgcagcacaggagagttctgcatgcaatgataggattgttctggcacaagcgtgtaggttagttacatagccaaacaactacaggttacagtcaggctgctgaaaataattgtgatgtcatagcaggctacagcattcatgatgacgtggtacgccattcaagctgtgccaagtccgtcaggctggtgtcttggattttttggatgttgttgtgccctggtctgtgcatggttgggtgcttgcagcaggtattatgccaaggaacatacagggcgcattttcacacacaaagagcggtcagaggcttgttgagggcatactgtaaggctagctgctagcctgcttggagagtacatggtttatattggcaggcggcatgtttatattttcgcgccgtagcacatactatgtgcaagagcatgctgctgttctgtcatggccctgtgtcaggtgcagcactaatttgtcatgctgccaaccgcggcagcagcagcatagttcattgtctaggagatcactatgtctgacaagtttattgcgctgcatggtcaccatacctggcgtataatcttggcggataatcttgtgctgccagacgcagatcacctgtaatcagctaccgtagctggtgacgagcaccctaattgctgccaggctgggtgctcaggtcatctgtgtcatgccagatcatactttgtgtgttgcactttgcatgctgcacatggtgcagtgctgtggcaaagcaagctgggacactgctcactgtgccatatggcgcaccatgccatgtggcaaattgcctgtactacagctggcctggggccagcgatggcacgcaatctgcactgtgcagggtaccactgctgagcattcaatgctcacacacagcggctgtgactgcggatgcatggtcaacaaccaccctggtcatcagaggatagcatgttgttggtactaccaactggcagcccctctttggaactgttgctgccagtggcactgtgcctgcaaggcccagtttgagcctcaagctagtagccaagtcacctgaaagtattggtccagggtgtctgtgctacatgggagcatgcccatgcagtgatgcaaatttcccccaagccatatgggacatgcatgctgggacagcaacattgctggtaactgtgcccgggc

SEQ ID NO: 11493 - DNA, 2782 bp, Oryza sativa
  ref <308>: DATABASE ACCESSION NUMBER: AK108841
  ref <309>: DATABASE ENTRY DATE: 2002-08-28
atccatctcgcccgcccatccgcccaacccgcgactccatcttccgcccgccgtgccatgcgaacccgcccctcgtgctccgccgtcagccgtcgcgctggctcctctccctccgccctcgtcgcatcgtccgccgcgcgcctgggggatgaatactagcggctctgcctacaccaccctcgagtcgctcctgctgttccagtgcctgcgtgcgtatggcgtcggccactctgtcttcggccgcatttcggatatcctgaagaagaaccccgacatcgtcggccacaagggctaccacagcggccgtctgagccccgatgccttgcgcaacttctatctggagcgtctgaggcgcgagatcgatcatgaacactctgatgcaaatgaagacaccaacggcgatggcgcaaacccgcgcaagaggaagaaggccactccgccgctgcccggcgtccaagaatccctccagcattcgcacctcatcccgaagcttgtcaacaagctatacgcctcatatcgccatgaagtcaccgagcagatcagagctgaggaggagcggtacgacagattgcagcgcgaactgcagagcatcgagcgtggagagtgggacgacacgctgaaagagcgcgcaaagagcaagacggcagcgtcgcgaagcccatcccaggcaaagaaatcgccgagactccaacagaacgagtcacagcccgcagacggaccgcagcctgcttcaaatggcacccgcagccagtctggcagcgattcaacaccagatggagccctccaggccgaaggaccggccgcgccagtatcgcagaatggacataccgccacctcaccccgcaagaaacgggtggcccttgagcaaagaccgacgaccacgcctcagcctctcgctgcatcagcttctccccagccaaacctcgcccagccgctagcaccaccgcctccacgcttccagcagtctcctcacccaccatacaacggtcagccgtatcccaaccagcattatccgcaaggcccgcagccgcaccacgcccagtctccgactgtaggacatggaccacagctgcaacctcagcctgtgccgtacaacaacaacaacggtccacctcagtatggtcaccccggcgcaccagctccatactccccttctccgggtcagcaacgctaccagcaataccctccaggtccacagtcaccgagcgtgcatgttccctatcagcagcagagaccaccataccaacacccttcgcagccacagcctcccacccatgcgccccaatatgccccgccgccaccccaagctggcttcatgcttccaccttttcaagtgtctccgcaagatccagctagagttcaccctcagtcaaatgcaacgccgcatcactctcaagtttcgacgcctgtcagcaatcgccacaatcaaggtgccagatccaatgtcaacactccaggcactggcagaccgggcgtgcctcctatgcatccgcttgttacccaggcaaggcagtcgttctctacgccactcaactctcgctctccacacagtgccattggtacaccgacatcagctaaaagcatgtggaagaagtcgatcagtcacgcaggaacacctgctgccagccctcggccaataccagagcctatcgacgactttgtaccattggtgacgcctaagcacagcccgagtaagcccaaatcgcaacgcaagtcgcgagcgaaaggcaagggcaaagagaaggagcccgatcagacccctgcggaagatccagtgccggacccagttccggcgtccgaaccgcatgcagaagagacgatcgagcacgagacacgatcgggtcgatcacggcggagagcaccgccgaaacggaacaggcctggaagcatcgcctcttcgcgcgccggtggctctgtgcgcgatcgtagccggagtcactctatcttgtcgcacactgagacggttgcagccgacaatgagtctcaagcaggtcatcgcatcaaatctgagcgtgcgacctctgtggatgcgattgaagaagactcggtggaaacgccgtcgcagatgaccacacgtagacgaggcacggcttcaagaaggaagcgcaatgcacgggaagcatcgctggacgaaggagacgatcatctaagcacaccaggcccgccacgcaccattattgcaccacgctactttgcgcgctcatgctctaatatcatgcaggatatacagtcgcacaagcacgcttctacgttctcctccgcagtccggccaaaggatgcagagggttactacgacatcatcaaacgtccaactgatctcaagtctatccagaaagccatcgcgttcggagccaagcaggtggccagcgcggcgtccgacactccagctggtagtcccggcggaggaggaggcattgtagaattgccgatgatcagcgagaacatgccgcccaaatccatcgtcaatgctgcacagttcgagaaggagcttatgcgcatgtttgtgaatgctgtcatgttcaatcccggggaggagggtgtcgtagaggatgctagagagatgttcgagacagtgcaagggagcgtgagcagctggcgtaatgtggaggggcccggtggcaggactgaggtcgaggatactccaacgattgaggagggagaggcacctctgggcaagagaagaaaggtctaggaaacccagatgcaacagaggtcgaggaagttgagcgagtatgcgtaggtgaaatgacacaacttagtaatcacattgataccaatatct

SEQ ID NO: 11494 - DNA, 4187 bp, Oryza sativa
  ref <308>: DATABASE ACCESSION NUMBER: AK108842
  ref <309>: DATABASE ENTRY DATE: 2002-08-28
aacatccacacattacgtagcgaatgctgctgtgatggccagacaagtctcagcctccatccggtgccgtcgcagttagtctagagctcccggcttgaccagccagcctcccccgcagccgcccaaggcgaacgacgtgccccggctccggcccggcaaacaccacaccccgcgtcactggcatcccgccggtcgcttggctctgccagcatggacgactacccggcattcagcctggaccacaacatcccatgcatcattctgtttggtctgtcgccgccctcaacgccacagcccgccctccccgccgatgtcaaggaccagggcgtcctgctccgctccgaggccccttacgtcgagagcaagcatggcgctgcactgctcgagtacatcacggggcgcgacgcctccaagctcccatggaacgccgcccccggtgcaagaggataccggttcagggtcaagacctgcggcggtaccttcatgcttccccctcgtcgggccaggctccccgagcacatcgatgcctcggagccgcggggagcactccactcgcccttctccccactgagcccgtcctgccgcctctatccggatggcatcatcgacagccggtggctcgagaagcagcaggagctcgtcccgagcatctttctgtgcttctaccacctcgcctcggacccgacactcgccacgctgcatgacaacaagatcaagatcgatataagctccatgcgtaacgccctattgcagcagggctacaaatccaaaatcatagtcgtgattctcagcgacctgcgtaccgcctcgcttgacggaacgcgggaccgtctcgacaacatcaggaagggctgcgcgctcgactccaagtgctttttcttcatgccctcggcctattcgcccgaggagttcaagaagcagacggacaatctcctggttaccgtgtacggccatgccgtggagcactaccgggacctggggcggcgggcaaggaagaagaaagggcgaggtgtggtgccacagcccacagtgccgccgacttcgggcacatcacagacgctctctctaccgggatggaacgtgcggtacgacttcaagtcggccgtgttcgccgagttccgtcaggagatggaccaggcgctgcgatcctttgatcaagcctatgatactctgaccggggccgacgtgttggatatcatccccagctggagcccgcgatggaacgaggcccggcagctcgcagacataattagcattcgctgcctgaggtgcctgctgtgggtcggccagacgagcgcggcggtgcgccgctggcaggcccatcgcgacaggatcagcgacctgatcgaccgcagaggaaggggtaccgaaagctatgggtgggcagcctgggaggctcgttgggctatcataatggctgagctcatcgagaaggcccagatcaccgacctctcaccgacatcgtccaacttgttcctccagcctgaaaaggcgtcgttgggaaaccgactacagccttgggagtttctacatcatccaggatactggtacaaggccgcgtcacaacacttgtacgctcgtcgcgcgtttgccctcaagatgccagaggaagaccgggagagacctggcaactctccagcagcaagagtggccagcaaggcgttcacctacgatacgtacatgtgtcctgagccgcatgaggaatacccccttccaagcgccggcaatggcgtgaaccactcacagttgatagctcagtgccttgatgctgcgagagtggagttccagaggcgaggccagactcgtctatgcgccgatgtcacgctacagttggccaaggagttttcctcggcgcacaagtggcagtccgcagcggattttctgaagcccatgtggcttgacatgtcattcagggcggatggttggacagacatcagccaagagcttgcatggctgctccgttccgccgcccgcgagatccatgatgccgagctcctcatatcaatcgagtgggagctgctgaacaggaaataccaacagaggcccaaatgggagtacgacctctcaagggcgctcgacggggtctcgaccaaagaaaagccagctgtcgatatcatcgacgagtcgagccttcccctcatctcaagctcgttcgtctttcggtcggaggagggaaacgccggtcgcacctccaagggacagctctcaatcacctccaacgcacagccatcctctgccgcgctcgtatttagtggtatccaaatcacattcgacgggagtatcaagacgatacagctgaagcacgatagtgcccaggcggaaaagagacagtacggaagagcaactgtttcaagcctcggcctgcgagaacaagtcccagaagcacgaagaggtgatgatccagacaaggagaaggctgctccagccgctgtatccgtcttggttggcagctgtgacctcaccctgccccctgggcagactgtggtttacgagatggacgttccgctccgggagccgggcgatgcaaaagccctagcagcaacactttcaatggataatgacgccttcagcctggaatgcgaagtgctgtacaaagagaccagcattgccgggacctggtacacaccgggcaaccctcggagggtcccgcggccaaactcgcactcgatcaggatcctacctcgaccgccgaacgtggagatcaagctgaaaaatgctctggaacagtactacgcaaacgaggcgattggtctagagcttgatattgtgaacgccgaagacgcatcagcagagcttcgactcaacgtggtcattactggcgaagagccccctgacttcagattggcagccggcaacgatgagaaatcctcggtagcccaactagatgcagctggagagtataaggagatgacaattcccctcggtacagttgctgccgcaggaactgtccgggcgacgatccacctcgaccctgtcgactttccatcttcctacgacgtgacattcatggcgtcatatcacctggttaccgaccctgcaacgcctattatacagactgaggatttcaagctagtactggtcaatccttttgaggcaaactacgacctcctgccccgtctgcacccagacccctggccgagcgtcttcgaccacgaaggcgtccagagtctgtttgtcgaagacggcacctacatccagccgcgcggcctgtttcaggcgtggtgtctcgtcacccgctacgcgtccttcgcatccgaagacctagtggtactagatgtcgacgtatcaatcacgccgaccacaggggtgcagacaagaacatcgggaaagcaaacattacccgagggcggtcataccgttaaacctaaaaccatcgaggaagcccagttcgacatcacggcgcagaagttcagcttggacgagcgtgatcccgttaacctcgacgtctcattcgttatcaattggcgccgagccagcgacgacaagtcgcgggtcaacaaaaccacactgccggttccacgtctggacatattcgggcccgaaccccgtgtcctcgcgtccgtgtcctacgacagtgcgggcggggatcagacgcaactagggcttgcacacctgcacatcaccatcgagaatccttcaagccacttcctgacatttggcaccaacatggagccgaacgacgagtttgccttttcgggctctaaaatgagcaccgtgcaccttctgccttactctcggcgggttgtgacctactccatattgccgctcgtctggggcacctgggtccgcccgaacctaacggtacgggacaagtacttccaaaagatacttagggtgatcccgaccgaggggatgaagctcgacaaggagggcttcctcatctggatacctccattggaagaagacgaggaagagtcaggggacgatggggacgacgatgaagaggagggcgacgaggacgacgatgaagagggcgatgatgatgatgatgatgatgacaaagatgacgaagatgaagacaaagaagcttaatcagggtaaccacagatgggctctgagcattggttggcggaagggcagcactgacccttattgggaatcttgattgcatcaggaaagaaacgcaagtattgggggcggtataggttagatactgcaccgtgtcatgccacaagacgatacagccg

SEQ ID NO: 11495 - DNA, 1183 bp, Oryza sativa
  ref <308>: DATABASE ACCESSION NUMBER: AK108843
  ref <309>: DATABASE ENTRY DATE: 2002-08-28
atagaggaacaacgaaagatcaagagagagagagagaggcgaaatcaaggcccttttcttttcttgcgatttccaccatcgccgcccaaagcaaaagattagataagcttaatccccacaaaattataaggattgttagacaggaggagtaatcgatcagagaggggagagggaagagagatcgatcgatgaagtcgccgttgctgaggctgaagggcttcggccaccaccagcagcacagggagaggaagtcgcggcagccgcagccgcagccgacgccggccaagctcgacgagctcgccgacgccgcccaggatgtggaagaaatgaggaactgttatgatggcttcatttcagcagcagctgctacaacgaatggcgtatatgagtttgctgaggctttagaggaactgggaagttgcttacttgcaaaacctgtgctaaatgacgacgacgacgatagtggcagagtgttgatgatgctcggtaaggcccaatatgaactacagaaatccgcggatagataccgaacaaatatcatccacacaatcacaaccccatctgaatctcttcttaaggagctgcaaactttagaggaaatgaaacaacaatgcgacatgaaaagggacgcatatgaaaccatgagggcatcctatagtgacaaaggagggtcaaggcattccaaaaccgaatcattctccacagaacaactggacgcttcttttcttgaataccaagaggattcagcacttttcacatttcgcttgaaatcattaaagcaagggcaattccagagcctgttaacacaggctgctcgccatcatgctgctcagttaagttttttcaggaaaggactcaaatgtctcgaagcacttgaacctcgtgtcaaagcaatatctgagaaacatcacattgactataacttcagcggtctagaggatgatggttctgacaatgatggctacagtacttacgattcttgtagtgatgacggagaactgagtttcgactatgaaataaacgatagagaccaagattttcttacttcgagaggttcaatggatgtaagttccatttatatttggttactgtcttttaatttgtttgtgtgccttacagcagaggccatggatgtaaaacatttccattaaataataaaaaaagcccttttaatgctgctgcc

SEQ ID NO: 11496 - DNA, 1421 bp, Oryza sativa
  ref <308>: DATABASE ACCESSION NUMBER: AK108844
  ref <309>: DATABASE ENTRY DATE: 2002-08-28
ctttctaggcctggtgccattattaatctacctttaccactaattcacttccacatcctcgtcgccggtcgacagccaatcaacgttaattttcagctctacttgctcagttcaatcttcacaaccaccaccaacaactcgataatcgcgcaaactcgcattcttcacgaatcgctacagcttctacagcattaatttcgtctatccattagtttggcccggacgaatcgaaagatcatcgctatcatatctcaatctctaaagaaagaataatcaccacattcacaatggcatcaatccaactcaacttcactctccgcacttcctccaactgcaagaccgtccatcttctcggctcatgggacggctaccagggacaactcccactctccaaggaccccaagaagtccggcggctggaacggatgcttcaagttcaatggtgccactcttcaacaaggccagcgctactggtactactacatcattgacggctaccacgtttcccacgaccccgctaaggaccacactaccgagcccactaccggccgcaagctcaacatcatcgacatcccagctgcaaagtcatcctcaaaaagctcaagctccgaccgcaagtcccgccgcgtctcaaccgcctccattccaaagggccgtggcgtctctcccgagcgcatcgtcgcacccaagccccagcgcccaggccagacccgacaagtcatcaacacccagtacgacaagaccacccttgaggagctcaaccgccgctttgccaagcagtccatggaggaatcttctgatgaagaggatgacgactccgaatatgactccggctccgatgtcccatccctcacctcccgctccaccaactcgagctcgcccagcagcatcagctctggcagcagctgctgcacatgcgagcgctttggcatcacccgctctggtgatcgtgtcaagctcgactgcggaggtgcgcgatgcggatactctgatgactcatcagattgctcatctgaggacgagtacgtgtacgaagagaagacgacccgccgccagggcgtcgtcatccgctcctagatgtgcaacttcgacatcaggacctcatcatcgtgaattcaacatgtctgtcgcattcgcccttgcgcttgcgtcgaccctctttctttctgtgcatattatgataacgacttttttctttcctactctgttcgacaaatgtatccattcattggtagatatgactttcttgctgctggtattgttgccgttagagattttactctggggaggaatacagcgagccactctttttgcgctggctacggacatcacattatgtgcccgatgtcttcatgcgacaatgcacgctcatgtagaaccatgtataaacaaattaacgaattcgcatggctcgtgcgcaag

SEQ ID NO: 11497 - DNA, 1265 bp, Oryza sativa
  ref <308>: DATABASE ACCESSION NUMBER: AK108845
  ref <309>: DATABASE ENTRY DATE: 2002-08-28
acagtgaagtgtcaacacagtgcgcgcgtagccatgggcaccctcgtcggccatgtcgcgccgggcgccggcttcctcctcgtcggcctgtggcacctctacaaccacatcaggctcttcctgctcaggccaaccgcctacgtcgcgcccgtctggttccccgtccggcgagcccgctacctcgagctcgccctcgtcatcgccggcgccgtcgcgtccatcctcatggagctcgtcgtcggcccggcgaggcaccagccgttcgacgccgacggcaccgtgccgtccgaccacctccacaacttcgagcacgcgtccatctccctcgcgctgctcgtctacgccgccgccgccgccgccctcgacgtggcccgggtgccgcacggccgcgccgtgtcgcagctcgtcgccgccgtggcgttcgcgcagcagctgatgctgttccacctccactcggcggaccacgcgggcgtggaggggcagtaccacctgctgctgcagggcgtcgtggccgtcacgctcgccgcgacggtgctcggcgtggccgcgcccaggagcttcgcggtgagcctcgtgcggtcggcgagcctggtgctccagggggtgtggttcctggccatgggcgtcatgatgtggactccggcgctcctgcccaagggctgcttcctgagccgcgaggacgggcacgacgtcgcgcggtgccgcgccgacgacggcggcgacgcgctcgcgcgcgccaaggcgctcgtcaacctggagttcagctggtacctgtccggcaccgtcgtgctcgtcgtcgcgctctacctccggctgtgcaggctgtacccggaggagccgcgttacatgccgctggtcaggggagattgccgcgacgacgatgaggacggcggcggcgacggcgacgacaacgacgtggaggctgggaaaggtggcgccggtcacgtcttacgtgagcctttggagatcgcgcggccataagcgatataatcatcttccttactccctccaccctataatataaatatttttagctataaatctggacaattgtgtatccaaattcatagctaaaagttgctatattttgggacggatgtagtatctaaaaaggaaaaaaaagtgttggcttggttgggtccagtgcaaacaaactatagtctgtgatgtaaatgagattggtagttgcagtctttgtgacttgcaacttgagggtactgtggatttgtggtttattaattggtcaccttatttgactacttgtg

SEQ ID NO: 11498 - DNA, 1895 bp, Oryza sativa
  ref <308>: DATABASE ACCESSION NUMBER: AK108846
  ref <309>: DATABASE ENTRY DATE: 2002-08-28
attaagcaagcggcaatacacaaacacacgggtagctaagcaagctagcctcctgaatactgtcatggcaatagagtcagctccggcgcgaaatgagcggcgcggtcagcacgtcgtgctgctggcgagccccggcgccggccaccttctgccggtggccgagctcgcccggcgcatcgtcgagtacgacggcttcacggccacgatcgtcacccacaccaacttctcctcggcggagcactcctccaccttctcctccctcccgccgtccatctccatcgccgcgctccccgaggtgtccgtcgacgacctccccgccgacgcgcgcgtcgagacccgcatcctcaccgtcgtccgccgcgcgctcccgcacctccgcgacctcctccgctccctcctcgactcccccgcgggcgtcgccgtcttcctctccgacctcctcagcccgcgggcgctcgccgtggccgccgagctcggcatcccgcgatacgtcttctgcacctccaacctcatgtgcctcacctccttcctccacaacccggtgctcgaccggacgaccacctgcgagttccgcgacctcccgggccccgtcctcctcccggggtgcgtgccgctgcacggctccgacctcgtcgaccccgtgcaagaccgggccaaccccgtgtaccggctcgtgatcgagatggggctcgactacctccgcgccgacggcttcctcgtcaacaccttcgacgccatggagcacgacaccgctgtggcgttcaaggagctctccgacaaaggcgtgtaccctccggcctacgcggttggcccgttcgtccggtcgccctccggcaaggcggcgaacgacgcctgcatacggtggctcgacgaccagccggacgggtctgtgctgtacgtgtgtctgggcagcggcggcacgctgtccaccgagcagacggccgaggtggcggcggggctggaggcgagcgggcagaggttcctatgggtggtgcgctaccccagcgacaaggacaagacggccagctacttcagcgttagcggcgacggcgacggcgaggacagcccgacgaactacctgccggaggggttcctcgagaggaccaaaggcaccgggctcgccgtgccgatgtgggcgccgcaggtggagatcctgaaccaccgcgccgtcggcgggttcgtgtcgcactgcgggtggaactcgacgctggagaccgtggcggcgggcgtgccgatggtggcgtggccgctctacgccgagcagaggatgaacgccgtgatgctgtcgtcgtcgcgcgcggggctggcgctgcggccgagcaacgcccgggaggacggggtggtgacgcgggacgaggtggcggcggtggcgagggagctcatcacgggggagaagggcgccgcggcgcggaggaaggcgcgggagctgcgggaggcggcggccaaggccacgcgggcgccgggcggcccgtcgcgccaggcgttcgaggccgtcgtcggtggcgcgtggaagaaggccgccgccgctgcacgtggcggtcgtgccggcgagcccgacgacaacggaacagcagtgacggcccaatgatttgtgtcggtgtcggcagatcgatctggttcgttccctcgcgcgcgcgcggcgttgtgggctcgtgcggttcccttcttccccccggttgcaaacacgtttgtctgcttggttggtggtggtctgatgtgtgtcagtgtcacgcctagctaggcctagcttgtccaaccggagctttggtgtttgtacgtaccatacgtgttgtgctcggtaattgtacattaagggtgtttagttcacgttaaaattgaaagtttggttgaaattgaaatgattgatgtgacgaaaaagttagaagtttatgtgt

SEQ ID NO: 11499 - DNA, 493 bp, Oryza sativa
  ref <308>: DATABASE ACCESSION NUMBER: AK108847
  ref <309>: DATABASE ENTRY DATE: 2002-08-28
aatcaccgatcgatcatctctctcaagtccaagcttgctcatcgtacgtatcatccatccatggcgatgccgtgggagctcgccgagtacctgatggccgtcacctgggtggcgctcggccggtgggtggcggcgtgtgtctccctcgccgacgggatcgcctgctcgctgcgctgccgccgccgccgccgccgcccctcgccggcctcatccactgtcgtcgtgtcgacatttctgtagctagcctttgattgcaaagctctgtaggtctgaggtctcgtgaggctgtgtggtagtatatatgtaaaacttgcatgtactcttcccttttttatcgaagagaccgcgggtcaatttgctgggatttgttggcctcttttctgaacatttactattgagttcgtttcttttttttttctttttttttgggagagggggagggagggggttggtaatgacatgtgagtttgttcctgtactgaatattctttcc

SEQ ID NO: 11500 - DNA, 1109 bp, Oryza sativa
  ref <308>: DATABASE ACCESSION NUMBER: AK108848
  ref <309>: DATABASE ENTRY DATE: 2002-08-28
ctggcagagctagtaggcacacttgtgcattgtgtccgtcatggacatgagcaaggccaggcgccatggcgtcggcgtcggcgtccggctgaggcagcggctgtcgcagatcctactccactcttcctgcaccaccacatcggccacggcattcgtcaccaatgtcgccgtggcggccgggaacgccgccgcggcgcgccaagcaccgcctcccgccgccgccaacgacgcccatcagccgaggcccaagatcgatggcagtgtccggcgtcggcgccggcgcagcgcgcgggctcttgttcacatctccatcgactgctccggccccaccagcgcccgctctgtcggcgccgcggtcatgccatctccggtgcgccggccaaggacgtgaaggctgtcatcaggagcaaggctcgcggtgggaggccgcggtcgccgtcgtacagctgctcgtcctccaccgtcaccgacgacgagctcccgccgttcagcagcagcgacggggagggcggcgagggggcggagacgaggtcgtcgacgctcttctcctccctcagcatctcctccgactccacctccgatttctacaacagcaccggcggcgggtcaaagcgccaccacaagaacccacctcgccgcgtgcctcgccgcgcgccgccgagaggcgccaatgccggcgacgcgaagccgcacgaagacaacaagggcggcgcgaagaaagccgacgacaagcacggcggcggcgtcgtcggcgtggccgcggcgggcagcatggcggtggtgaagcggtcgcacaacccgtacgccgacttccggagctcgatggtggagatggtggtggagcggcgcatctgtggcgccgacgccatgggcgacctcctgatgtcgtacctgtcgctcaactcaaggcgccaccacccggccatcctcgccgccttcgaggacgtctgggaagccgtcttcgccacgccctgatcgatcgatcgatcgatcgatctccatccttgtaacaaatgcaatgtacagcttgttcttccaagcatcgattgttctccggaacatgtaacttaatttattattagtagccgcttaagaatttatttatcctt

SEQ ID NO: 11501 - DNA, 1084 bp, Oryza sativa
  ref <308>: DATABASE ACCESSION NUMBER: AK108849
  ref <309>: DATABASE ENTRY DATE: 2002-08-28
tatatcttgtcgtcgccggagccgccgaggctgctgccggcgacgtcgatgacgaagcggtagcggacgtcgttcttctccagccgctccatcgcggtgttgacgtagtccatcttgatcacctccacctcggcggtgattccgtgctcgccggcgaagtcgagcatggcctggcagtccctgatgccgccgacgcagttgccggtgatgcccttccctcccgggacgatggcgtacgccggcagctccagcggcctggtcggcgcgccgacgaacaccatctgcgccatcggcttcatcagtgcgaacagcggcgcgaccgggtgccacgccgacaccgtgttgaggatcccgtccatggtgcccgccgccgccgccatctggcccgcgtcgcggctgacgaggaactcgtcggcgccgaggtgctccagcgcctcccgccgcttccccggcgacgtgctgatgacggtgacgcgcatcccgaacgccttgacgaacttgacggcgacgtggccgagcccgccgaggccgaccacgccgacgtgcttccccggcgcgttcagcccgtggatcaccatcgggctgtacaccgtcacgccggcgcacagcagcggcgccgcgccgtccagcggcagccccgccggcacgcggagcacgtagtgttcattcacgacgatggcgtcggagaagccgccctgggtggccgcgccgccgtagtccttgccgttcgacgtgatcaccatcgtcgggcagtagttctcgtaccccttgccgcagctgtcgcaggtgcggcacgacccgacgaagaagcccacgcccaccgtgtcgccggccttgaacttggtcacgccggcgccgacgccggtgacgacgccgacgatctcgtggccggggacgacggggtacatggcgttgccccaatcgttcttgacgacgtgcaggtcggtgtggcagatgccgcagtagagcaccttgatggtgacgtcatcgtccttctgagccctgaaatgtttttgtcagcagcagcagctgataagattatccatcagacagattagccttaaaagtgacagttcatagcctc

SEQ ID NO: 11502 - DNA, 845 bp, Oryza sativa
  ref <308>: DATABASE ACCESSION NUMBER: AK108850
  ref <309>: DATABASE ENTRY DATE: 2002-08-28
ccgcagctgacgtactgcatcacacagttcatcgagaaggaaaccaagcttgcagggactgtaatcagaggcctgctgaagtactggccagttacaaacagtcagaaggagatgatgttcttgggggagttggaggaggtgctcgagttgaccgacatggctgagtttcagaaatgcatggtaccgctgttccgcaggattgcaagttgcctgaatagctctcactttcaagttgctgagagagccttattcttgtggaacaacgagcacttgttcgatatgatctcccaaaatcgtcaggtgatcctaccgatcatatatccagctctggagaggaacacccgttggcactggaatcagtcggtcctcaatgttaccctgaatgtcaagaaaatgttcttggacatggacgagagattgctcctggcctgccagaacaacttccaagcggaagaagagaagcgagccgcgaccgaggagcggcgaaggctgatgtgggagcagctggagcggaatgccgctgcggcatgccatccacatccagtgatcaccactactgactcaagctttccttcacccccttcatcaactcctctggtagctcccactgtgacatgacatgtggatcaaatatactccatttccacttatttgttagctagctagatgatgatgaagttgcttgcttctcctgggactatacagaaggcattttgttaccttcgtaaggcccccccatgtcaaagtctgtaattaatagttgatggtttgaggacaaaatgacacttgattttttcttctttttttgtggtgtattctcgagtaatgggcattgctttctaggc

SEQ ID NO: 11503 - DNA, 830 bp, Oryza sativa
  ref <308>: DATABASE ACCESSION NUMBER: AK108851
  ref <309>: DATABASE ENTRY DATE: 2002-08-28
aaccacggtttgccacatagtagtaattaatcagctagtcagcttacacttgtctacacgcggcgagcggccatggacgcacctcgccggcggagcaacggcgcgtgggagatcaacctggtgcggcggagcccggccacggcgcggaccgaccgctgctcgaggctgctgctgctgtggagcgggttcgtcggcgtcgtcgtcgtgctctacctgttcgtcggccacgtctgggcgtccgtcgccacggcggtgctcctcgccgccgcgggctggttcacctggtactacttcggcgcggcgccggcgccgccggtgctccccgatcatcatcagccggcggcgccggtggaggcccgcgggctcagccaggaggacatcgaggccatcccggcgttcgagtacaggaggggatcatcgggcagcggggtggcgcagtgcgcggtgtgcatcgccgccgtgaaggacggggacacggtgcggcggctgccggcgtgcggccacgcgttccacgcgccgtgcgtggacgggtggctgcgcgaccacgcgacgtgccccatgtgccgcgccgacgtcgtcaaggtcgccggagagacgacgccggcgacggaggaggagccgcccgtgtagccgagcccgcgcaagttgaggcatacgacaagtcaacaaaacatgcgccggaatggaaacgtgtgcttccatccctgcttgtttcttttttttccacttcgtttgactttctgttttaagtgtcagcttggtatagtatggatctgatatagtgtttactagcaaggtgtatatgcgatacaattaacaaaaaagttgtg

SEQ ID NO: 11504 - DNA, 1062 bp, Oryza sativa
  ref <308>: DATABASE ACCESSION NUMBER: AK108852
  ref <309>: DATABASE ENTRY DATE: 2002-08-28
agtcgcaggccggcaggcaggtacgcacccacccgcaaatccgcacctccccaccccaactctcctcccaaacccagcacgcactcccgcgagatctctctccgccgcgccaccgacgcgccagatccaccaccgccaccgccatgtcgcacaaccacggcgacacgatcccgctccacccgtcgtcggcgcagtccgacatggacgagatcgagagcctcatctacgcggcgccctccgccaccgtcctcccggcgcggccgccgtccccgccgcgcgcctccatcccggtctccacctccccggccccgctcccggcccccgccaagccctccctccccggcgcgtccgtccccatcatcgtgccccaggcgccgcccgcttccgtctccgtccccatcgcctccgacggcttcggccccccgcccaacacgctcaccgagcccgtgtgggacaccgtcaagtgcgacctcgcccgcatcgtcagcaacctcaagctcgtcgtcttccccaacccctaccgcgaggaccccggcaaggcgctcagggattgggatctctgggggcccttcttcttcatcgttttcctcggcctcacactctcctggtccgcctccgtcaagaagtctgaagtatttgctgttgcattcgctgtcctagcagctggggctataattcttacgctaaatgtcttgcttctgggtgggcacattatcttcttccagagcctcagtcttcttggctactgtctgtttcctctggatgttggagctctagtttgcatgctgaaggacaatgtcatactaaagatcatcgtagtgaccgtcacattggcatggagttcctgggctgcatatccattcatgagtgctgcagttaacccaaggggaaaggctcaggccctgtatcccgtcttcctcatgtatatttcagttggtttcctcataattgccatagactaatggtgggctgaacttgtagtcaatacctaaaccgctgagattttcctcattgaaccaccagaatacatacaggtttgggcagagaatacgcccccttaag

SEQ ID NO: 11505 - DNA, 1150 bp, Oryza sativa
  ref <308>: DATABASE ACCESSION NUMBER: AK108853
  ref <309>: DATABASE ENTRY DATE: 2002-08-28
aaaatcaaatcattagccaaggccaagcaggcgcggctgcttagcttataaagagaccagatagtactactcagcttagcacacccaaaccgcgcgccatctcaccaaaccaagggagaagcttagctccgccaactagctcgcgctcgcgtgtagcggataagcggagtatcgatcgatggatcggacgtcagccgtgccggggagagtgagcgacccggggtccgcgtggttcggcggcggcgagaggagctcgtcggccgggccggggcgcaacgtgcggctcatcgccaccgccgtcgccgcgttcgtgtccgtgctcgggctggccctgttcctccacctctacgtctgccacgtacgccgccggaaccgcaggcgcgcggcggaagcggccgcgctggcgaccgtgaacgcgggggcgccgcccaagcaggtcgggctggacccgtcggccatcgcggcgctgccgaccgcggcgtacgggaaggtggcgggcggcgacgcggcgggcggcaccaccgagtgcgccatctgcctcggcgccatgcaggaggcggacgcggtgcgcgtgctgccggcctgccgccacgtgttccacgtcgcctgcatcgacaagtggctcgcgtccagctcgtcgtgcccggtctgccgcgccggggtggagccgccgccgccgcctccgtcaacggcggcggcgaggtgcgtgcacgagaagcaggacgcggagaaggaggaggcggccgccggtagctcggcgccggtgcgggtgctcggcgcgtcgctaatgaagatgctgagcagggagagaccgtcgccgaggaggcagccgggagtccacgccgtggaaatggaagacttggaaagccagctgccgcggccgcaacagcagtagcatatgcggcgaataatcagcggccatttttaagccattttttgtttcattttttgcttcgtttatacatcaagcgttccatgttggttcagtatgaactacataagtgtgtaagtgtttttctttattaggagaacgaaagttctccattaggtgtttggtgcttgtagctgtcaaaggaaaggagcagacccgtctcttgtatttgtacaaagaagggaaagtggataaagctctgatggaatttctctaggc

SEQ ID NO: 11506 - DNA, 1081 bp, Oryza sativa
  ref <308>: DATABASE ACCESSION NUMBER: AK108854
  ref <309>: DATABASE ENTRY DATE: 2002-08-28
ataggtcaaaacagcagcttcaccctctcgttgtgcctcgccctccagagccgaaatgaagctgtctctgctcgtcctcgcttgcgctgttgccttggttgttgcccaaccggctcctaccaacggtcccaccaacgaacaacccgttgcttggaactacgccaagggtggtgctgactggcccggtctttgctctaccggcaaggcccagtcccccatcaacatcaacacctccgccaccacctgcgtccgcgctggtgagcccgatgccaagcctttccgccttgacttccactacaagcctgctgagggtctgactctctccaacaacggccactctctccaagtgaagggtgacctcggcttcatcaccatcggtggttgcaacccttgcgacggacaaaagtaccacgtcaagcaagtgaacttccatgctccctctgagcacaccatcaacactgagccctacaaggatggtcactacgtgatggagacccacatcatccaccaaaaggagggctcctccggcttgaatgacctcgccaccgtcgtcattctgtggtacaagcaacaacccggcggtttccccaaccccttcttggagagcatcgactgggccaacgctcccgctgacaccacccgccacaccaccatccagaacaaggtccgtcttggcaagctcaaggaggctttcgatggcgagtactactcttacctcggctctctccccgttcctccctgcactgagagcgtccaatacttcgtgatgaagcgccctctcggtatcactgagaagcagctcgacaccgttcaggctctcttccagaagaaccccaacttcgccaacggccatggcaaccaccgcgacgtgcaacccgtcaacgaccgcaaggtgtggtactaccgcaagcaccattaagtgttagcacttttttctttttcgtgcctagttctctcctattctcgctatttgacccctcgtgtccctggggctggtcacgtgccttatgttcgggctgtgcttgagcgatcatttcatgtgtagctaataagcacgtgagtaaacacacaagtaattcag

SEQ ID NO: 11507 - DNA, 2413 bp, Oryza sativa
  ref <308>: DATABASE ACCESSION NUMBER: AK108855
  ref <309>: DATABASE ENTRY DATE: 2002-08-28
agcggagttgttcacttgtaggctccttccttaacctgctcaatgtatcatagccgctccaagagataggatcagttcttggctaatgcctaatgatcttgacgaatttgcatcggcagcgactctgttagaatgctcagaatggatggcacggatttgtcttccccaaggtgcaatgttcagcatctacagaatgccgaagaactgaaggatcagaatagcaccaataagaggctgccccggactacagagctcccatgctctttgatacaagaggtccaacaccttgagaagcgactaaatgatcaatttgctatgcggcgtgctttggagaaagcattaggttataagccttgtgccattcattcatccaatgagagctgcattccaaagcctactgaggaactaataaaggagattgctgtgctggagctagaggtcatatgcttggagcaacatctcctagcactctaccggaaggcctttgatcaacaaatttgcagcgtgtcttcttcctgtgacatggaaatcaacaagcagtcagcaaggtcattctcaggtatactcacaggatcttcagaactggatttctcaaccccaaggaaacaccaactcctgcagtccagtggcatggtcatggcacgcaagtctacaccgacaactctcactagcgaaaccagaacttcacattacaatgacaagactggtatcggacgcagccattcctcgctcctgcagcgttccatttgttcagccagagtatctccttcagcaaacaatcttgctagggctctcaaaccatgccatactttgcctctatcctttgtcgaggagggcaagtgcatggatcctggtattgtgagcctggcggatatcctagggaccaggatagcagatcatgttcctcaaacaccgaacaaaataactgaggacatgatcaaatgcattgcttcgatatacataaggattagggacttcaatgccgtgcaacatcccttcttcccctcaccatgctcatcattttcatcagcgagcgggctctcttccaaatacactggggatatatggagcccaagatgtaggaaagagggctatattgaggcctggcaagacgatgcgtcaggaactggcgaatcaagatacttcagtcaacaatatgattctgtgattgaggtgtctgctctttgcaagggggcccagaggtctgctgatgttaaagacatgctacacaaatacaagtctcttgtacagctgctagaaagtgctgatctcaacggaatgaaaaatgaagaaaaaattgctttctggatcaatgtgcacaatgccatgatgatgcatgcccatatagaatacgggattccgcaaagtaacagcaagagaatattgcttactaagttatcttacctcatcagtggccagagagtaaacccggagttgatagagtaccatatcctatgctgccgagtgcactctcctacacagtggctgagactactcctgtacccgaaatggaagtccaaggagaaggaagacctgcaggggttcgccgtcgacaggccggagccgctggtgcacttcgcgctgtcgtcggggagccactccgacccggtggtgcggttgtaccggccggagcgcctcctccagcagctggaggcggcgagggacgagttcgtccgcgccaacgtcggcgtccgcggggggcggcgcgggcgcgggcgccgggtgctcctcctcctcccgaagctcctcgagccgtactcgagggacgccggcctcggtgcgcacgacctcctccgcgcggtggagtcctgcctcccggagccgctccggccggcggcgcagcaggcggcgcggtcgcgcggcggcggcggcggcgtcgagtggaggccccacaacccggccttccgctacctgctcgcgcgggagctcgtgggcccacccgcgccaacggcccacctatcctccacgtaaagtttcacggcccaatgtacagagccttgtaaagttgatattttgggcccggcccaacaaacttggaaagttagttatctgggcctgaaaagaggccgtggcttttggcccatgtttgtggaacgttctacctgcttggtctctcggatggcacgaacggacgacgatttccgtcttggtggacaagaaagaaagtggaacgtttttgacttggattcttaaacccgccaatggttttccacgcgcccacgttattgaggggtgtttagatctcacatcaaatattatataggttatcgcagggtgttcagacactaatataaaaaactaactacagtatctgtcagtaaaccgcaagacggatttattaagcctaattaatctatcattagcgtatatttactgtagcaatacattgtcaaatcatggagcaatcaggttt

SEQ ID NO: 11508 - DNA, 1304 bp, Oryza sativa
  ref <308>: DATABASE ACCESSION NUMBER: AK108856
  ref <309>: DATABASE ENTRY DATE: 2002-08-28
tctttgtccgagtaactcgtattgaccaacatgcgtacctctgctctcgcgctcgtggttgctcccgctgttgtgctgggtcaaggtaacctgtacgaccagtgcggtggtatcggatggggtggtgcgacttcatgttcatccggtgtatgcaccaaggtcaatgattactactctcagtgccttcctggctccgctcctccggctactactctgaggaccacgactacagctagcacccctgctcctaccggtggctctggtggaggctctggtggaggctcaggagctgcgggtggtctgcatgagaaattcaaggccaagggcaagatctatttcggcactgaaatggatcaataccatttgaacaacaaccccttgaccacaattgtgaagaacagcttcggtcagattacacatgagaacagtctgaagtgggatgccactgagcctcaacgtggtacattcaccttcaccaatgctgatgcggtggtcaacttcgccacacagaatggaaagctcctccgtggccacactcttctctggcactcgcagctaccgagctgggtcacccaaatcaatgaccgcaacactctcacgaccgtcatccagaaccacgtgactgcgctcgtcacccgctacaagggaaagatcctccagtgggacgtggtgaacgagatcttcgccgaggacggcaatctcagagacagcgtcttcagccgagtgcttggagaagacttcgttggcattgccttcaaggctgcccgtgccgctgatcccgatgctaaactctacatcaacgactacaacctcgacagtgccacctactccaaggtcaccaacggcatggtcgcccacgtcaacaagtggatctcacagggcattcccatcgacggtatcggctcgcaagcccatctcgctgcacctggcggatggaaccccgcgtccggcgttcccaacgctctcaaggcactggccgctgccaatgtcaaggaggtggccatcacggagcttgacatcgccggcgcgtcagcgaacgactacctcactgtcatgaacgcctgtctcgccgtgtccaagtgtgtgggtatcaccgtctggggtgtctctgacaaggacagctggcgcaagagcgacaaccctctcttgtttgacagcaactaccagccaaagcaagcatacaacactttggtcggtgctttgtaagaaattccgagtttaaccagtcatatttttaagaaaataggtggacatagatgggctatttccaagatacgcttgaataaacttgagtctatttagtc

SEQ ID NO: 11509 - DNA, 1235 bp, Oryza sativa
  ref <308>: DATABASE ACCESSION NUMBER: AK108857
  ref <309>: DATABASE ENTRY DATE: 2002-08-28
agatggtataatggcaattttctcggcctgactgacgccggccgacctcgccttctccttccccggcatcggcgaccccgaattgcggctgccctcgcctcctccccgcggccaccgcgtcgtccctccgccggcatcagctcaacgccgccgtcctcctcccttcgccggcgccgacgagccgacgaccactccacgcagccgccctcgcctgctgcatcgaccctgagcggccgcgccatcgcctccgcctccgccgaccgcgtttttttcccccgatcggggcccggaggaggccatgtcgtcttccaccgacgcccctgtcagccctcgctcccagttcgcgctggcctgcttcgaggagcttctcgagaccgcggtggtggacgtggcctccgagtgccaccgcatcgcgcgcctgggcctcgaccgcggcgtcgacgccgaggaggaggagctccgcgcctgggccgcccgcgaccacccgggggccgaggagggcggcggcgccgtcggcggtggcggagggaacaagggggtggtcgatgtatttggccaggtgctccccgccgtggccgccgacctcgtcgactgcatgaactgcggacgccccgtcgccgccggccgcttcgcccctcacctcgagaagtgcatgggcaagggacgcaaagctcgcacaaaaacaacaagaagtagtaccgctggacgaactaggaacaacaatggtagcgcggcttcttcatactccccgtattccagcccagctatcgctaacagagcaagccttcctaacggtgtcactgatggcagtgccagtgtcacaggagaggatcacagcaatcacatattgccggagccctgagcacctgactgtaacaccgtgtttcagccaccttaccaaataccagtgtttgggcaccatggccggtctgcaacacattccttggtaaaactggtgcttgtcagtcacctttgtagctggagttctctataaattatggtaagaaaaactgccgttttttaatcgatggattttcgccactttgtacagagccgacaaactcttcattccggtgactggcagcagtagccatgagtataccggcaacatataaaggaggcatgagtaaccatgagtaaacctgcaacatataaaggacttccccgttcgaattagatgaaatatggatgaacggtaatctatttgtttatatgatagggatgagttaaggggt

SEQ ID NO: 11510 - DNA, 1059 bp, Oryza sativa
  ref <308>: DATABASE ACCESSION NUMBER: AK108858
  ref <309>: DATABASE ENTRY DATE: 2002-08-28
gcatacagcaacttaacctgcagctcaagcaaatctcactagctaactatacaaaccctgcaaatacagagagaaattaagattgtgatcagctactaaccactatatttgtatgggaggaagagggaagaagaagtcggtgctggcctcgctgttcgggttcaagagcggcggcgagaggcggcggcagcagcagcaggaggagatggcgacggctgcggcggccggaaggaagcagcagcagaggtcgtactactgcccggagcggaggaggagggtgtggccgagcgacgaggacaacgacaactactacgccgagcgtgacatcgaccggagggcctccgagttcatcgacaaggtgcatcgcgggatgctgatcgccggcggcgagcaagatggctagtcgatcgatctataagtatctttattgctcttgactggagagagagagagagttgcagctagctagaatatactcgctccgttctgaaatatagtataacttagaattggatggaacatcacctagtccaataaatctggatatgaccctatattgatacattgaattaggtgatgtttcatcgatttctaaattgctatattttagaactagtaagtagttctgcatggtggcattagttgttgaaatggattgactgcttatgcgtgtcttagttgaattgctcaattaatttggtacgttcaaataccaattatttgccaatatatgtaaatattttgtactctctcctttttaaaatatgaggagttttaattggataagatatattctagtgctatgaatctggatagacagatttatagtagggtgtgtctcatcaaaccaaaacttattatattttagaacggaggagtagtatttttgtgtgttgtgtgtgagagaaataatgatatgtacagtgagcacgcatatccttcaattcgtgtaatcatgtatatgtctgtagtcttcgtatttatgcaccatttttttttgttatatatcaagagttgtgagcccatttccattactaaaactgagataaaagtttacag

SEQ ID NO: 11511 - DNA, 2024 bp, Oryza sativa
  ref <308>: DATABASE ACCESSION NUMBER: AK108859
  ref <309>: DATABASE ENTRY DATE: 2002-08-28
agagctccccatctcctactccatcaccatctcccctcttttctttctgcatcaatctcaattggttgcagagctatctcaatagcctcttgagcaccgcagcaatgttctcaagagccatccgccagtcgagccgccgggtcgccgcaatctctgcctccggcaggattgcttcgacccgcgcacctgcgttcgccaacgccgcccgcacatatgcctccgaggccaaggctaccccgaccgaagtctcttccatcctggagcagaggatccgcggtgtacaggaggagaacagcctcgctgagactggacgtgtcctttccgttggtgacggtatcgcccgtgtccacggcatgaacaacgtccaggctgaggagcttgtcgagttcgcctccggtgtcaagggcatgtgcatgaacttggaagccggccaggtcggtgttgtgcttttcagttccgatcgtttggtcaaggagggcgagaccgtcaagcgtaccggagagattgtcgatgtcccagtcggcgaggctatgcttggacgtgtcgttgacgctcttggtaaccccattgacggaaagggccccatcaagaccactgagcgccgccgcgctcagctcaaggcccccggtatcctgccccgtcgttccgtcaaccagcccgtacagactggtctcaagtccgtcgatgccatggttcccatcggacgtggtcagcgtgagttgatcattggtgatcgtcagaccggaaagaccgctgtcgccctcgacgccatgctcaaccagggccgctggaacaagggatccgacgagaccaagaagctttactgcatctacgtcgccgttggtcagaagcgttccaccgtcgctcagctcgtcaagactcttgaggagaacgacgccatgaagtactccatcatcgttgccgctactgcctccgaggccgctcccctgcagtacattgctcctttcactggatgctctctcggcgagtggttccgtgacaacggcaagcacgctctcattgtctacgacgatttgaccaagcaggccgtcgcctaccgtcagatgtctcttttgctccgtcgcccccctggtcgtgaggcctaccctggagatgtgttctacttgcacagtcgtttgttagaacgtgctgccaagatgaacgacaagcacggtggtggttcgctcactgccctccccgtcattgagacccagggtggtgatgtgtctgcctacattcccaccaacgtcatttccatcactgacggacagatcttcttggaggctgagctcttctacaagggtatccgtcccgccattaacgtcggtctttccgtgtcccgtgtcggttccgctgcccaggtcaaggccatgaagcaggtcgctggttcctcgaagcttttcttggcccagtaccgtgaggtcgccgccttcgcccagttcggttccgatctcgatgccgccaccaagcagaccctcaaccgtggtgagcgtcttaccgagctcctcaagcagaagcagtactctcccatggccgtcaacgagatggttcctttgatctacgccggtgtcaacggtctccttgacagcgtcccagtcaacaagatcctccagtgggagtctgacttccttgcacacctcaagtccaacgagcaggagctcctcgaccaaattgagcgcgagggtgctctcagcaaggacctcgagtcgaagttgaaggaggttgctaccagcttcaccaagagcttctcgtaagcgtagcgaagggttgaagaatgtataatagtagatgcgtcctcgccatcagcttgtcccaatatggaaaattttgttcattttctgattgattgacatggcagatgtgcgtgaagcgtatcgcattgccccttctctctggacaaaaagccgactacccttgtgattccccctctgttagcgacctacgcgcaactccaatctggcggacaagagcgggatgggtgtgtgaagtagacatgtatattgaatcgagaatttcgtactgtt

SEQ ID NO: 11512 - DNA, 1176 bp, Oryza sativa
  ref <308>: DATABASE ACCESSION NUMBER: AK108860
  ref <309>: DATABASE ENTRY DATE: 2002-08-28
cgcttcgaattctcaatctctctcatcagctcgatctatccaactgagctattctcgcttatcgagctcgatcgatcgcttggtcgagatggagaacttcccgatactctttgcgacgcagccgacgtcgtcttctacctccagctcctaccacttcatgagctcctcttccggcagccatgaccaccgccaccaccatggactacaggcaggcggcaacggcggtggcggtggtggaagcttgagccatggcttgttcatggggtcgtcgtcgtcgtcaattaggatggaggagctctccaactccaagcaggccggcgacgtcgtcgtcgacggtggtgcaacgaggagcccacacggcggcgacggagacggagctgcgggcgacgacggcggcgatgcgcaggcagccgccgccggagggaggaagaagggggagaagaaggagcggcggccgcggttcgcgttccagacgcgcagccaggtcgacatcctcgacgacggctaccggtggaggaagtacggccagaaggccgtcaagaacaacaaattcccaaggagctactaccggtgcacgcaccaagggtgcaacgtgaagaagcaggtgcagcggctgtcgcgggacgagacggtggtggtgacgacgtacgagggcacgcacacgcaccccatcgagaaatccaacgacaacttcgagcacatcctcacccaaatgcacatctactccggcctcacgccttcatcggctgcgcatgcctcatcctcctcacctctcttcccttcagctgctgctgctgcttcccacatgttccagtagctttagcaaatttgatcatacacaacaaattagttacacgtacatatatgatcaatgccaatgccacactgtacatatgcagtgcatgcatggatcgatggatgttagcaggaaaaattaagaggctatgttaatttgtacattaaacttagatgaggtgcagtgtaagagaaaactagctagtgaattaataagcatatgcatgatcgatcgagattcagtggcaagcaagattcggtcacgcatgcagttctttttaattgttttacttttttttgtcaactgtaggccagatgtactagtgattgcacaacttttacaaagaaatttattcacaagatcttgcacattttggttct

SEQ ID NO: 11513 - DNA, 1134 bp, Oryza sativa
  ref <308>: DATABASE ACCESSION NUMBER: AK108861
  ref <309>: DATABASE ENTRY DATE: 2002-08-28
actttgcacgcagtagtcctacttgctgaacctgatctcacctgctttttgcagccacccgcacagacagcaaaatggcactctgcgtcaaggccaacaaggcagtctcctgcactgctgcccgcaagcaggtggcccgcgctggtgtggcccgcccagtcttggcacgccgtatggccgtgcaggctagcgcccagaaggagagcagcccagtggccgcacagctcactgcaggcctgaccgctgctgccgccaccaacatgctgatgcccctggcagctgctgctgaggtcaccccatccctgaggaacttcatctacagcctggttgctggtggtgccgtgctgggtgccattgccctggccatcacagccgtgtccaacttcgacccagtgaagcgcggttaagccactcaacccagcagatgatggcagcagcgacaaggacagtcctgcagcgccgctgctgcctgcccaaatggctctcacaggtcactacgcactgcctggcagccctgccttgggcagcaacaggtggtgctaggttgtgatggctgggctgtaactgagcgagcacgggcctgcagtggactggccgtgttgcaaatttaggttgtttgtttactgcggacagggcccgtaccagtgacttgcaggacagcagcaggtgcagcagagggcaggtgcgtcttaggatgcagagctactgctgccgggtgctgacctgaggctgctgcgtttaggagtgtgagttgtggtcatatgtctgtgctgctgcgcaagacgagcaagaattggtgcgtgttgcatgtgcatgtttgcttgtcccgtgctgccaagcaggcaggcagtgtgacgttgtctggccggttgctgcaatgccgcgcctgctgcatgcagtttttgtgtgcctgcatgcggctggctgcagctgcagcggggcgtggtgtgcatgatgataggcgtttctcacgcgcttgcaggaatgggagcagagtgctgggcagttcagcaccctgggacatcaacagacagtgcacagcatcgtgtgtcgtgcgtgccaagcagcagagtagtgcggcagcatggacacggcatggtgcaaacagcggctctgtgtaattgttgtcaccgt

SEQ ID NO: 11514 - DNA, 1079 bp, Oryza sativa
  ref <308>: DATABASE ACCESSION NUMBER: AK108862
  ref <309>: DATABASE ENTRY DATE: 2002-08-28
acaatcgatgatggcccaagcacccatgtccacgggcggcggcgccatggagctcggcggcggcggccatgagagcgtggaacgtcgtcgacggcaccagcaccacttcgtgctggtgcacgggctgtgccacggcgcgtggtgctggtacaaggccgccgcggcgctgcgccgcgcggggcaccgcgccacggcgctcgacatggccgccagcggcgcgcacccggcgcgcgtcgacgaggtgcgcacgttcgaggactactcccgcccgctgctcgacgcgctcgccgcgctgccgccggccggcggggacggcgacgacgaggagcgcgtcgtgctcgtcggccacagccagggcgggttcagcgtcgcgctcgcggcggagcggttcccagagagggtcgccgccgtcgtgttcctcaccgcggccatgccgcccgtcggccgccccatgtccgccaccaccgtggagcacgtgaactatgttggggtggagttcttccttgactcgatggagctggagcagcagaacgctgacatcccggggaaccctgtaatcttcgggcccaattttatggcccaaatactttaccatctaagcccacaagaggatttgaccttaggactatcgctgatccggccgacgaacaagttcaccggcgacgcgctcatgagggaccctgggctcctgacgaaggagaggtacgggtcgacgaggcgcgtcttcgtcgtcgtggaggacgaccgcgggatccccgtggagttccagcgccgcatgatcgcggagaaccccggcgtcgaggtggtggacttcgccggcgccgaccacatggccatgatctccagcccggccaagctcgccgagttgcttgttaggatcgccgacaaagcacacgaaccatgagtccatgactcggactaggagtggggacagccaaatcactgatcaatagggcagaaatattatgtcaaccaatgaggcaaagagaatgagggaaggaaaaaagaattaatgattgttacactgtttgtttgaactttgaagtagtatgtaatagtatattattaatttgggcacc

SEQ ID NO: 11515 - DNA, 1007 bp, Oryza sativa
  ref <308>: DATABASE ACCESSION NUMBER: AK108863
  ref <309>: DATABASE ENTRY DATE: 2002-08-28
agtcgcacttgccagtctgcatcgtcgcacagcgctgcaccgtgctgcacacgccttggagtcaatagtcaattgaacaggaccaacactaccaaatcttctcaaacacgcacttggatacttcaacaccgcaaaaatgtcgttcgccggcctctcgttctggttctggagaatcttccaaatcatcaccttgatcccgacgctgggcatgctcgcctacttcgtcgacttctacaacacacgcggctggctcaccccgcgctccatcctcattctcttcatagtctccgtgctagccgcggtatgggccgtggggacgctcttcctctatgcgaaggcgaagcactctgccaaattcgtcgccttcatcgaccttctcttcgtcggcgcactcatcggcgcagtctatgagctgcgcggcattgccgacgccgactgctccgactggaggaggaatggatcctacagccaggacttggggctcttcaccatttctggaaacacatggggcttggacgttaacaaggaatgcgccatgctcaaagcttcgtgggcatttggtatcatgaacatcatcttcttcttcatcacctccatccttgcgctacttgtcgcacaccaccaccgccacgaccgcgaccgcgtcgtcaagcgagaggtccaccgctcccgccatggtcaccgcagccgcagccctcgctactcaacttcgcgccacagccacagccggcgcagctacgtctgagtcttttatgcggttgatgtgatatggattgaagcacttttgcgctcgcggttggcgagcattggaccgagtctggtcacgaatcgatccgactacgaatttccttggacattttttggtttgcgatgagcatgagagataccttttggaccttatttgcgggctttggattatagtagatattttgactgcacggccgtcatagtcatatgcataacggaaaggcatatttttgtagatagttcaaatgacataattcatg

SEQ ID NO: 11516 - DNA, 1383 bp, Oryza sativa
  ref <308>: DATABASE ACCESSION NUMBER: AK108864
  ref <309>: DATABASE ENTRY DATE: 2002-08-28
caattggcacacaacatgctccgcacacgctgcagtacggttttagggtttccgctggtactacagtagggtgtcagagtttccactggcgcttctattggcagtcatctaggcaatcgctgttgcacatgtgtacaggtcgctgttggactacaaggtcgccacacttcctgtgtttatttttgatttgcgccgcagctgttgcgtgcactcgctgcctggactacgcatacagcattgattagagatgtggttcaggttgtgcagctggagccgcttgttttgcgctacatgtctccaggcttgctgagtttggctgaaaacattgcggtgtgttattgtaggtcccatgttatgtgcgtgctggggtattgtcactggcacttgttgtagcataccagacaagttgaagcagtgatgttctgttggtagggctgtggtattgggaagatcaaggtggcgcatagctgagttacgatttggctatagcagcctcttaggaaactcccatgtttctagcccgtaccttgcatgtggcagttttttggttgtgttgtgttgtgacctgtcgggcattgctggaacggagggttctgcatcagcctggcacagcgcgcatgctgtgttgtgtgtgtgtgtgtgtgtgtgtgtgtgtgtgtgtgtgtgtgtgtgtgtgtgtgtgtgtgtgtgtgtgcgtgcgtgcgtgcgtgcgtgcgtgcgtgcgtgcgtgcgtgcgtgcgtgcgtgcgtgcgtgcgtgcgtgcgtgcgtgtgactgtgactgactaatttcatggctgccgtcaagagtgctgtacatatggcgcttgtatgtcaccatggttcctactgctgcagctgtttgcgacagtgtccagcacaggtggaccgagttgtacagacgctggttaggctggcaggcgtgcccctgctctctttgccgggctggatttaacaaagtgctattgaaattacagacagtgttgatgttagtgccgatgctgcagcactagcagtgcttttggcatatggtgtcccagagtatgtgtcagttgtcgttctagaaagatctgctagcacagatctgctagcagtcttttgtgtgtactgcccattgctgcctagcctgttgatgcccatttacagttgctgtgggtgctgctagtgcccagagtaacagtcctgttgttgctgattggtagcagccatggaggttgacagacctgtcaaccgccgcttacagcatgtatcaggtgtagtgagccactctaccagggagcagtcaggttccatgtctgctgtggccatcacgctggatttcagcagcagcagttcaggtgctgcatttttacgctgctttgtctttggtaatggccaggtctcat

SEQ ID NO: 11517 - DNA, 1699 bp, Oryza sativa
  ref <308>: DATABASE ACCESSION NUMBER: AK108865
  ref <309>: DATABASE ENTRY DATE: 2002-08-28
atcagatttcgccaagtcactctttgaacaactctcagaacactcaccatcacacgatgtccctttgccagaacgtggacgcaggagcgtcatctcccttgagcttttccctttcagccactgaatcccctcaggctgttagtacgccggacacccagaaatcggtgcttttcgacgaggatgtcgcggctgatccattggatattggtggaaatgctccatcttccttcattatggtggtcggaggtcttggttacatcggctcccacactgttctcgaattgttgaaggcaaactacaacgtcctggtcatcgacgacttgagcaattcgtacgaaagtgtcttgacccgtatccaaactttggccaacgaacattttgcgaccatcaacaaaccagtaccggcattgcacttccagcagttggattaccgaagcccgttgatgagatcgatcctaaccagttactcttcctaccgagtatgcggcaagcctgaagccgctcccgctgttcgtttcccctattctgctcttcaacgtactgattccggtatcgacctgcaaccggaagacacgccagaaccaactattacgcgcgaatcccgaatcagtggagtgatccattttgccgcttacaagtcggttgaggagagcattcgcatgcccctcaagtactacatgaacaacgtctgcggcatggtagagtttctgggcctcctcgaggaatttggtatcaaaaactttgtcttctcatcttctgcaaccgtctatggcgaaggtgcaaactgcggtgtgccacttcgcgaagagctctgcgtgcatcacgcggaaacgttttgcgacgagaatggagtcgaacgacaagtgattccgggggtgatgggcttgacctcaccgtacggccgatcgaagctcatgtgcgaatcgatccttgcagatatcgccaagtcggatccatcatggtcgatcacagccctgcgatacttcaacccggtggggtgccatgaatctggattgcttggtgaagatccccgtcaaaagcccagcaaccttatcccagttattgccaccgttttgacgggcactaaactagtcctggacatctttggcaccgattggagcaccccagatgggacggccgttcgagacttcattcacgtggtcgatctggcccaagggcacattgctgctctggctgcgtcgacagcgggccgtgtcaaagcacccttccgcgcctacaatctcggtactggtcgcggacacacggtgcgcgaagtgcacgagagcctccaggccacgtcgggcagaaccatccccgtgcgcgaggtcgggcgaagggccggcgacgttggcttctgtgtggccgaagttcgacgggccgagagcgagctcgcgtggaaggcgaagaagacgctggcggactgttcggtggatgtgtggaacttcaccaaggggcggtgtccaggaagtgacgagatggactgccaatgagagctagtacgcacggtaaagtctgtttgattcatgttctgcgttgctatacacatcttcccggacgactgcaaggtagaggtagttctagaagcttagcatggtgtttgggcgtcgactgtctgcacttgcatattcactttcgtaggagtcttgctcttcacccaggcgtcggagccgggtggggcctaatcaaagcgtatctcttg

SEQ ID NO: 11518 - DNA, 1196 bp, Oryza sativa
  ref <308>: DATABASE ACCESSION NUMBER: AK108866
  ref <309>: DATABASE ENTRY DATE: 2002-08-28
acctcgctcccgcaaacagcacagtctcacccgaagataattttcttcagcctctctttaaaacagtcgttcattcagactccacgctcactcagcaatatctaattccagcgccaacgcgttaatcacataattcacacctccgcaaacatgttctccaagacctccatcgctgctctcttcgccggcctcgccgctgcccagcatgctcccgtcggtgagcccagcggcaaccccatcaccgctcccttgacccagatcgtccctgcatgcaaggagttcaccatcacctggcagccaaccacgcccaaccccgtctcgcttgttctcctccgcggccctgccgagaacatcaagcccctctccaccatcgtgaccggcatcaccaacagcggctcctacaagtggaccccctcgtctggcctagaggccgacaccacccactacggcctccagctcatcgacgacgtcaccggccagtaccagtactcgaaccagttcggcatctccaagggcgccgagtgcaacggcgtcgctccctcgagcgccgtctcgaccccctacggcggcggctaccccgtcagcacccccgccgtctccagcaaggcctcgtcgtccgccggataccccgtgtccacccccgtcgtcaagccctcgaccaccatcatcaccaagccctctgccgtctcgagcaccggctaccccgtcgccaactcgaccgtcatccagcccagcaagcccctcagcgtgcccagctcgctcctctccagccccactgcctcgggctcgcccaccaagtcctcgggtctccctgagtccaccggtgccgcgtctagcctccaggctggcttcagcgccgctggtgaccttgctctgtttgcgctcgtgctgtaagcatctatctttgatttgaattgggactgcatatctccaattggaattgccgcttcctctctcatttttagaaatgtttatatgtcatggccctgcatcttggatttggcttgcgctgttttgattacttgcttttttcttcttcacttcttccttagaagatactcctggtgttaattagggtatataccacaaactttgggctggcgggtgtgtatcgcctgggtagaggctaggccgcgccttggctgtatctagtgaaatattggaagaatgtcatgcattggatgcgctttaactgg

SEQ ID NO: 11519 - DNA, 1268 bp, Oryza sativa
  ref <308>: DATABASE ACCESSION NUMBER: AK108867
  ref <309>: DATABASE ENTRY DATE: 2002-08-28
attttttttctccgtttgttcagtgcccgtctgaagcaagtgggcggcgacaccggcttgacggcacggagtggagcggagctgcgcgcggcgcggccatggagctcctgcgtgacagcatccccatggtgtccctggcctcctcggctgccgcgctgtacgcgcgcgtggcgtccgccttcctgcgcccgggcctcccacgcctcgccgcgctgctccccgtggtcgcgctcctcgccgcggcgcccttggccttcacctcctcggccatgctccgcggcacctccgccttcttcctcgcgtggctcggcgccttcaaggtcgtcctcctcgcctccggcctgggcccgctcgcagtcgacggcctcccggtgctctcgttcctcttcacagccttgctccccgtgaagctccgccgaggcggcggctgtcccggcgcggccgccaaatcggtgtccctcgtttcttgcgcggccaaggtcgccgccatagccaccatcctccatctgtacgagtccaagatccagctgctgcatcgctacatacgtctcgccatgtacgggatccacatctattgcttcttggacctcctcctcccctgcatcgcggccgccggatccgcactggggatggagctggagccgccgttcgaccggccgtacctggcgtcgtcgctgcgggacttctggggccggcggtggaatctcatggtgtccgccatcctccggccgtcggtgtacgaccccgtgcgcgctcgcgccgggaaggcggcgggcgtcgtggccacgttcctcatctccgggctgatgcacgaggccatggtgtactacatgacgctgcggctgcccaccggcgagatgaccgcctttttcctgctccacggcgtgtgctgcgtggcggaggagtggtgcgcgaggcggtgggtggcgaggagatggccgcccccgccgcgtccgctggggtcgctgctcgtgatggcggtggctgcgggctcgtcgttctggctcttcttcccgccgatttgcagggaggggagcgaggagatgctgctggaggagtgggcggcggtggcggcgttcttccaggacgccggccggaagctgcgccgagcgccggtacggttcacggattaattaaggtcgagttaaaaaatcaaaagctgaattaaaattcagatttccaatatagaaggaaagcttttttttttttgagatggataaaactgtactagtagcaagacgccaacccaatgtgtttattaccttttg

SEQ ID NO: 11520 - DNA, 1376 bp, Oryza sativa
  ref <308>: DATABASE ACCESSION NUMBER: AK108868
  ref <309>: DATABASE ENTRY DATE: 2002-08-28
aacgcctacacgacaacgaaggttcgcatatctgaacgctcgtcccgcggttcagactactaatccacagaccgacacaatggccaccgctcagggtcagatctccaagcgcaggaagttcgttgctgacggtgttttctacgccgagctcaacgagttcttccagcgcgagcttgctgaggagggctactccggcgtcgaggtccgcgtcacgcccaccgtcaccgacatcatcatccgcgccacccacacacaagacgtccttggcgagcagggccgccgcatccgcgagctcacctccctcatccagaagcgcttcaagttccccgagaactccgtctccctgtacgccgcaaaggtccagaaccgtggtctctccgccgtcgctcagtgcgagtccctccgctacaagctcctcaacggtctcgccgtccgaagggcgtgctatggtgtcctccgtttcatcatggagtctggtgccaagggttgcgaggtcgttgtctccggaaagcttagggctgcccgtgccaagagcatgaagttcactgacggcttcatgatccactccggtcaacccgccaaggacttcatcgacgaggctacccgccacgtcctcctccgccagggtgtcctcggtatcaaggtcaagatcatgaggggcgctgaccccgagggcaaggccggccccgccaagtcgctccccgactcggtcaccgtcatcgagcccaaggaggagcagcccgtcgtccagcccatgtcgcaagactacggcgccaaggcgctcgccgcccagcaggctgcggagcagcagcggcaggcggagcagggccagggagagggcgaggccgaggccgcgcctgcagaggagtaagcactgtgcgctttagaggcagggctgctggcaaacattttacggacattctaacgagatcttttttgtcttttccattcacatcgcatgcgggcgcgggggttgcggaaatcgtcgacgtgactgcgacgccctgccgatccgttggtcaaaaaaacttgctgggtctgggtccggccttgtctcgcatgagtatcatgaacccttcgtacgtgagaaaatgtgaacacgagaatgccgcgtactcttttccctctgtcggttcttgactctctggttccggtgtgcgtccatctgtctgactcgtcggtttcttttcttctctcttgcttgcattcccccttgcgactcggatggcgtatggcagaatgtgtggggcaaaaaagcttctccgtggtttttcgtgtgtcattatgatcatcatgcagggaggttcaatcggagtcttatgtgctgtgtacttttggacacccccccaatgcaaaaaggaatacaaaaaaaaaag

SEQ ID NO: 11521 - DNA, 2179 bp, Oryza sativa
  ref <308>: DATABASE ACCESSION NUMBER: AK108869
  ref <309>: DATABASE ENTRY DATE: 2002-08-28
ctgggcgagcgccatgccccgatgagtaggagggcgcggcggccgccgcaaaacccggggcgcgagcccgggcggagcggccgtcggtgcagatcttggtggtagtagcaaatattcaaatgagaactttgaaggccgaagaggagaaaggttccatgtgaacggcacttgcacatgggtaagccgatcctaagggacggggtaaccccggcagagagcgcgaccacgcgcgtgccccgaaagggaatcgggttaagatttcccgagccgggacgtggcggttgacggcgacgttaggaagtccggagacgccggcgggggcctcgggaagagttatcttttctgcttaacggcccgccaaccctggaaacggttcggccggaggtagggtccagcggccggaagagcaccgcacgtcgcgcggtgtccggtgcgcccccggcggcccttgaaaatccggaggaccgagtaccgtccacgcccggtcgtactcataaccgcatcaggtctccaaggtgaacagcctctggccaatggaacaatgtaggcaagggaagtcggcaaaacggatccgtaacttcgggaaaaggattggctctgagggctgggctcgggggtcccggccccgaacccgtcggctgccggcggactgctcgagctgctcgcgcggcgagagcgggccgccgcgtgccggccgggggacggaccgggaacggccccctcgggggccttccccgggcgtcgaacagccgactcagaactggtacggacaaggggaatccgactgtttaattaaaacaaagcattgcgatggtcctcgcggatgctgacgcaatgtgattaacaattaaactttcaaaatattacaattccaatgcaaaaacttgtcaactatttcactaccgaggcacctctggaaacttctaacatttccgagaaagaaaactcattcactttcaaagtcgatgatgtcaaaccaaataaaatgaacactcatcaaacctacagtcctagcgctgttctccgtgaaagagtcgataaaaagaatttcctcagaattgatgacttctctcacaaaaaggacattaaaaccagaattatcatgtccaatagaaatggcttaatgagtgctgctcactttgcttatgtcaatcattacccccttaaaatctcagtcagtgacttcattctgatgatcggccaaggaatagctactcatttggaaatccatgctgaagatgtccgtcctttctttgttaaccacgaaggaaaagaacaaattgtgatccaaagaccaggctttaggaccgaaggtggcaatgactggtcaacagtctttggagaatttgctgaaggagtccaaaaaagagtcaagatggacttttatgacatcatgatcgatgacactagtgtcgccactaaactatctagaatttcatctgaaatcgccatcatggatacattcaagcattactttgaatatgtcgtgatgatgggatgtgccatgactgaaatcacactcgtaggaagcaaggatgattgggaaaaactcagatctaaagttaacaaactcaaagaatttaacgttgacgatagacttcaacttgactggtggcttgatcgtttggttcctcttgttgacaaaatagtcgatcaagctgtgtcccgcaaaattgacagatctttctggagcaagatctatcaatcacaagataagaaaggattttatgaaccaacccctttgatcaatggatggttgagtgtctttaatccttatgttctcaagagtgaaagtcgccaaaagactccagcaagaagtaattttggaaaaatccatcctgatgagttaatgaatggtgtttctaaagctccggttactctggaacatatgctcaccaagaaaaagtatccaatgactgtctatggtggattcttaggtgctaaatttaatgatgatggaaccatcggaactgagtacttctatgctgctacttttgatgactgtcctgaaaacaaggatatcaaaggcatcaaaatctaatctgtataacttctgcttaagtacttctatctctttcaaaagaaatttttatcatatatttcctctcctttcaaataataaagagacgtagttaattctcttttactatattttattataaactaaacttatcgtcag

SEQ ID NO: 11522 - DNA, 1476 bp, Oryza sativa
  ref <308>: DATABASE ACCESSION NUMBER: AK108870
  ref <309>: DATABASE ENTRY DATE: 2002-08-28
accaagagttgtacagcacgcttacaaagcagtatggaccgcctcaccatttcgggtccagcacttgctgctttgttgtctgtgttcacaaagagcaacggcccatgcgatggtctgctgtttggcagtgtctgcagcaccaccacaacccaaaagcaggacgactcagacgccctgcttgtggaagagcatgaaggccgcatagcagccacgtgtgcgtgcaccggcacccacaccttatacacaaacagcggagcaatagcaggtgaccgactccagcaactggttgaaagcatcacagacagcagcagcggcagcagcagcagcaagggcggtgacagtagtgcagcgccactgcagctgcttgggtggttcagctacagaccgggggcaccctgcacgccatctatgcgggaggcagcactgtcacagcaccttcagaattgggtgtgcacgcaaagcagcagcagcagcagtcggagcacaaacgctgtgcgcacacctgttgtgtttggcctggtcacaactcagccagaccacaatgcagctacaatttgtgtgcagcaccgcttctttaaagtaaaagatagaagcagtgcgggccctggcaagggcgggagcagccatgctcagattagtagcagcagcagcagcacccagcacgctagtgggcgcccgcaggccccagagcatcccctgttgcagccgctgggcctccaagtgcacaacctaggtgccagccatgccgcagcagcaggacgcagcagcagccagtggggagcagcagcacttcctgcattggcagctgcgctgcaaccaccagctggcgctgctgctgggctgctgtctgagcagcagcgccagcatgtgctgtcagcagctgctgggctgtctggaggcgttatggcagctgtggatgcggtgtacggcagcttgctggatgagctgcaagtggcagctgctcaggtggcggccaggcagagccgcctggatatgttgagatcgagacatgtggctttgcagcagcaggtgctggcgggccggctcggggtgtcggtggaacttccaaatagtgaacagtagaagcagcagcaccagctcacatgtgaaaacattggctcaggcaggtattggccctgagtctgctgcataatttggaattcccagctggctccttccaggagagcaggggcatgttttcttctggtctgtaccaggaaccaggcagaacaggctagaacttcttgtgctgcgtgcacaggccactgtagatcacgaacgggacggtcctcaggctgccacttgcaagctgccaactggcgagcattactcatgcagtgactgcattttgcaggtactacctgcttgctttcactgacagcaccgggcttgttcacccatctctgtgccaagcgttgctggtttgttgaaatcatgattccaacatgatcacttttgcaagactgcgtgcaattc

SEQ ID NO: 11523 - DNA, 1221 bp, Oryza sativa
  ref <308>: DATABASE ACCESSION NUMBER: AK108871
  ref <309>: DATABASE ENTRY DATE: 2002-08-28
acgctgcaccttccatctctgtcagtgtaacaccttcagagtctctttcgccacaatgaaggtcacttcagcaattctcgcagccgcttgcgcgacggctgcgctcgcagagggcagtgtcaagccccgagctcttcttacgattgaagtcgcgcctggtgtgacccgccaaatcaccgaagaggatcgatacgaacttggtaagcagggcggttgtggaagccatttcttcgatatcacagatttcaactccgaggttcgcgcagtcaaggagcagcccgcataccccaagaagttcaaatatggcgagaacatcaagcgcctcatccctcagctcaattgggaaaacatcaagaagaatctcgagcactactcttcataccacacgcgcttcagcgagactgagaccggcgcggaggcggctgagtggctgttcagccaggtggcggatgtggtgaagaagtctgcaaagaatggtgtcacagcagagatggttccacacgctgccttcccgcaaaagtccgtaaaggttgtcgtgccaggtcgcagcaacaggaccatcatcattggcggtcacctggactccataaactctgcagaccgcttgaacggtcgcgcccccggtgtcgacgacaatggaagtggctcattcgtcattttggaggcacttcgcgtgctattgtcggataaggactttggcccgagcaagctccagaacacaatcgaattccattggtatgctgctgaagaaggcggtcttcgtggctcgcaggacattttcacccaatacgcggctgcggagcgcgatgtctgggctatgttgcagcaggacatggttggatacaccaaggccactcttgacgctggaaagccggagagctttggtctgatcaccgacttcactgatgcgcccttgaacgaatacctcagccgtgtcatcaacgagtataccgacattacctacgtagagagccagtgcggctatgcttgctctgaccatggctcagcgaccagaaacggattccccgctgccttcgtattcgaagctgcgtttgaatacagaaatcctcacattcatacagtcaacgacaccatggagcacattgactcgaagcatgttcttcagcatggtcagcttattctgggctagatctacgagctggggttcagcaagcatgatttgcagacttatgtggtaccattaatacaatcaccacaacc

SEQ ID NO: 11524 - DNA, 1378 bp, Oryza sativa
  ref <308>: DATABASE ACCESSION NUMBER: AK108872
  ref <309>: DATABASE ENTRY DATE: 2002-08-28
gcacacgcccacgcgctcccctcgcacgccaccggacgaacacctcgccgacaacctttgctccggcgaccggaggtcggagagagagaagagagatgaagatgccggggcgcctgctcgccgccggagcggcggcgctgctggtggcggcgtcggtgatggtggcgacgctgctgacggcgccgctgccgttcctgccgtcgctgatgccgtgcctgcccgcggtgaccgcgccgtcggggtccgggtactcgccgccgggcctcgcggccctcgccgacgccgccgtgaggtacgccacgacgccgaccgtgccgcagcagtcgcgcgccgagatctcgctgtcgctggccgtgctccgccgccgcgcgccgctgcggctgctggtgttcggcctgggccacgactcgccgctgtggcacgcgctcaacccgggcggcgccaccgtgttcctcgaggaggacccgtcctggtacagcgtcgtgcggggccagtcgccgttcctccgcggccacctcgtcgcctaccgcacgcgcctcgaccacgccgaccgcctcctcgccacctacaaggaccacccctcctgcctccccggcggcggcggcaatggcggcggcgacgtgccgcgcgtgcgggggaacgcggagtgcccgctggcgctgcacaacctgccggcggaggtgtacgagaaggagtgggacatggtgatgatcgacgcgcccaaggggtacttcgcgtcggcgccggggaggatggcggcggtgtggacggcggcggccatggcgcgcgggcggcgcggcgagggcgacaccgacgtgttcctccacgacgtcgaccgccgcgtggagaaggcctacgccgaggagttcctctgcgagaggttccgcgtcggcgccaccggccgcctctggcatttcaggatcccgccggcgtcgcgccgcgggaacggcacggcggccgccggcggcgccggcgccggcgatgggcggcgacccttctgctaaggaagtaaggattgcgatttttggaggggcttttttacaaaatggcctcgattaagcgggtgaaatacaaatactgctactactactacgaaaatacgatcgtcgtgtaggaaatttccggattcctctatcctctgccacttgcaaattcaaaacttgggatattttaaatttgaggtaaacattctgaacagagatagatgctagagagtgatttgagtctctcgagatcactaaagttggtgtgaacaacaacacggtgtgtatctcttttcagtttgtaataatagaaacaatgaggtgattttgttttttttttttggtatgagtacatactaatttttgaataacattggtacatcaggttaaccttg

SEQ ID NO: 11525 - DNA, 896 bp, Oryza sativa
  ref <308>: DATABASE ACCESSION NUMBER: AK108873
  ref <309>: DATABASE ENTRY DATE: 2002-08-28
cccacctccgcgtcgtcgtcgtcgtcgccgagcgctcgatcgatcgccatggcagccagcgagcagagctccgagtcgtcgtcgacggcgtccacgtcgtcgtgcggcaagaaacagcaggtggccgggaagaggaagcgcgaggacgtcggcggcggcggggagcaggcggcggcggtggcgtacaggggggtgaggatgagggcgtgggggaagtgggtgtcggagatcagggagccgaggaagaagtcccgcatctggctcggcaccttcccgtgcccggagatggcggcgcgtgcgcacgacgtcgccgcgctcagcatcaagggcgcccgcgccgtcctcaacttccccgacctcgcccctgccctcccgcgcccggcctccctcgccccccgcgacgtccaggccgccgccgccctcgccgccgtcatgcaccaccacaaacacccctcctcctccacctccacctcctcgccgccggctgctcctccgccggacgaacaccaccctcgccacgagccgcagcagcctgagtcgagcagggaggatgaccagcagcagcagccggcggcggcggcggcggcgcagatggcggtggccgagctggtgttcgacgagctggcgccgctgtgggtggaggacgtggtggagttcgggacgtcggatcattgctggacggcgtacgatgcgcttgaccccatcggcttccagcctctcctctgggagtactaggctgctgcttgtaaaacagcttcctcttcttttcttttcttttctttttttggttttgttttttgtgtggattttttcccctagtgctgcttaaaatgtggcttgttttttttcttctctctttcaatcttgatttgagttggatttggagtttgtgtgat

SEQ ID NO: 11526 - DNA, 2050 bp, Oryza sativa
  ref <308>: DATABASE ACCESSION NUMBER: AK108874
  ref <309>: DATABASE ENTRY DATE: 2002-08-28
atctctcaattcaaatcacccacgtcaacagaagtaatcagccacattggcaactggaaatgtgtgagggcggaagggcagcagcatccatggctcgcacggcgagcgcgtcccggcgacagccggagacgaccagcctcgccgtggatgaggccggaggcagggcgtcgcggaggccgagaggatggaaagccgtcgggttcatgatcgggctctacctggcaatcgccatggcgttgaacgcgttcgcccagcccgtcaccaactacctcatcaaacgttacaacatgaagccgaatgccgcaacaaacgtggccaacgtcttcagtggcacctacagcttctcgccggtggtcggagccttcgtcgccgatgcgttctgcggcaggttctggaccctcttgttcggagccgtcgccgcctttgttgcaatggtggtcatcacgctatcggcgacgatccgtcagctcaagccaccgtcgtgcagcgacgtggcacggcaagccggcacgtgcgcggggccgtcgggcctccaccgcgccgtgctctacatcggcatggcgctgctcgtcgtggccacgggcggcgcgaacccgaccagcctgccgttcggcgcggaccagttcgaccacgacgacgcgagcagcggcagcagcagcaacgaagccgacgagcgacgacggcgcgccgaggagcccgcggggctcaagcgcttctacaactggtactacgtggtcaccatgatggcctcgttcatggcgctcaccttcatcgcgtacatccaggacaaggtgagctggggcctcggcttcggcatccccacggcgctcgtggccgccaccttcgccgtgttcctcgccggcacgccgctgtacgtccgcgtgccggccgagggcagcatcttctcgagcgtcgcgcgggtggtcgtcgcgtcgtgccggaagcggaggctcacgctgcctcacccgcgcgacgcgcggcagcaggaggccgttctgtacaatcctcccgtcgtcgtcgcagctggaacgggaaccagccgcgtcttcaagctcccactcacgttgcagctgagctttctgaacaaggcggccattgtaaccgccgacgccgacgagatacggccggacggatctccggcgaggccgtggagcctgtgcagcgtgcagcaggtggaggaggtgaagtgcctcgtcaagatcgtccccgtgtggatctccggcgtgatgtggttcatctcggtggcggagctgaccaactacacgttcctgcaggccctgaccatggacctccacatgggcaggagcttcaccatcccgcccgtgtcgatcgccgccatattcaacctcgccatcgtgctcttcgtgccggtctacgatctgctcgtcgcccgcgcagcgcagcgcgtcaccggggtggagggcggcatcacggtgctgcagaggcagggcgtcggcgtggcgatcagcggcctggcgctcgtggtcgcggccgtcgtcgagcgcaggcgccgggcctccgccttggacaacggcgggacgtcgccgatgtcggtgttcgtgctcgcgccgcagctcgccgtgatgggcgtctcggcggcgttcaacatgatcgggcagatggagttctacaacacggagttcccggaccagatgcgcacgctcgccaacgcggcgttctactgcgcgcagggggcgagcagctacctggccacggcggttgtgaacgtcgtgaacgcgaggacgaggcggcgcggcggcgggcagggctgggtcgccgaggacatcaacgccgggaagctggaccacttctactacgccatggccgtgttcgcggcgatcaacttcgtctacttcctcgtctgctcctacttctaccgctacaagggcgagccagaggtggcggccgaggactcgccaccggccactccagaggccgtcctcctgaagcactagccagtagctagcaagattggttacggtagatcactctatgatcaattaattcgatttattattggtgtgattaataataaagttgccactactgg

SEQ ID NO: 11527 - DNA, 1037 bp, Oryza sativa
  ref <308>: DATABASE ACCESSION NUMBER: AK108875
  ref <309>: DATABASE ENTRY DATE: 2002-08-28
actgtcaccatgtcaggtactccttccggcagcgtcgccaaccagacctcgaccatccactcgtccgttgccaccggcgccagcctgaagcccaacggcactcttgcgacccccaccaactccaagcccggccagccgcaattcaccggcgctgcgtctgtcctcaacgtcaacgcgtacgttgcggcgctcgtcgctggcgttggctacttggtcctgtgagacggactctgagccttcaccgaagcctcctgcttcctttgcatcatggactggtgcctgtctttgattcaaaccacagccatatacccgaagcgcctggcctaggcagctcattgtttccctcacgtttcacgaccaacgttcgcatcatacccatcaccgccttcttttttgatttaccatttgttgaatttattcacacattcacttcacactcttttgagcttgtccccactttagtccggctactaccattgtaatcacctctcttcattgtttgacacgattgacgactgtgtgcgttgctttgggaacttggtactacacctgcgaaactcttatacttctcacctatccccggtcgcgcatttgcgcgttgccatttacctacacccccttttcggttggattgatcttgcgcgcaacggacgctgcctagcagtacttcacgttatgaataggagagcagaagaaaaaacttgttgaacatggaggttttgcattcattgcccgcggcgaatcaaacctttttttccttcttactcttccactcttacctttccgtcgcatcatgaacaatgcgctttcttctctggtggagctggagtttggagataccccctttttgtcgttacaccaatattttggaggatgaattttgacggctcgcataccttttgcttagctggtcgcgaggagagttgagaagtggaggatatatcacatcacattaagctagcgagcagcatattcgacaatctactgatctgcatgtagcgcaatcattagctagctagcaattgaaaagtcatcgt

SEQ ID NO: 11528 - DNA, 887 bp, Oryza sativa
  ref <308>: DATABASE ACCESSION NUMBER: AK108876
  ref <309>: DATABASE ENTRY DATE: 2002-08-28
aactaacgctaaaaaagtaacagtttctgtactttattgcatcgacttcgcaagcaatgcaggctgttcctacttctgagcccgagttcgacctcgctgagaagccccgcgtccacggcgacgtccccgtggcgacggccgttggtcctcaagtgatctacatttgcgacggcagcgtccagcaagctcgtcgcccggatccgtggcacaccggtctgttcgactgctgcctggatcccgcctcggcggccgaagctgtcttctgccagttctgccagttgagccgtcagtacaacgtggtgacgaccggcgagaacctgatccactggccggtttgcctcacgacgttcgctgccgacgccgttgccagcatggtggttggcatgcgccttggcactctggcgctgtcgttcatcacgcgccagcgcatccgtcagcgctacaacatcatgggtgatgatctcaccgatctcctggccgctggctgctgcacgtgctgctccatcgcgcacagctaccgcgagctgtccgtgcgcggcgaatggtccaacggcaactgcttcatcaaggagccctttgtactgcccgctaacaccgcggtcatgggcgtttcggagtaaaaatcaccgagctgtgaagtttgaaccgtgcaattcccttcccaaacccatcactgcgcgcgtcgctctattggtgccgtccacccccacttctccagtttcgagcatgcaacaagacaaagcaaaacaacaactacagctctccccctcgtgctccctgccgcgttgtgccagacccccctttttaacttaaaaggattctgtgcgccgacccacgcccctttgcttgtgattccccccgccactcctttcgttcagctcgccttg

SEQ ID NO: 11529 - DNA, 1095 bp, Oryza sativa
  ref <308>: DATABASE ACCESSION NUMBER: AK108877
  ref <309>: DATABASE ENTRY DATE: 2002-08-28
atccttagctcgcaaataaactcacgtacaaccgcaacgatggccacggcagctacgacgacgacgggcggcgatgtccagataccgattggacagcaggccaccgtcgccgccaccgccactgccacgagcgatgggatccgggatagccccggcacgtcgagccccttccgtggcggcggcggcagcaccacccccaccccgcagcggccggtgaaggccgggtcctcctcctctccaccaccgccgccgacgacggccatggacaagacgctgtccagtgtagcgaacctcgcgaagctcctgccgacgggcacggtgctggcgttccagtcgctgtcaccgtcgttcaccaaccgcggcgcgtgcctcacgtccaaccggtacctcaccgcggcgctcctctacctgtgcgtcctctcctgcatcttcttctccttcaccgacagcttcgtcggtggagacgggaagctctactacggcgtggcgacggccaagggtttcctcgtgttcaactacgacgctggcagcagcagcgacggcgacgacgacgaccagcggcggcggagggaggtgttcaaggacctccgcaggctgaggatacggtgggtggactacgtgcacgcggtgttcacggcgttggtcttcatgaccgtggcgttcagcagcaccgccgtgcagagctgctacttccccgaggccggcgacaacgtgaagcagctgctcaccaaccttcccctcggcgccggcttcctgtccaccaccgtcttcctcgtcttcccgaccacgcgcaaagggatcggatatggcggccagtccaccaattaacgtacgtgcaatcgcctagctagctacaaggcttgctttacttgtgcagtgatgctaattaattatatattgttgttggccaagcctttcatttggtgtagcgtgcacgtgtgcaacttttccatgtgcactagtcatgtaaagcagtttagtttgtcacgatttgtgttatgcgcatatgattctttgcaattgcaccgaagatgcacgcacgattaattcggtttacggttttgctataaatgatagattgttaattttcgcttc

SEQ ID NO: 11530 - DNA, 1926 bp, Oryza sativa
  ref <308>: DATABASE ACCESSION NUMBER: AK108878
  ref <309>: DATABASE ENTRY DATE: 2002-08-28
ataactatatagcaggggcgtttgcgaaataagcctgccagctttagtcgctgattccatagcaccaaagaaaacatgcagctccaggccaataggtcactgcgcgccagcagcgcgagggctccccatgctgctcgtatcaacctgcgtgccggtgtgagggctgctccagtggccaatgccgctgccgtggacaccaaagtggactggtcagcactggcaaaggaactggacccaaagtcacccctggagatcatggacaatgccctgaagacctttggcactgacattgccattgccttctcaggtgctgaggatgtggcacttgttgagtacgctcatctcactggccggccgtaccgcgtgttcagtttggacactggccgcctgaaccctgaaacctaccagctgtttgacgccgtcgagaagcattacggcatccacatcgagtacactttcccggatgcacaggagaccatggagctcgtgcgcaccaagggcatgttctccttctatgaggacggccaccaggagtgctgcagggtccgcaaggtgaagccgctgcgccgccagctgaagaccctgaaggcctggatcaccggccagcgggaggaccagtcccctggcacccgcatggctgtgcctgtggttgaggtggacccagtgtttgagggagtggagggcggcccaggcagcctcatcaagtacaacccactcagcaacatgagcagcgcagaggtgtggagcttcctgcgggtgatgggcgtgccaacaaacaagctgcatgcgtgcggctatgtcagcattggctgtgagccctgcacgcggccggtgctgcccaaccagcacgagcgcgagggccgctggtggtgggaggatgccacagccaaggagtgcgggctgcactctggcaacgtcaagaaggctgatggcaccacagaggagcgcaaggccgagcgtgacctgtggattgatggcagtgccattgagacactggacagggcagctgctgagaagctggctggcggtgctcgtgacaaggacactctggcggtgctgtatgcaccctggtgcccattctgccaggcgctggagcccaactacgaggcccttgcagctgacctggcaggcagccacgtgcgtgtagccaagttcaacgctgatggtgacaacaaggagtgggccaaggccaacctgggcctcaccacataccccaccatcgtcatgctgccaaaggccaagtctggctttgtcaagtacccatcggagcgccgtgatgtggagacattaggcatgtgggtaaagaccatggcaggctccgcctgagcagagctggcccggcagcatggaactaggtgcagctaaagaaagggaaattttgttgtagcaagctgctagttgggaggtgtgttttgagcatcatgcaatcgtgctggctgtgtcgttccttctttgatttgccgcagtacagtgtgcaaaggtgcagatttcctcgttgttgccaggcaatggagtgatgcatttacatgaaaacactgtggattcttgcacagggtatgcggctgcaggccgtcttaccatacaaacactggttttgctatgttgctgcacagttgcttgttgtgctggtattgtggcacagcagttgatgaacacagcagtgcagtttgtagcactgctttggcagcccttcaccatgatggtatggtgctgatgtttttgcaaggcttgtgcattgtggtgttgatgagttacatatatgtggtatataccacacgcggttgcaagcgatacactctgtcttaagaccacccaagcttgggtgcctctgaacagattggcttgttttgtttgctactagcaaagtagtacttgttgtgctgctgaagctttgtgtcatggtaatcactgtaactgaagtgtgcg

SEQ ID NO: 11531 - DNA, 2254 bp, Oryza sativa
  ref <308>: DATABASE ACCESSION NUMBER: AK108879
  ref <309>: DATABASE ENTRY DATE: 2002-08-28
gcatccatccgtcgagttgttgagtgagtcttgaaacatcctccagtttctcgatctgccccgtcaactacccgtcttccgcctcgtatagcatattaaaaagaagaaagaagaaaaaaaacttgaaaacgacaaggaaatgacttctactgctgctatgcctgccacttctgctgcacccgctacggctgctcctgttgagtcttccaatgcatcgaacgcaggctccacggctgctgcgaatgctgctgcgaatgcggctgcatcggcgtccttgtacgttggtgagctgcacccggacgtgaccgaggcgatgctctatgagatattttctcagattggtcccgtctcctccatccgtgtgtgtcgtgatgcgattacgcgccgctcattgggctatgcctatgtgaactttcacagtccggctgactgcgagcgagccatcgaatcgttaaattacgccttgatcaagggccagccttgccgtttgatgtggagtcagcgtgatccggccctgcgccgctctggcgttggcaatatctttatcaagaacttggacaagaccattgacaacaaggctcttcatgacaccttttcggcttttggcaacatcctgtcgtgcaaggtggttactgatgaccagggagcctcgcgcggctttggatttgttcattatgagacgcgtgaagcggctgacttggctatcgacaaggttaatggcatgctgcttaacgggatcaaggtctttgttggacatcacatttcccgcaaggaacgcatttctcacctggaggagctcaaggcgcagttcacgaatgtttttatcaagaacttggacgaggctgtgacggatgaggagctccaggctctgtttgagccgttcggtgaaatccagtcggccatcctgcagcgggatgagtcgggcaagtcgcggggattcggattcatcaactttgtcgagcatgaggatgcgcaaaaggcagttgaggccctcaacgacgttgaagtcaacggcaagcgtatttttgttggccgtgcgcagaaaaagtctgagcgcactgaggagctgcgtcgtcagtttgaggccctcaagcttgagcgcatgagcaagttccacggggtcaatctttacgtcaagaacctggacgagatggtcaccgaggatcagcttcgcatggaatttactccttttggcagcattagcagtctccgtgtgatggttgacgaaaagggcgtctctcgtggctttggctttgtctgcttctcggctcctgaagaggcggcacgtgcgattagcgaaatgaacggtcgcatggtcaatgggaagccgctctatgtggctcttgctcagcgccgtgatgaacgtcgtgcgcaattggaggcccaatttgctcagcgcactcagcagatgcgcatgcaagctatggcggctgctgcttcggcgggaatgcccatgggaatgggtattggcatttaccagcagggtcctctcttctatcctcagggtccttcggctggtcgctttgttggccctgctggttcctatgggatgaatcgtccggctccgatgggctaccagaccaatcctggaatgaacggaccgatgggtgcctacgcctctggagccggtcagtccggaatgatggccacgggtccttcgtcgatgcatatgcgtcctaatcgtcccatgcgagggggctatcatcatgcgcgtggaaacggccctatgaatgggggaaattcttctttcgtccctcctcaaactggcttccgtcgcccctacaatggaaatggaaatggaaatggaaacagcaacggtcctcgttatgggggtcccagtgctcgtggccctcgtcctgagtatggagctttcggtccgggtgcgcccctcactgctgccgctttggctgccgctcctccggagcagcaaaagcgcatcctcggtgagcgtctgtatcccttggtggccatgcgcgatgccgagcatgccagcaagattactgggatgctcttggagatggacaatggtgaattgctgcatctcctggagagccctgacgctcttgcatccaagatcggcgaggcacaggaagtcctccgtcagcatcagcagtcgcagcagccggccgccgatgcagcgtccaagaattgaacgcagtagattctcctccttgcattctttttcaatcattccctacaatcaatcatacttgctataacgaggcgaaaaaataaatgcggacaattaaaaatc

SEQ ID NO: 11532 - DNA, 892 bp, Oryza sativa
  ref <308>: DATABASE ACCESSION NUMBER: AK108880
  ref <309>: DATABASE ENTRY DATE: 2002-08-28
agacgtgttacggcattggacaagactcccttgcagtgttgagtgctacataaacactgcttctggcaattgttgtcagcctcgatcaattcccaagtccagcgtttgaagacactatcactcgctcagcccattgatatcttccccgcattctcacctcgtccatcgccctgaccccgcaacacttcaagctctcgtccattgaaatcatcacacgaccgcggatcaaagcagcacaacatggtgtcctccatgaacaaaacacccagccaagaggaaatcgcctcgaccctctcccacctcaaactctccaccaaagcccctcaaaaacccgcacatccccccaaatcaaaacccgtcgccgacagctgggacgacgagtcctcgggctccgacaccgaaaccgacgagcccgccctccccaccagcaaatcatcaccccacgactccctcgaccccatctcaacagtcacctcaaacgagatcccgccaaatccaccaccgcccactcccgcttcgccgacgccgttcgatttcccagataatagcaatggcgtgccgtatggcggggcggtgaggggaggagggaggacggcgaatatggacaagaggcccgagaagacgacggccgtggcggggcggttgattgcgggggcgttgggggtgagggcgccgaagaggacggaggaggagagggagtatgataaggcgatgagggagaaggagaggaagaggagggcggaggacaaggagagggagaggagggaggcggaggagacggcggcgaggaagaaggcgatttgggatgattaggtggtggttgagtttgtggtgcgaggaagggcacttttgtaaatagtagatattgtcaatggtcgctgaggcgtctgtc

SEQ ID NO: 11533 - DNA, 900 bp, Oryza sativa
  ref <308>: DATABASE ACCESSION NUMBER: AK108881
  ref <309>: DATABASE ENTRY DATE: 2002-08-28
acccacccacccatctcatctcatcatcgcctttcctccgattcgattcaccggtcgaacagatcgagctcactcagctgtgaggtgagtttcttggattggatcatcgatcgtcgtcgtcgtctatggcggtggtgcagatgctgtcgtggctcagctccggggcggcgtggttcgtgttcctgaacgtcatcgtcggcgccatcgccgtcgtgtcgtggctggggcagggcgtgggcgggacgacctcgacgccgtcgtcggcggcgcggcggaggctggcgccacggagctcgcctgtggccgccgcaacagcggcggcgatcaagaacgaggaagaagaggcggaagcagaggaggaggaggagtccatcagcttggacgaggcgtacgcgctggcccagcaggcgcaggcgcgctcgccgcgttccgcaccagatgccgcggcggcggcgaaggcggcggacgccaagccgcggcgggcgcgggcagaggaggtagaggaagggaaggcggaggtgaacgcgcgggccgagcggttcatcaagcagttcagggaggacctcaagctgcagcgcatcaactccatcatcaactacaccaacgcgctgcgccgccgcggcgccggcggcgtcgcggcgaccgcgccggcgccggcacggtagccgcccgcgtttcgctgccgctccgatccactctacacgatccttgtcgcgtggtttcgcttggttagataggggatttgtttgttcattgtgacggatcaacgctacaacacacaacaattttggattgtttacttatacttgtagtacatactactacaaaatttgtgattcaaatatgattcaaatgctgggacatgtctcgtagctcaagatcagaagcgtttggtgactc

SEQ ID NO: 11534 - DNA, 1250 bp, Oryza sativa
  ref <308>: DATABASE ACCESSION NUMBER: AK108882
  ref <309>: DATABASE ENTRY DATE: 2002-08-28
accacacccacgcctcaatccagcaatcgagtcttcgatccatccaaaagtatggagctcaccaactgccacatgttccgtccgcgggcgttatcccatcgtcatcaaggtcttcgagaaccctttacataaccgctcaacatgtctcctcctgcggctacctttgagaaccccctcgctgtcagcgacatcactgtacccgtgcagaagaacctcgcggtgaaggcaccgaccaatggccatgcgaagacgctggctgagatggagaacaagtgggagagcttcaccttctctcctatccgcgagagtcaggtctctcgggctatgacccgtcgctactttaccgaccttgacacctatgccgagtcggacatcgtcattgtgggcgcaggctcctgcggtctgagcaccgcctacgagctcgcgaagaaacgccccgacctcaaaattgccatcatcgaggcgagcgtctcccccggtggtggtgcttggctcggtggccagctcttcagcgccatggtcatgcgaaagcctgccgacgccttcctgaacgacctcggcgtcccatacgaagacgaaggcgactatgttgtcgtgaagcacgctgccctcttcacctcaaccctcctctcaaaggtcctctccttccccaacgtcaagcttttcaacgccaccgccgtcgaggacctcatcactcgtcctgctcccactgccgagaaccccgccgccgtccgcatcgccggcgtggtcaccaactggactctcgtgtccatgcaccacgacgaccagtcctgcatggacccgaacaccatcaacgcgcccctcgtcatctccaccaccggccacgacggtcctttcggagccttctccgtcaagcgcctcgttagcatgcagcaactcgagaagctgggcggcatgagaggcctggacatgcgcaccgccgaggacgccatcgtgaagcgcaccagggaggtcgtcaagggtctcattgtcggtggcatggagctcagcgaggtggatggtgccaaccgcatgggtcccacgttcggagccatggctttgagcggcgtcaaggctgctgaggaggctttgagggtcattgatgagagaaaggccgagaacgtggattagatgtgtggaattctgcagaatcgcgcatgtagttgcttctttgccttgagcagtgtcatgtcgagatacttgaccgtacagtccaatacaactgtcactcgttttaaaaaaaaaaaaat

SEQ ID NO: 11535 - DNA, 1289 bp, Oryza sativa
  ref <308>: DATABASE ACCESSION NUMBER: AK108883
  ref <309>: DATABASE ENTRY DATE: 2002-08-28
ctctttcaatgtttgccagacagtaaagggcacttataagcaaatcagcaagcatgtctaaggtttcgagcgacgttcttaaggaggggattgcaggaatcatggagggggcctgcgccaagccccgcaagttcactgagactattgagctgcaaattggcctgaagaactacgacccacagaaggacaagcgcttcagcggcacggtgaagctgccctacatcccgcgccccaagatgaaggtgtgcgtgctgggtgacgtgaagcactgcgagcaggcgcagtccatcggcatcgactcacgcagcgtggaggacctcaagaagctcaacaagaacaagaagctggtcaagaagctggccaagagctaccacgccttccttgcctctgaggctgtgatcaagcagatcccccgtctgctgggaccaggcctcaacaaggcaggaaagttccccagcccaatctcaggaggcaagaccgtggaggactgcgtgaatgagaccaaggcgtccatcaagttccagctgaagaaggtgctgtgcatgggtgtggctgtggccaacatcgacatggaggaggcacagatcaggaccaacatcatgtacgccatcaacttcctggtgtcgctgctcaagaagaactggcagaatgtgaagtgcctgtacatcaagtccagcatgggcaagccattcaggctgtactaagcagcctggcggcatccaacaccccatggcaggagcagcagcaccccagctgctgctgctgctgctgtggggcgttccccagcaggggctgcagctgtgctgtatagtggtgctgtttggcggcggtgctgctgcagctgcagggccctgctgggggctgtgtggtgacactccaggctgctgctgctgctgctgctgctggcagtggcgttgtttgtggtgtcctgcaatcctcctcgcgaactcaccaaggccagccgggatgggtgcagcagcgagtgccccgcgaggggccccctgctgccacggactggctttttgggagctcacaagggaccttccgatgtgcttttgctgatacaaacaatgttttgggcttttaacatgttcactgcgtctggctgcgtgttgaagttatggaacactcttgagttgtacacatccctgctgtgatacaacatggtgggatggtgctgcactggtggctagtgagtgggagcctggtcccagactgggtggtggtgggtggcagcgcgcttgcctgctgctgctgctgctgcccgcctgctgtagcaatggaagcct

SEQ ID NO: 11536 - DNA, 1432 bp, Oryza sativa
  ref <308>: DATABASE ACCESSION NUMBER: AK108884
  ref <309>: DATABASE ENTRY DATE: 2002-08-28
acgtacgagcgcatgccctttctggacacatgctaactgcagcagaggtcctcggcattactagcagcgcaagcaaggcagagatcaagaaggcttaccacaaggcagcgctagcacaccaccccgacaaggtcgctgaagatgagcgcgtcgaggccgaagtccgcttcaaggcggcgaaacaagcctacgagatcctcaacgatgacgacaagcgacacctctacgatacccacggcatggccgctttcgacccctccaatggcatgggcggaggcgcggggccagacatggacgatatcttcgcccagatgtttggtggcatgggaggcatgggaggcatgggaggaggattcggcggcatgggtggtggacgaaacgtgccccgaaaaggccgttctgtagagcaagagtacgaggtcaccctcgaggagctgtacaagggcaagacgaccaaattctccaacacgaaaaatactgtctgctcaaactgcaagggaagcggcggcaagcagggcgcgaagagcaatccatgcggaagctgtagtggacgaggtatgaaggcagtcctccgccaagtcggacccggcctcgtcacacaagagaccgtcccttgtggtaactgtcagggatctggccaggtcattcccgagaagcagcgatgcaagaaatgcaaaggcaataaggtcgtcgaagctaagaatgtcctcgagctatacatcccacgcggcgcacgagaaggcgagcgcatagtcctcgctggcgaggcagaccaactaccggaccaagagccaggcgacatcatcttcacccttaaggaaaccgagcacgagactttcgagcgcgccggcgcagatctgagggcggagctcaagatctccctggtcgaagcactaacaggattcaaccgcgtcgtcttaacacatctcgatggccgcggcatccagctcaacgtccaacagcccaacggcaaagtcctccgaccagggcaggtgctcaaggtagagggcgagggtatgccaatgaagcggagcgacgccaagggcgacctctatctcgttgtcgatatcgaattccctgaggacggttggttgaagaacgatgcagcagtacagaagatcaaggatgcgctgcctgcccccgaccatgaggaagagaagcatgaggacgtcgaagaggttgaactggagttcgacgccgacatggaggacttcggcgccggcagcggggacccacgagctggaggcggcgagtgggaagacgatgatgagggcgagggtgggccgcagtgcgcgacgcaatagacgatgtagcatacgattgacgattgcatgttttggcgttgggatgataattctttcgaaccctgaagacttaccggggcacattgaaagcatagacttggtcattcgaaatcgaagtttcagcactg

SEQ ID NO: 11537 - DNA, 825 bp, Oryza sativa
  ref <308>: DATABASE ACCESSION NUMBER: AK108885
  ref <309>: DATABASE ENTRY DATE: 2002-08-28
ccaggaaggattctgtctatttttccggggcagttcaagcaggaagagaaacgggctaaattcaagaggaacttacaaaaactagcaggaatcagcttcaattttcgctgcgtctctactttgagtaatctgtctgcagcttcggaaacttcaaacgcgatttgtaccaaccaaccacgctcaccccagcccagctcgcttgaccgctaacgccgaggaatttggcatacagcgccatcaacgagtggctcggtgcggaggcgtgcggcgtcatggtcgcccggtcgtcgtcacgcagcagcacatccacttcgtgtctccgaggctcggacaggtcggtactgggcggtaggtccaatgtgcccaacttttcaactgcttttctaccagcccactccaatcagaccacacttgttcaggtcaatcaatgccccatgcaaagactgccctgagaaatgagactttttaagggggtgtttgcgagctctcaaaaacataagttcttagggtaaggacacttttatgagagggactaaagtttagtctctagttgctaaactttagcccctctcttaaaaacataagtccttagggtagtgacttattcttttgtgagagggactaaagtttagttcaattgttcaatgcttccatccattgttaccttcgcaacaaaatctaagatcctcctgcgatgctatcttaatttggaagtagtggtggaatcattgccgcatatgtacagtaacgattatttttaagatttataatcttaaaataagtctcatcccatcctaaattataatattttaggatggagggagt

SEQ ID NO: 11538 - DNA, 932 bp, Oryza sativa
  ref <308>: DATABASE ACCESSION NUMBER: AK108886
  ref <309>: DATABASE ENTRY DATE: 2002-08-28
acgttctcctcctcacccgcagcggcccgtacccttcccaaggagaggcggcggcagcggcggcggaggtggcggcggccgtatgcgggagagagaaagagctcagctcgcatggccatcgcggtgaggtcggctgcggcggtggcgaggcactccctgcgccctccgctggccgcgcccggcagcatccgcggcgcctcgctcctgccgccgcagcgcgctcgcggcgtgggcccgtgtcgcgcccgcgctcgcgcggcgagctcctccgcgactggaggtggcgggcaccttcctccgctgttcagcgtggcgccgatgatggactggacggacaaccactaccggacgctcgcgcggctgatctcgaagcacgcgtggctctacacggagatggtggtcgcggagaccatcgtgcatcagaaagataacttggatagatttttagcgtttcctgctgaacagcatcctattgtgttgcaaattggtggaagtaatctggataacttagcgaaggcaactgaactggcaaatgcttattcgtacgatgagatcaacctaaactgtggctgccccagtggcaaagttgctggtcatggttgcttcggtgctcgcttaatgtttgatccagagtttgtaggggatgctatgtcagctattgctgccaattgtaatgtcccagtcagcgttaagtgcagaattggtgttgatgatcgtgactcctacgaagaactttgtgaatttgtagataaggttgtttcaaaatcaccaactaggcatttcattattcatgcccggaaggcattgctaagtggcctcagtcctgcagaaaatcggaacgttcctcctttaaagtatgtcacgcccatgattttctttgtgtaaaatattattcaaatttgatggataagtcttcgtggtccttggtcgtg

SEQ ID NO: 11539 - DNA, 2084 bp, Oryza sativa
  ref <308>: DATABASE ACCESSION NUMBER: AK108887
  ref <309>: DATABASE ENTRY DATE: 2002-08-28
cgaaaaaccgagtttgtatactcgataaattaagatgggcgggcctgcgaacaagaaggccgaaaagaaggccgaagacgagaagaagacgaaggagaaggcggagcgcgatgaggcggatcggaaaaagaaggaggcagaagacgaggccaagcgcaaggccgacgaggaggcacgtctgccggagagttataagggcaaacgcgacatccgcgcgaacatcgcgctgctgcggcgcgcggtggagcagaaggatgcgtcgctgtactcgcgtgtgctgcggcagaccgtcgtcattcgccgtcagctccggtacgacacgctcgtgtctgtcaccaaaccgttcgcgcacgcgctcgagaccgatccgttgcgcttcgtcaagcccgtgctcgcgcgcgtgacggcggtcgacgccgatgtggagcggaaggcggcggagaaactggcgaaagaggaggccgagcggcagcgggtcgaggcggagcgcctggcgaagttggccgaacgcgaagccaaggagcgggaggccaaagccaaatccgacaaatccaaagccaaactcactggcgccgcagcaccggcggcggcggcagcggcggcgaccggcgacaagaaggcgggcgatagcgtcagcaaaatggagctcgacgatgcagaggcgggtctgaaagacgccaaagccaaagccgaaaaattgcagaaagagactgcggataagaaagccaaagaggaggcggcgaagaagaagttggaggaagaggctgaggcgaaggtggacggcccggttctgccggagatccagacgtacctgcacctgctcgtcatcatttatttgattgatcacagcgccaaggaggaggccgtcgcggctgccactgcgctcaatgactttttggcgaaacacaaccgccgctctctcgacgcgctgtccgccaaagcgctgtactattacgtgctgacgcacgagaaagtcggtcgcgcaaacgcaatccgcaataacttgttgctggctcaccgcacggcttgtctgcgccacgacgagcccggacaggcggtgctgacgaacgcgattctgcgcaattacttgcagaacaacctgtacacgcaggcggacaagttccgtctcaactcgcacttcccgacgcacatctccaacagccaacacgcgcgctacctctattacatcggcaaaatccagaccgtgcagctgcactactccgacgcgtatacgtcgctcagtcagtcgatccgtaaagcgccgaccgctggcgccatcggcttccgtcaaacggtgacgaaactgctggtgattgtgcagctgctgatgggtgacatcccggagcggtcgctgttccgcactccgcagctgaagcgttcgctcaagccgtactttcagctgacgcaggcagtgcgggtgggcaatttggcggcgtttggcacgtgcgtggcgtcgcatgaggctatcttccggcgcgaccatatgctgacgttcatcgcgcgtctgcgccataacgtcatcaaaaccggtctccggcgcatcaacatctcgtacagccgcatcagcatccacgacatttgcgacaaactgcatctgacggaggccacagcgcacgccggcagccctcaccacgcggcttcggtcggcgccgccgcggccgccggcatcagtgttgggtcatcggaagaagacgctgagttcatcgtcgcgaaggccattcacgacggtgtgattgaggccacaatcgaccgcaaacagcatttcgtcttctccaaagacaacgccgatgtgtacgccaccaacgagccgcagcagcagttccacaaacgcattcagttctgtttggacagttacaacgccgcggtcaaagacatgcgcttcccgcccgacgcgcacaagccgcaggccgtcctcaacagcgcggcggacgacacggaggacgcggcggacttcggtgacgtcggcgacgacgacgattagacgatgctgcgtgcgtgctgcatgcaatggcgcgtatctggactctcacgcctgtgagctttggtgtgcgcggtttttggtgccgtgcactttctgcttcttc

SEQ ID NO: 11540 - DNA, 1013 bp, Oryza sativa
  ref <308>: DATABASE ACCESSION NUMBER: AK108888
  ref <309>: DATABASE ENTRY DATE: 2002-08-28
gcaccttgctgagaaaatcgtgaaagccaccaagacgctcgaagatggcagaacaatccgcaaaatttacttaccaaggaaatcttaagggtcaaggtgactgggttacctgcttggctacctcccaagcaaatccaaacctcctcgtctccggttctagagacaagactctcatcacctgggaaatcaccagagagcaaggaaactacggatttgcaaagagagcactcaagggacactctcacttcgtctccgacgttgccatctcttctgacggacaatgggctgtctccggttcctgggacaagactctccgtctctgggaattgaacactggtgtctccaaggcattcgttgatcaccaaaaggacgttttgagcgttgctttctccccagacaacaccaagatcatttctggatctagagacaagaccatcaagttgtggaacattcttggtgaatgcaagtacactttgactgaacaaggacatgctgactgggtctcctgtgtcagattcttgccaagcgcaaagaagccagttattgtcactgctggttgggatagattggtcaaggtttgggatttgagcaagtggaagttgcaaaccaacctcgttggccacactggtgtcatcaacaccatcaccatcgcaccagatggttccctctgtgcatccggcggcaaggacggagttgcaatgttgtgggacttgaagaagggagaacacttgtactccttggacgcaactgacccaatcaacgcattggtattccatccaactagatactggctctgcgctgcaacccaaaagtctatcaagatctggaacttggaatccaagcaaccagttgcagaattggtaccagaattcaagaacgcaaagaccaagtctagagcagcatgcgtctccttggcatggtcctccgacggttctgcactcttctctggatacgatgatggcctcatccgtgtctggggtgtcctcgcttaaaacctccattgattttgaacc

SEQ ID NO: 11541 - DNA, 1015 bp, Oryza sativa
  ref <308>: DATABASE ACCESSION NUMBER: AK108889
  ref <309>: DATABASE ENTRY DATE: 2002-08-28
gcatgccaactggactagtcaaccacggcagggtaggcgactagactagactagtacgcttctcttctcgccatttgaatgaatgccaccgccgctcgatccgatcctggcctgcatgctcaatctccgccgcgcgactgctgccgccgccgtcgacgggctctggttctccttcttctccaccacgacgactgcaggaggagccatggaagaggagaaggcagcctcgcccgtctcccggcacatcatgccgcatctcctcaacatatacggatcgtgcgcgacggctcgggacttcgagatttacgcggcgcatgccacattcgaggacccgcttatgcgagctcatggggttaagcagatcaaatcggccttctacacactccccaagttattcggtgaatccaaaatcgtggagtacacaattacagaaaacgaaaccgcgcccggaaaagtcgagatactgatcgacaacaagcagcactacaagttcctgggcagggccatcgacctggcgtcgctcatcacgctcgacgtcgaggacggcaaggttgtgaagcaccaagactggtgggacaagaagcctctcaagaacagggacacggtgagcttcccggtggtcggccggctggcggaggcgacccgccgcggcgccatgctgctcactcacgctctcatgggctgcggcaaggacccataggccatcgcctccgacagccctacaagtggacaatctcgctacccgtataaaaatatgtttaatatagtttattctctattcactagtactacctcctttcctaaatatataaagttggtttgtttaattttaaacgaatcaacgtcatacaaataacacggagggagtacattttaggtggactgtaaattaaagattgtactccagatgagtatgacgtttttttgcctcatatcactattatgtaatatcatttgtatctactacagtacaatgtttgctttacaataatgaatgtagtactacgttgtatgt

SEQ ID NO: 11542 - DNA, 1413 bp, Oryza sativa
  ref <308>: DATABASE ACCESSION NUMBER: AK108890
  ref <309>: DATABASE ENTRY DATE: 2002-08-28
attatttctagctgtgtgaatgatcctttcaggctgccatcgcaagatcacaccatcccacataaccacccacggctggcttcaaaccagcccgacagttattgtgtgcctgcctgtgacccttaatcagtcttatacctgcgtcacacatcacttgtacaaacagcttaggccggttcagcttggatcagagtcaccatggctcgctcttgttgtttgttgctgctgctggcagcactagcagtcgccagcgctcaggaaatcaggagttacacaaagaaggagttgtttgccgcacaaatctgtggcgatgacggtcccggttgggaaaagctgtatatcggggcctgcccccagggctacaatggccttcgcaactgggctaagcagcagggcttgctgagtcccggagctaagacatacagcactgcagacttcagcacccagaccacctggccatactgcaacccatgcaaccagggccagaagtgctttgagttcaagccgggcgttgccaagtgcatcacagagttcctgcaagaggggcaggtgtgcctggacttctctggcagcaacaagaagtggagccccaaggacctcaacccagtgctgtatggcaagtcctgccagtggcctcagttctcctgcaactgggacgcaaccaagaacaacggcgtgtacacctgccagcgtgtgagggacaacaagggcaagcccagcactgactgctacagggcagctggtggcaggtggtggggtggcactgatcagtggtacactctggtgggagacaagttcaccccatgcggcgggcccaacaccgactacaagtcgtgcaaggagtatgcaggctgcggcaagctggccgccactccattcgctggacagtaatgcacacggatgctgcttcaagcctctgcacttggaagcctttgatggtactgttggctcgtctagcaacctaatcctgcaaacagcctgcagttcgtgcacagcctttgcagcaaagcggcacccttggttcactggtcaagggttgaaacacagtgctgcagcagtgcagctcgctttgacatgcagcagcagcaacagctgggtgcgcacagaaagcacacccagctgttcatgctgactgtaccctggtggcccgcgccactgcactgccagcatgcgcaggctatacaggcagtcactttttgattcacaattggatgatgattgttgtagttgttggaagggactcttgcgcgctgtggcacctgcattgctttgggtctgatcagcagaccaggcacacatcaacaacgcatgcggcgttcgccatcagtgtagtgtagttggtgtagcatggtgggtagcttgatgcattaaggcattattctcgctgtaagtgacgtgtaacacacatgttgg

SEQ ID NO: 11543 - DNA, 949 bp, Oryza sativa
  ref <308>: DATABASE ACCESSION NUMBER: AK108891
  ref <309>: DATABASE ENTRY DATE: 2002-08-28
tttgctctccacaaactttccatcaccacctttcgggcgttaaccaaacgcatcgttcgttcgtctctctctcgctcggcccgcgttcggttgcttgtcacgactcgaaagcctcaacgacaaagaggaggacaaagtaagcgcggctaagcttcgtgcaggcgcgcacgccaagtcgtcttcgccggtggtcaacgtctccaccgatcgatcgagatggcgtcgccggagaggcgatcgtccacgacgacgacgtcgtcgctcctcggcagctttcggacggcggtcaagaaggtccggttcctgctctccttcagcgcgacgcggtggatcctttcctccatcgtcggctcgcgcgccgggccgcggcgccgcgtcagcttcggcccggcggcgcggccgcctagcctgctcgactacgggggcagcgccatcgtgtcgccgccggccaggtcgggggcgccgtccaggacggcgagcctggggccgtcgccggcgaggaccgtgacgcggacgagcagcgcggcgtcctcggagctgctgaggacgtcgagcgccgggtcgtcgtcgtcgtcgcccgccggcggcggcggcgacgacgacatcgaccggcgagccgagctgttcatcgccaacttctacaagcacatacagatggagcggcaggtgtcgctgcagcttcggtacttggacaggacgccatccaggtgatggatttttcgtacgtggcaggatcgatttttacaaaaagtatctcatcatcaaaagccaaaaaaaaaagaaaagggtatgtggatttagatgggtgtttttcgttccatcatttctccacatcttaattttggattgttttcatgagatagatactttattgattctttttattgagagtttgtaaatctctatctctatctctactattataaaaattgaagatgtttttatcggt

SEQ ID NO: 11544 - DNA, 2254 bp, Oryza sativa
  ref <308>: DATABASE ACCESSION NUMBER: AK108892
  ref <309>: DATABASE ENTRY DATE: 2002-08-28
acctttcgagccgttgacattattccccaccgcagcccgctttcttcgttgccctttctgagtggctgcgtaagtgcacacttggaaaatatgcagacctcacttcgtgcaccagggaaggccttcggccccgctcgcgttgtcagcaaaagcaggaagcaccatgtggtgcgtgcagccaaggacctgcacttcaacaagaacatggaggcactgaagaagatgcaggcaggagctgataagctggccactgttgtgggagtcaccctgggtccaaagggccgcaacgtcgtgctggagagcaagtacggcagccccaagattgtgaacgatggtgtcacaattgccagggaggttgagcttgaggacccagtggagaacatcggagcaaagctggtgcgccaggcagccgcacgcacaaacgacacagcgggtgatggcacaaccacagcaaccatcctcagtgcagcattcattgctgagggattgaagattgtggcagcaggcaccaaccccgtgcagctgactcgcggcatggacaagactgtggctgcactggtcaaggagctggccgggctgtccactgaggtggccagcgacagggacctggccaatgtggcatcagtgtcagcaggcggcaatgccgagatcggccagctgattgctgacgccatggccaaggtgggccgccagggcgtggtcaccatggaggagagcaagacagcagaggacaacctggtgtttgtggagggcatgcagtttgaccgcggctactacagcccgtactttgtcacagacccagagcgcatggtggcagagtacgagaactgcagggtcctgctggttgacaagaagatctccaccgcccgtgacgtgattggcctgctggaggctgccatccgcggcaactaccctctgctgatcatggctgaggatgttgagcaggaggcactggccacgctggtcgtcaacaagctgcgaggaacactcaaggtggtggcggtcaaggcaccagggttcggcgagcgcaagaccagctacctggaggacattgccatcctgacaggcggcaccctggtcaaggatgagctgggcgtaacactggacaaggcagacgagagcgtgctgggcgtggcagccaaggtggtgatcagcaaggaggcctgcaccatcgtgggagacggccgctcgcaggcagacgtggacacacgcgtgaagcagatccgcaaccttgcggagcagacggagcaggagtatgagaaggagaagctcaatgagcgcatcgcacgcctcagcggcggcgtggccatcatccaggttggcgcccagactgagactgagctaaaggagaagaagctgcgtgtggaggatgccctgaatgccaccaaggctgctgtggaggagggcatcgtcattggtggtggctgcacgctgctcaagcttgctgccaaggtggataccgtcaaggagtcgctctccaatgaggagcagaaggtcggtgccgaaattgtgaagaaggcgctgacctacccactgaagctgatcgcagagaatgcaggcacaaacggcagcgtagtaatgcagaaggtgattgacagccaggaccccaactacggctacaacgcagcgattgacaagtttgaggaccttatgcagagcggcatcattgacccaacaaaggtgatccgttgtgcgctggagaacgcctgctctgtggcgaagaccttcctgcttgcagacgtggtggtcacagagatcccagagaggcagccagcagcagcagcagccccagcagacgactacggctactaagcagcagtcgcacctgcttacacactgtgcaaattgctcgaccatggtgcattcgttcagcagtcagcgcagctgcagactgcagctgcttgggctgtgtgatgtactggagccatttgtgcttgcagcgttgtggcagctgtgtgcttagtatgtagcagctgaggttggagagtgggtattgggtcttgtgctttctctttcatgtgggtcggatggtgagatgggcagctacccattgcattgtggcaggcacccgtgcagctggaatgcgcggaattggtgaagactgctgcttgactttgtttgggtatggtgatggctcagcagtgcctacacttgcaagtgcgcatttgcggaacttccgcttgaagggcattcttcctctttctcatatctgttggagtatcaccgcatgggattcatgtaaccgtgtctcttg

SEQ ID NO: 11545 - DNA, 1465 bp, Oryza sativa
  ref <308>: DATABASE ACCESSION NUMBER: AK108893
  ref <309>: DATABASE ENTRY DATE: 2002-08-28
cgtcgaacgaatataaatacatataagaatggtctctggtactctatacacatatgccgatagctatcgcggtactaagtgccgagtggccgctgcctacggtggagccacgttgaaggtcgtcgaggtcaagagcgacgatcaaagccatcatcatgtcccagcttttgagagcgacgacaagaaggtgcacttgatcgagacaaacgcgatcgcttactacctagcgaacgagcaacttcgcggcggttcgtcggtcgaggaccgttctcgtgttctccagtggctcaactggggcagccaggacgtctactcggctgttgcctcgtgggtctacccggccttgagcctcgtcgactcgactccggcgcaggtcaacgctgccaagaacgacctcaagaacatcttcgagttcctcaacggctacctaaagacccgcacctacttggttggtgagcgattgtcgttggctgatgtctcgctcgctgccgacctcttgctcgcctatgagcacgttgctgatgagcagtggagaaaaccattcgctaacgtcaaccgatggttccagactattgtcaaccaggctaacttcaagaaggttactggagaggtcaagttggccgtgaaggcgatcgagtacgacccgaagaagaaggctgccgagcacccgaagaaggaggagaagaagaaggaagagaagaagaaggaggagccaaagaagaaggaggagcctaagaagaaggaggaggccaagaaggacgaggaggaagaggaggatgatcttcatgccgatgagccgaagaacgatccgttcgctaccatgccaaagggaaccttcaacatggacgaattcaagcgagtctactcgaacgaggacaccgccactaaggccatcccatacttctggaagaacttcgacaaggagaactactcgatctggtattgcgagtacaagtacaaccacgagttgacccaagtcttcatgtcctcgaacttgatcggaggtatgttccagcgtatcgagaagttgcgcaagaacgctttcgccagcatggctgtcttcggtgagaacaacaacaacttgatcgccggtgtctggttctggcgtggacacgagctcgttttcccattgtgcccagattggaccattgactacgagtcgtacgagtggaagaaattgaacccggaagacgagaaggatcgcaaactcgtcgacaacttctggctctgggaaggcgacgtcaagggcaagaaattcaacgctggcaagatcttcaagtaaactcgctcgccagaccgttttattcgcgcttcttaccatctttgaatttttctgcgttttttgtcatcatctatttttgtgataccatcattatattttagtatgacgaaacagaaattttcaattttagttggaatttatttatatttatatttttgaattggaaataaataaattaaaatt

SEQ ID NO: 11546 - DNA, 1865 bp, Oryza sativa
  ref <308>: DATABASE ACCESSION NUMBER: AK108894
  ref <309>: DATABASE ENTRY DATE: 2002-08-28
attacaaaattattaattacatacactctatggtctcctgaacctgtcgcgcaacttggaaccaacttgatcgcacgtgcggtcaccaaaggatgaagtcaaatgcttgaaatgtgacagatgccagagttccaggcttgcggcccctgtcgtgtgactatcagcagtttgcagcaaggccatggggccaaagcacgatggaacaaccagcgtcaagccagcagcctcacagcatgtttctttacagacagtggctgtggtattaggcgtgctggctggcttcctgattgggcacctttaccagcatcacagcgaggtagttctggcagagcacctctacagccggggaggttccacagcgcatcccaagcctattaaaacctcttatggctacaagctggttgtacatgacttttcggacctggtggacggcagctttgtcacaatggacatcagtggcagcagtgacaggatcaccagcagtggtaccagcagcagcagcagcagcagcagcagcagcagtagcagcagtggcgctggtgctgtaacagagcaccgcataacattagcgcagctagcagcagcaggaggcgacagcacaagcagctctgattccagcagcagcaacagcggcacaagcagcagcagcacatcgcaaactggaccacggttttacaagggctctggcaaaggcactagcatcatgtacagcttgtccaacatgaccaacttgagtgtggctgacaagcagcgcatcagtggcgcgctgaagaagcgtgccgctgagctgccaggcagcagcgtgcatgccctgatgaccggcaacggcagcccctaccagaacatacagggccgcatcatgtatgcctccatgaagttgatccagcagatgcctggtggtgacaatatcaaagccttcacacgaattatgcacaggactacagacgatgacctggtgggggagttccccacattccgtgcctacccgctgcagcctgagtgtgacacgtggtgtgagtttccagtgaaggatcgtgcgaacgctgtggtgcaatggctcatggcggcggcagccaaccctgagctcatacagggggcatggctgctgctgctggagagtgactatgtgtggatgaatccactgcagctgcctggcagtgcacatgatgtggctgtgcggggttacggcttcacatacgactatattgacccacagtacccgtctgcagcgatggtggtgaagcgcatgtgtcccgagtgcaagataagtgaggtgcctcacagcggcccctcaccagtgctgatccgtccccatgagctggccctggtggcaccagactgggagctgtacagtgcatggattgagcggaatgaactggcaaagaaggcatttggttgggtgcgtgagatgtatgcttggtgcgtggcgattcagaagaacggcgtgcagctgcagcatgaagccccgcccaagagcaagctgctatcccagccaccccatgactgggtgcaaggggaggcctgcatgctgcactacacctggggcacattgtacaacaaagacggcaaggagttctggcggtttgacaaaagggactggacagcaaaagagcatgagctgaagctgccacagtttacgctcccgccgcagccttgggaggatggctggaagctgcaggatggagtcaagatcagcaaggacctgcacaatctgacaacagcaatgctgatgcagatgaacaaggcatcaggaatgctgcctgtgttgagtccaaaacagtgacttgcagctttgcagcagcaaagtactcacgacgtagtctgctcagcggttgttcaaggtgaatgtaacaaacctggcgctg

SEQ ID NO: 11547 - DNA, 1066 bp, Oryza sativa
  ref <308>: DATABASE ACCESSION NUMBER: AK108895
  ref <309>: DATABASE ENTRY DATE: 2002-08-28
ctggttcccgatgcatgtctcaagctggaacattcgattattgcaagatacgaagtcctggtgattacttgagacaagccttcgcgttttgacttgcgacgtcatacgccatgacacacacgaacaatggtctcaccgcttcgtgtaatgttgtcatttcgtcaggcactcagaccttcgggggtcctatttcctatgcgctgctttatcctgttttgcaacccgtcttggggacttttcacgacttactttacggcccggatgacgccattgaactcagtatacaattatcgaccggttggcatcgccttcctggttccaatatactgtggtctggtgatcacctggaaggcacgcccagtgttcctctagtaggctcactgctagctatgggtgtcgacagctggattcccgcttcgctgttgtttccctttgcttctcgccaaagccggaatcgtggagctgtaccggaccgtcagcagcatctgtgtccttgcctcaatacgaccagacgacttgtgttgcagccgcgcttttcgattgcattggtgtcgatttccttgtttttccttcgtatcgtttgcccttgttttgcttttcgattggagggcacggacgacacagcttcgacgattcacaaagggcccggggtttccccgtgaacttgggactcgtcacctgcgcggctttgtccgggatatatctcggtggtcgctgctgggttgctggggtcttaccagagaccatttgagcccgtcaggctgctatctttatatgggtcaatccacatgtccctttacgcctatcaactcagggactttcggcaaccctttatccatgcgtgggaacagcttcaccaaattgctctactcaattcaatgatggccacagcatcctgtgctcaacttccgtcgggatccgcttcttatcccctgtttgagggacatcgcagcccctctacagatgccgttatggattcgtggatctcaatgaggcagctctgctgttttctgcactcatccagtagctttcgaattggtcttttttttccttgataaaaaaaaag

SEQ ID NO: 11548 - DNA, 1466 bp, Oryza sativa
  ref <308>: DATABASE ACCESSION NUMBER: AK108896
  ref <309>: DATABASE ENTRY DATE: 2002-08-28
atccactcactcactcttcacagctcctctccggtagaccttctcttcttccgcttaattcttctcttcttcgcgactttgatagtctgcctcattcattccttgatcatcttgaatctacacgtctgcgacgtttttataataccaccttttctacacacatcataatgtctctcaagacccttgctacccttgctgccgcgagcggcctcgttgctgcttcgcccatgcccatgagcaggcgcaacatcgttaaccctttcggtgacggcttcaacggtgctttcgtcaaccagttcaacggaaacaacggcgccttcaacctcattgacggattcaacggattcaatgcccagccccaggtcctccagatccaggagcaaaacctcgtcatcgacaatggctttggccagcagatcgtccagcaagtcgagcagaccctcgtcgtcgacagcatcaacaacggcttcaactccaacctcaacaacctcttccgcagcgcgaactttgccaacaacttcgccgaccaatcgaccgtcatgctcgtcgtgcaagagatcgtcacatccgtcgacaacggctttggccagcaaatcaaccagaacgtcttcgcacagaacgctctcgttgcaaacgcaggcctcttcaacacccagaccgtcatgctcttcgactcgcgcaccctcatcgcaaacgacatcctgggcaacaacgcctttgccaacatcggccagttcggcggcatcgccggcgccaccgctgccttcgacaacctgctgcccaccaagacgctcggcatcatcctgttcaacaccaagcccacctggagcgctgtcgttgccgacccggctgctaccctcggcgccatctggcagaacgccatcctcggcctccagagcaaccagttcgatcagaacctcatcagcctgaacgaccagctcgcactccagatcttccagggcttcagcaaggcatagagtgtcgcgctgcgagtgtgcacgccatgtcggcgcaagtgatgagcttcctgccgctggagctcgttttcatcgctctcgacatgtcagtgtgagccttatatcgtactcggtgtagtagtcagggaattgtgaagcagggaacgaagagaaacggggaggagcgtgcagagagtaagagatcgaacatgaaataccccacgaagcaaaagagagcggagtttttgtgcatgaatgagaaacgagagaaagtagacgccagatttttttcctacgattctttcccaattagtctaggtactcaattcaatttttgtcacggatttgttcgaagcatttggtttgtggcgattcattcagtcgattttccattgtttggagtttgggagcattcgaggcgtagacagtttagagcgagctcctgtcattagttatgcgaaggtctcttcatacatatagtgtgccaagttatgtgagtagtgatagcgc

SEQ ID NO: 11549 - DNA, 817 bp, Oryza sativa
  ref <308>: DATABASE ACCESSION NUMBER: AK108897
  ref <309>: DATABASE ENTRY DATE: 2002-08-28
atcaagcagctcctggttttgcagctctagctattgcctagcaagctactagccactgctaatcttgccatggcttccaattcggttctcttcgccacggtactcgccatggccgtcgtgctcaccggcagcagcagctgccaagcggctcgcctcctcgccgacgcaacaccgcctgccgtgccggcggtcaccttgccaccgatgccagccattcctgccatcccggcggcgacactgccgccgattccggcggtgccaaccgtgccgaacgccgcgttgccgcccatgccggccgtgcccaaggtggcactgccgccgatgcccgcggtgccggctgtgcccaccgtccccgcggtggcgctgccgccgatgcccgcggtgcccgctgtgccgacggcgacgttgccgccgatgccggccgtgcccgccgtgccgaacgccgtgctaccgcccattccggccgtgccgaaggtgacgctgccgccgatgccgtcgattccggcggtgcccaaggtgacgctgccgccgatgccatccgtgccgatgccgttcttggcacctcctccttcggcataattaaggacgctgccagtgcttgtatatttagtgggtcatttgatttgattaatcttttggttatgtattaatttcccctgcttgatttgttttctgtgtgtaaatgcatgttgtatacttgtatgcgagttaattttttttgtaatttgttcaagctgtacatggagtgcgcggctataagtatttgtatatggcatttgtttatataagttcattttggttggtttaacttctgttc

SEQ ID NO: 11550 - DNA, 925 bp, Oryza sativa
  ref <308>: DATABASE ACCESSION NUMBER: AK108898
  ref <309>: DATABASE ENTRY DATE: 2002-08-28
aattgatctattgctagaagacactcgttcattactttccatttccattctcttgtttgatcgaccctacgttcaccacgctcctttcaaaaagtcaaattcttcaacacgatgcagctcaagaacatccttttcgctgctgctctcagcaccgcggccgtcgcggatttcgtgataatttcggacttgccagttccaacaaatgtgcctgacctctccaatatcgcctcctacatctccggcctcgagaacttcgtaacctccaagttcgacgagctcacaaaatctctcggaccctccgccgcttcgcaagccgtctctgcgcagaccgcgctcgcatctttcgtcgccaccgcctcgtactcgattcccgcggacgtgactgccctcggcgcatacgagaccttcacctccgctcccgcgtggtacacagccctgccatctgacctcaaggcgtactacgaccgcaggaatgccgccgtccagagcatcgtcaaggaggccgtgaacggcggcgcaaccgataacgcgactaacacggcggcctcgaagagtcagagcacgaatgccgcgcctgcaccaacggcggtcgtgaaggccttgggcgctggcgttgcggctgccatggttggtgtcttcgcgttgtaggacagccccagtgaattgacgacgggttggtgtagcctttgaagggcattagcgatttacttcttcttcatcatcatcttcttcaggagtatgtggtgattgatggcgactggatttgcattgacattctgttcgaaagataccacttttaccgagtttcgtggaaaaaccaaagggaattgttcgattcttgcgcgtttttcttacaaaagatatcaagatgtgtgaatagatccttgacttcttgtcgtatttacagtttgttttgtcttcctcc

SEQ ID NO: 11551 - DNA, 2206 bp, Oryza sativa
  ref <308>: DATABASE ACCESSION NUMBER: AK108899
  ref <309>: DATABASE ENTRY DATE: 2002-08-28
atgcccagttgattctcggacttctgaggtagcaattgtacacagcagtcttaaccaattggtagtgaattgaagttatagaatatcaagatgacgattcctgacgaggttgacatcatcgtgtgcggtggcggatcatgcggttgcgtcgtggccggccgcttggccaacctagaccacaacctccaagtcctcttgattgagggcggagagaacaacttgaacaacccatgggtattccgtccgggtatctaccccaggaatatgaagctggacagcaagactgcctccttctactactcccggccatcagagtggcttgacggacgacgagctgtcgtgccatgtgctcatattcttggaggtggatcttccatcaacttcatgatgtacacccgcgcctcggcctcggactacgatgacttccaggccaagggctggactaccaaggaactcctccctcttatgaagaagcacgagacataccagcgagcttgcaacaaccgcgacatccacggcttcgagggccccatcaaagtgtcatttggcaactacacatacccgatcaaggaggacttcctgcgtgctaccgagactcaaggcatccccactactgatgatctccaggaccttgtgactggccacggtgctgagcattggctcaagtggatcaacagggacacgggtcgacgatctgaccctgcgcatgggtacattcatagcacgagggctgtgcaccagaacttgcacttgcttaccagcaacaaggttgagaaggtcattcttgaaggcgaccgtgctgttggcgtcaaggtcgttcccaccaagcacctgtccaacgctcaggtcccgtctcgcatcatcagagctcgcaagcaaatcatcgtgtctggcggcactctgagctcacccctcattctccaacgctctggtatcggtgacccagagaagcttcgcaaggctggcatcaagcctcttgtcgacttgcctggtgtgggattgaacttccaagatcactatcttaccttcgccacctaccgcgcaaagccacatgtcgagtctttcgacgactttgcgcgcggcgatcccgcaacgcaagaacgcgtcttccagcaatggaatattaacggcactggcccgctcgccaccaacggcattgaagctggcgtcaagatccgccccaccgaagacgagctcaagatgatggacagctggccatgtcccgagttccgctccggctgggacagctacttcaaagacaagcccgacaagcccgtgatgcactactcggtcatcgcaggctggttcggcgaccacatggtcatgccgccgggcaagttcttcaccatgttccacttcctggagtatccgttctcccgcggatcgacgcacattgtgtcgccgaacccgtacgaggccccggactttgatgcgggcttcatgaacgataagagggatatggcgccgatggtgtggggatatgtcaagtcgcgtgagacggcgagacgcatggatgcgtatgcgggtgaggtgcaagctatgcatcctttctatgcgtatgatagtcctgcgcgcgcgaaagacctggatctcgcgactacgaatgcgtatgcgctaccaggaaacatcacggcgggtatccagcatggaagctggacgatgcctatggagaagggacgcgcgcccgagccgaactttttgaactcgaattgtcaggaggtgcttcctgatcttgagtactcgaaggaggatatcgagcatgtgattaactggaccaagcgccacgtcgaaacgacctggcactccctcggcacgtgttccatggccccacgcgaaggcaactccatcgtcaagcacggcgtgctcgacgagcgcctcaacgtacacggtgtcaagggcctcaaggtcgctgacctgtccatctgccccgacaacgtgggctgcaacacgtacagcactgcgctgttgattggcgagaagtgcgctgtgttggtgggtgaggaccttggatattctggatcggcgctggatatgaaggttccgacgtatcatgcgccgagagaggttgttgggttgtcgaggttgtaaggacgatggcttgtgggatgtagctagtctatctctgcttgctgctttgttgtgctggaatggggcgcatggatgtgaagtatgtaaatgacagaatgaatcacgacgtcttcgatac

SEQ ID NO: 11552 - DNA, 983 bp, Oryza sativa
  ref <308>: DATABASE ACCESSION NUMBER: AK108900
  ref <309>: DATABASE ENTRY DATE: 2002-08-28
acatgtctttagtgtcacagagtgatttttttggaggcgcccaaggcgagtgccgtctgcctgaactcgagcatcttgtcggcgtcatccggcaagacgcccctggccgcatcggtggcgcggaagagatcctcccacgcggccagcgccggcgtcctcgccgggtcgatcatcctgcgcccgatcagcttcttgatcgccgtgaaccacccgaggtagccgccgagcacgacgtcgacgagcccgacgccgtcgccgccgaagaagggcttccccccggagcactcccggagcgcgccctccagcgtctccagcgccgcgtcggcctgcgccaccgccgccgccctctcctcctccgtctcgctccggaacaggatccccagccacgccagccgcaccttgtcgtcgacgtatgccgcccagaaccgcgccacggcgcgctcgtaggggtcggagggcagcacggcgggggggcggtcgggccaggcctcgtcgatgtactgcaggatgacctgcgactcgttgacggggcggccggcgtggaggaggacggggacggtcttgttgaccgggttggaggcgaggaggaggtcgctcttgtcgcccaggttctcctccacgaactcgtacggcagtgacttgaggttgaggacgaagcgcaccctgagcacgaacgcgctggtccacatccccagtagcttcagctcgccgtctcccgccattgccacgtctcgttctcgagctactcgatcgccgtgtaccctcccgaggtgtagtcgttggctcggttatatttggtcgggcaattgggttatatgtagctatagcagcaacagcaattggagcgtggattggatggaacttgggagcgtgcagttgactgacttgtacagtattaccgatgtacctggcgctggaggtcggagccagcagctagcttgatgggaacgtgtgtgttgtcatccaaaaaaaaaaaaaaaaag

SEQ ID NO: 11553 - DNA, 1265 bp, Oryza sativa
  ref <308>: DATABASE ACCESSION NUMBER: AK108901
  ref <309>: DATABASE ENTRY DATE: 2002-08-28
aatccgaaccgtccgttgtggcccctctttcccggtggcaacttgacaactcgccgagcagccgccgccggcggccatggaccgcgaagcgctccgcatggtgtgctcgcgggagttctggcggatggccgtcctgtggaccgtctccctcctctactcctacatcctcctcttcttcctccgccgcggcgcccccgtccctcgcctccgacctatgcccgagcccgacgacgacgccgctcgtcgccgccgccgccgccccgtctgcgtgattactggggcgacgtcggggctgggcagagcggcggcggcggcgctggcgcgggaggggtaccacgtcatcctcgctgggcgttcttcacaattgttatctgagactgttcaacaaattcgggatcaacaacctgatgcccatcttgaagcatttcaaatcgacttgtcatcctacaagtcaataaagaagtttgaaacttcactgaatcagtggatcaaggactcaaatatggagcactctattcagcttttggtcaataacgctgggatcctagcaaagtcatatcgaattacagaggacggtcttgatgaaatgattcaggcaaactacattggtccatttgtcctgaccaacattctgttaccattgctcaagaacagctcaacaccttctcgggtggttaatctaacgtctttcacacacagatgtgtgtcataaattaacttgtctgagaaaggattgagcggagtaaggtttggtcattggccagcgaggagaagctatctcttagcttctacttatgagtataccaaattttgtttactgatgttctcatacgagcttcatcgacaacttcacttatcttctggtgtctccgtcatggctgcggatccaggtgtagtacagacaggcataatgcgggagcttcctccatgtctttcttggcttgcgctttctgttctgcgcctcctgaatctcctacaacaacctgatacgggagttgatgctgtccttgatgccgctttggcaccacctgactcatctggaaagtatttctttggagggaaaggaaggaccataacgtcttctcagttgtcatacaacgttgaagtggccaagaagctatgggcagaatctttagcattgttcaatgagctacagaatagagtatgtgaactgaggactagctgaactaacttgtgaaaattatgaggttactgaatttcaggtttactctgttcgatgggcaatagtttcaggccttttcagt

SEQ ID NO: 11554 - DNA, 883 bp, Oryza sativa
  ref <308>: DATABASE ACCESSION NUMBER: AK108902
  ref <309>: DATABASE ENTRY DATE: 2002-08-28
gtttgccgcaccacagcgtagtctcgcctcgccttccggaagcttcgagaagcagagccgcctcctcgcctcgcctagcctcccggaagcttcgagaagcccccgcgcggcccgagccatggagaagcagaagccggcaggccacgacgcccgcctcctcctcgcgctgcgctgctccagggcgtcgctgctcctctcctcgctccgccatccccgcgcggcgccgccgcggcgggcgacgacaccacggagatcgagctccactgccgcgggtggtagcgtgctccgggacgccggcctcctccgcgcggagctcgctgcggcgcggcgcgaggccacgatgcacgcggcgaactccggggcggaggttctcctcgtcctctccctggtccccgtcctcctgctcctcctcgggttcctcgcggcagcggcggtggcggcgtagtagggagggggttcggagcgcggcgccggcttgagatcgacggaatcggaagggttcggagccagcttcaccgttcttgtgctccgtgagtttcttcctctgttgcggggcgacgcgttgttgtgcggatgagcaggtctagctcacggcacgattgtgtagtgatatcgtacatatggcatcggattttggtcgtcccgttttagcgtttgctaggtgttcgatggaatgcccatagaaagtgtagcttcgatttcattgcttctcgttgacagagtaaaataatgcagaaccgagaagatgatgctttcatttgtctgacctttgatttttgtgaatttctctagaacatattctaaactgtgaaagctttacttattgctctcgattagacatggatattgcaacgggaaccaataccaatcatagcttcttgtt

SEQ ID NO: 11555 - DNA, 1245 bp, Oryza sativa
  ref <308>: DATABASE ACCESSION NUMBER: AK108903
  ref <309>: DATABASE ENTRY DATE: 2002-08-28
tggcctggactaattgttagtaataacatatatacgaaatgagcgcaccagcagcaacaggtaaaaagcagcaagcaaagctcggcttcgtcgagaactttttgctctccggcgcagcggccgtcatctcgaagacggcagcggctccaattgagagagtgaagcttctcgtgcaaaaccaaggcgagatgttgaaacagggcaagatctcggagccatacaagggcgtgatcgactgtacggcgaaaacgttccgttccgagggcttttactcgttctggcgcggcaacttgaccaactgcatccgatacttcccgacgcaggcgctcaacttcgccttcaaggaccagatcaaggcggccttcaaatcaaagaagtccgacccgtacatggtcgcgttcggcaagaacaccgcctcgggtggtgtcgctggtgccttgtcgctctgcttcgtctactcgctcgactacgctcgtacccgattggccaatgacaccaagtcggccaagaagggcggcgctgagcgacagttcaatggtctcgtcgacgtctaccgaaagacgctcgccactgacggtgtcgctggtctctaccgaggcttcgtcatctcatgcgtgggtatcatcatctaccgtggttgctacttcggcttctacgacacgcttaagccaatgttgttgggcgacaactcgagcttgttgctctcgttctcgctcggctacgcggtcactgtcacgtcgggtcttatctcttatccagtcgatacgattagacgtcgtatgatgatgacgtctggtcaggccgagaagtacaacggctccatcgactgcttcgtcaagatcatgaagaaggagggcttcatgtcactcatgaagggtgccggtgccaacattttgagaggtatcgctggcgctggtgtgttgtccggcttcgacaagctcgttcaactctaccttggcgtcaaggtcgacacctcgggcggttaattccaccgactcgaccaccaaccacctcccaaacacactcatttcgtcactgtcactcgtgtgacctcaaacaaaaaaacaaaaacggactaaacaaattcatattttttagattattatcacagttctactttataatagcgaaattattattcttaataaattttaaacaaattggttattctagtttaatatttctttggcttttaatcaccacttcaaacactaacataatatttaataaaaatctaaaaaacat

SEQ ID NO: 11556 - DNA, 1186 bp, Oryza sativa
  ref <308>: DATABASE ACCESSION NUMBER: AK108904
  ref <309>: DATABASE ENTRY DATE: 2002-08-28
gcaggcgaaatccttttgattatattcgttggtgtggttgagctcgtcggggtgagtaactagcatcgatgcaggcggcgatgccggcggcggtgacgcacgacgacctgtcgctgcggaaggcgcaggagaggcgggcggcgcggtcgagcgggcgggcggcggtggcgctagtgtcgctctcggtgctctgcggcatcgtcggcttcatcctctgcctcgccgccgaggggtcgcgctccgaggcgtcgcactacctcatgaccgtcggcggcggcggcgccaacgcggcggcgaacaacgggcaggtggacgtctgcttctacaactccagcggccgggcgccgctggcgttcgccatcggggcgttcctgatgctcgccgtcgccatgttcgccgagcacgcctacatgctgctcgccgtcgccgcgccggactcgtccgcggcggggctcgccgtcgccgagggacacccgcgcgtcccctccgaccccgccaggctcacctggcagacctgctgcctcttcttcgtcacctggatctgcttcgggctcgcggaggtgatgctcatggtcggcatcgcggtggagtccggccacgtcagcgactggaggaagccgcgggcggtgtgccaccgggtgcgcccgggggtgttcgcggcggcgggaatcctgggactcatcaccgtcgtcgtcggcttcgtcgtctacgtcacggccctgcagacgaacaagctgcgggcgcagcaccccgtcggcggctactacgtcggccacggcgccccgcacccgggcatgccgccgccgccgatgccgtacggcccgcacccgcacccacaccagccgccgccgccggcagcggcggcgacagcgccaagcgcgccggagatcacgccggccgcttgccaggtccagccaagccgagcggcgtgcgtcaccaagcagtgcgctgatgcagtttgaaacgagtagaagaatttggagattaagcagagacggtgatgtttaaaaggcatctactcttttccgcgtaacatgttctttcgtgatttgctatattagagcatttgatttgagttatttgcttgtatgtcacaccatttgtttttagcacaaacatgatttgaattgtaaagcacttgattcgtgattacatctcaacaagtttcaatttaatttacttggtc

SEQ ID NO: 11557 - DNA, 932 bp, Oryza sativa
  ref <308>: DATABASE ACCESSION NUMBER: AK108905
  ref <309>: DATABASE ENTRY DATE: 2002-08-28
gtaagctaatagatcgagctggattagctagatcgaccgtataagctaatagatcgatcgatcgagagatggcgaactgcttcggcgatgttgtggacaactacaagctggacgagatggagaggtacgtggggaaggccaagaggcaggaggaccgtgcacgggaggccatgaacctggtgaacgaggacggcaaggacaagaaggcggccagctacgtgcagggcgtcaaggactggtacggcaacggcgagtcgacgctgtgcctcgtctacaacgccaccggcgccaccctccgccacgtcgccgaccacgactggtggggcttcatcggccgcaccccgtaccccaccgagatcggcaacggccagtgggcggcgttccaccacgtccacaagtccggcgactcctccggatccgaggccgccgtcgtgtaccgcggcaccaacgccgacggcgtcgagcgcgacctgctcgtcgcctggagcacgccatggagctctttctaccggaacaaggcctactgcgctgttggaggtgtggacagcttccaaggtgactgggagcaattgtacgacaaggtgaataacgcagcttacacatgcaatgccgactcggatgggttcaagatagatgccagtactgctaccggtgacagccccgtcttcacggcgaccatcaaaatccatttcagtcaatgaaaagagaaacaagatcgaccacatacttgcatggcattcgctcatgttgcacggggcaggcccgctacattctattgctgtatcagccagtcaatgaatgtaatgttcttctctttcgcgaaataatgtagctgttactatcgatcgtgtgaatcgatcatgtacaccagctctcgttttattacatattataataaatgcgttcagccatgtaatttgcagcattaaagc

SEQ ID NO: 11558 - DNA, 889 bp, Oryza sativa
  ref <308>: DATABASE ACCESSION NUMBER: AK108906
  ref <309>: DATABASE ENTRY DATE: 2002-08-28
ttatggctgccaaaagcggaattaccttacggtcaggcggcggattttggtctgacgggtgaaaaagcgctgcaaattggcgcctgggaagacgcgcccgtgtggctggtgctccagaagcgcgataacgacatggcctcggtgcgccagctcatcgatctggacgccgggctgttccagctggcggggcgcggcgttcagctcgccgagttttaccgctcgcataaatattgcggctactgtggtcatgagatgcacccgagtaaaaccgaatgggcgatgctctgcgggcattgtcgcgagcgctactacccccaaattgcgccatgcatcattgtggctattcgccgcgaggataaaattttgctggcgcaacacacgcgtcatcgcaacggcgtttacaccgtgctggccggttttgtcgaggtgggcgagacgctggagcaggcggtggcgcgcgaggtgatggaagagagcagcatccgcgtcaaaaatctgcgctacgtgacctcccagccctggccgttcccgcaatcgctgatgaccgcctttaccgcggactacgacagcggcgacatcaaaatcgatccgaaagagctcatcgacgcaggttggtatcgctacgaccagttaccgctgctgcccgcgccaggcaccgtggcgcgccgcctgatagaagataccgtggcgcgctgccgggcagactacgaatgacgtggtacaatggcgccctgtcgcttgaggaataagaaaaatgaccgaactgaaaaacgatcgttacctgcgcgccctgcaacgccagcctgtagacgtcaccccggtgtggatgatgcgtcaggccgggcgttatctgccggaatataaggccacccgcgcgcaggcgggcgat

SEQ ID NO: 11559 - DNA, 1180 bp, Oryza sativa
  ref <308>: DATABASE ACCESSION NUMBER: AK108907
  ref <309>: DATABASE ENTRY DATE: 2002-08-28
gtggcggctcatcctcatgttcggcaccatcccggctgggctcacctactactggcgcatgaaaatgcccgagacggcgcggtacacggcgctcgtcgcccgcaacgccaagcaggcggcggctgacatgtccaaggtgctccacgccgagatcgaggagcggccggaggtggtcgagagccaggtggtcgccggggagacctggggcctcttctcacggcagttcatgaagcgccacgggatgcacctcctggcgaccaccagcacgtggttcctgctcgacatcgccttctacagccagaacctgttccagaaggacatcttcagcaaggtcgggtggataccgccggcgaagaccatgaacgcgctcgaggaactctaccgcatctcccgcgcccaggcactcatcgcactctgcggaaccatcccgggctactggttcaccgtcgccttcatcgacatcgtcggcaggttctggatccagatcatgggcttcttcatgatgaccgtgttcatgctcgcgctcggcgtgccctacgaccactggacgcacccggcgcaccacaccggcttcgtcgtgctctacgcactcaccttcttcttcgccaacttcgggcccaacagcaccaccttcatcgtgccggctgagatcttcccggcgaggctccggtcgacgtgccacggcatctccgccgcgtccggcaaggccggcgcgatcatcggcgcgttcgggttcctgtacgctgcgcaggaccagcacaatcccgacgcgggatactcccgcggcatcggcatccggaacgcgctcttcgtgctcgccggcacaaacttcctcgatatgctcatgacgctgctggtgccggagtccaagggcttgtcgctggaggagatgtccaaggacaacgtcgtcgacgagaccgcccaagaagcgatcgcccaagcgtgatgtcataaacatgccgtctcgacgtgagtgactgaaaaaaaatgtatgctttattactctattggtgtgattacttaatctagttttgtatacttttgtagtgtctctccttttacagttgtggatttgtggggtttctctttctttctttttttttggttgaaacaattaaacttgtttgtgagattttgtgaactttccctgcaactgatataaatggcatacattcatttc

SEQ ID NO: 11560 - DNA, 925 bp, Oryza sativa
  ref <308>: DATABASE ACCESSION NUMBER: AK108908
  ref <309>: DATABASE ENTRY DATE: 2002-08-28
gcggcctgccccagcagatcccgcccatgtacggcatccccggccagttcccccctcagggtccctacggccagcccaacaacccccagttcattgctgccatgcagcagatccagcagtcggctctcggcggcggccgtggcgtgccggctgctcgcggaccgggcatccagggcggccttcccggaagcatgcccggcatgcccggcgccgccaacatgccgggttaccccccgaacgctaggcaacagggcgctggtgctggcgctggccgtggcgctggcggtcgcaaccaaggccccggcttcgccggcgcggcgcctcagggcggccgtggcgctgcccctgccgagggcgctagcgtgctccagacccagcttgcggctgtcggcgataaccccggccagcagaagcagattctcggagaggtcatcttccccaagatccaggctattcaccctgagctggccggcaagatcacgggcatgcttctggagatggagaactcggaactcgtggctctcatcgagaacgagggctctctgcgggccaaggtcgacgaggcgctcgcagtgtacgacgactatgtccgtgcccagggcggcgaggccggtgacgccaacggcccagccaaggaggagaaggctgacggcaaggcttaagccagccagttcaagatctccttaatgatagcgatatgtgcggatggctacttcttttcgcagacgataccatgcatttcatatcgcattctttctaacgtctctttttgttgtttattcccctcgtacgttcttgggctgcgcatcatggtctgcaaccaagctgaccgcagagtatacccattcagatcttttgagacgatcagtgggcttctcgtgtcggccactgcagcagaatttaccatgaactgatagactttttt

SEQ ID NO: 11561 - DNA, 1124 bp, Oryza sativa
  ref <308>: DATABASE ACCESSION NUMBER: AK108909
  ref <309>: DATABASE ENTRY DATE: 2002-08-28
aacctgcgccgatcgagatatggagaacctccagctccagggagatgatcacgacgacgaagcgctccctcacttcccctacttcgcggtgccgtcaccgccgccgctcgccgtcgcgccggcggcatcggcgacgacgtcggatggtcaccagcacggcccactcgaggtgctcgagcagccgccgtgtagtaataacctgcatcccgatggcctggtcgatggccctcagctagcggcgacgacggcggtgccgatgatgctgccggcgatgacgtccttggactggcagtcgctcctgcagacgtgcctgcaggtaccgcctccggtgctggagcagcagcaaccggcggcggcggcgcaggcggatcagtacagcggggagaacgatcacggcgatctgcaggcggccgagagcagcggggcaggtaacaaggagaagcaggtgatggcgaagggcggggcggggaggccgtcggggacgaagaagaaggcgagccggccgcggttcgcgttccagacgaggagcgacaacgacatcctggacgacggctaccgatggaggaagtacgggcagaaggccgtcaagaacagcaagcaccccaggagctactaccggtgcacgcaccacacgtgcaacgtgaagaagcaagtgcagcggctcgccaaggacacgagcatcgtggtgactacgtacgagggcgtgcacaaccacccctgcgagaagctcatggaggccctcacccccatcctcaagcagctccagttcctctcccagttctaattaacgacccatatcgatcggtctcggtcggtctcaaactctgaaatgatcgatctttcaagttgctacacaaacacaataacacacattcacgtgtacatatatacctgcaacaaattaaactctctgtttagcttggggggaagaaaaggagaacaatgtggcctacctcccccgtctcccgtcaatacagtacaatatactgctagttgatcatgtatgtcgtcatactgtatatacgtactccctgtacgtgtatccttgtatattttcatatgtacgctaagcttacgcatatattgtatatgtgacacaaataatgcccccggaaagttaaaat

SEQ ID NO: 11562 - DNA, 1049 bp, Oryza sativa
  ref <308>: DATABASE ACCESSION NUMBER: AK108910
  ref <309>: DATABASE ENTRY DATE: 2002-08-28
aattacaaggcctcgccggagacggagacggagaccaatccgcccccgacctcgccgatggcggaaactccacgccgaatccgccgcggcggcgccgggctctcgctcgtcgtcgtcgccctcctcctcgccgtcgcggcgagggcgcagcaggagtacgaggcgaaccagcagaacgcctgctacgccaccaacgcgagctccaccctcggctacacctgcaacgccacctccgcctccgccgccgccgcggcgccctgcgacgcgtacctggtgttccgctcctccccgcccctctacgcctccgctgtctccatctcctacctcctcaacgtcgccgccgccgccgtcgccgactccaacgccgtcgacccggtcgcccccgtcgccgccgaccgcctcgtgctcgcgcccgtgccgtgcggctgctccccgggcggctactaccagcacaacgcctcccacaccatccgcgacaccggcgtcgagacctacttcatcatcgccaacctcacctaccagggcctctcgacgtgccaggctctcatcgcgcagaatcccctccacgacagccgcggcctcgtcgccggcgacaacctcaccgtcccgctccgctgcgcctgcccctcgccgccgcaggccgccgcgggcgtcaagcacatggtcacctacctcgtcacctggggcgacaccgtctccgcggcttggcggcgactacccgctcgacctggccatggccgtggcgtcgctggcggcgcggtgcgtggcgaggcagcccgccgcgcggccggccatggatgaggtgttcgtctcgctcgcggcggtgtacggctccacggtggactggaacccctcggatcacggcaactccgggtcgtcgctgattgggaggtagcaaaacgaaccaaatcggtggcaaattcgattcaaatcgatgcgaaaagatcggaatttttcaaattgagttttgaatttgtagctgaaaatagtatttgtgttgcaattgatggtgcgaataaaaactgtcctcgagcagcagcgacaacttg

SEQ ID NO: 11563 - DNA, 1217 bp, Oryza sativa
  ref <308>: DATABASE ACCESSION NUMBER: AK108911
  ref <309>: DATABASE ENTRY DATE: 2002-08-28
ctcaagagcatgcatgctgccctagcgggtgcgacgcagtggcagattaaccgctcggccatgcctggtgcgtacggctgccctggcttcaccgagacgacgtatgactatttggggctgtcgggctacccgattcacgcttacggggctttcatccacttagccgctatgcgcgcggcgcaacgtatcggcgaccttctgcaggacgccaacatgcgagactccgcccgcctttccgaagccaaatgcacacaaggcatcgaaactcacctctggcgtggcgactattggttggccttccaagatcagaacgaagctgctccctctgtcgtcatgtcgggctcactgcatggtcaaacttgggcctccacgctcggtctcggttggttggtgccggttgagaacatcaccacgcatctccaagcggaacgcagtggcaactgtgcttacgacctcaccaactgtgagtttggtctgctcaccatccctcaactgaagccctctgatccgaacgactggcgtgtgcatgctacgccctccatgtctatggattacacttccgtcgacatttatctcaacggcgcgcagcaactgcagaactcccctgctgaagccaccatgcgtctgtaccaagagcgcatgaatgatcagtgggattggcgagatctgcacatcggtcccgggggtttgagctgcagcgatgcacaactcaacggcacgtttttggcgggagcgcctttcgtcaactcccactatgcgcgtcaactgcaaggatggcatattcagcgcgcgttggtgggtcaacaatgggatgctcatcgtcgtgtgctgcagttacgccctgcgcgtttggtggtgggagaccgtttgcccttcttcacgagcagtgcggtcggctttctggaggtaaacatcgacgcgtctgagctgcacaagcattctcgcgcctcgctctgcgctcagagcaatggagcattgaggagccgtttgcagaacgctgtgcgcattcagctggtcgatggacacttggagggagcggtgcatgtgtcgctcgatcaccaagcggtcggtctgcatggtgtgacgctgagccgtaaggtgcgattgacgagacgaggctcggtggcttcgcttcaattgcaatgctgaagcgaaaccttccgctagttcagctagtcagcagctgcccttcattgacattaaaacaaatctaattt

SEQ ID NO: 11564 - DNA, 1261 bp, Oryza sativa
  ref <308>: DATABASE ACCESSION NUMBER: AK108912
  ref <309>: DATABASE ENTRY DATE: 2002-08-28
gttttcggctgcactgtgaacctaacatgatcgcctgtgtgttcttactcattgcgttggcctctgccaccacttatttttctgacgacttttcttctggtgatttgagcaaatggactcagtctaccgctaagcctgctggcgagcgtggaagcattggactttctgagggaaagtgggccactgataaggccgctgagactggtctgaagaccttggaagacgctcgattctacgtgtactccgccacgttcccagagttcaccaacgctggcaaggatctggttctccaatacactgtgaagcacgagcaacagattgactgcggtggcgcctacctgaagctgcacccagctggcctcaaccaggcctcttacactggcgattctgtctacaacatcatgtttggaccagatatctgcggtggaaccaagcgcacccacttcatcctgacgaagaaggacaagaaccacttgatcaagaacgacatcccgtgcgagtccgacaccttcacgcacacctacactctgatcctcaagcctgacaacaccttccgcgtgctgatcgacggagaagagaagcgcgctggcaacatcgaggacgagttcgacatcctggagcctaagcagatcaacgaccctgcccagagcaagcctgccgactgggttgacgaggcgcagattgacgacccgaacgacgttaagccagagggctacgacgacatcaagcctaccatcatcgaccctgaagctaccaagcctgaggactgggacgacgagctcgacggcgaatgggaggcccctaccatctccaaccctgagttcaagggaccatggagagccaagcgcattgacaacccagcctacaagggaccttgggtgcacccacaaattccaaaccctgcctacgctcctgacgccaacctgtactccttcccaagctttggcgccgttggaatcgaagtgtggcaagtgaaggccggaaccatttttgacaacatcctcgtcactgacagcattgccgaggctgaggctgcgcgcgccaagtacgccggccgcaaggacaccgaggctgccctggagaaggctgagcgcgaggcgaaggaagctgaagccaaggccgccgaagccagcaaggacgatgcggaggaaaaggacgatctctaaattctataattatgtgatgacgctacgacgatattcgtttcattttttttatgccttttcgttaagttaatgaataaaatacaaggttgcgaatc

SEQ ID NO: 11565 - DNA, 1344 bp, Oryza sativa
  ref <308>: DATABASE ACCESSION NUMBER: AK108913
  ref <309>: DATABASE ENTRY DATE: 2002-08-28
gacacagtcccatgtcacacacagatcccacaacatgtatcatatgctcagctcccgctccgccgccgcgtctcctgctgccgcggccctgtattcgtcgctccaagtcaccaacaccattgtccccatggtgtccatgtcgactcttgtggctcgctctgccctccgcctcactcaaaatcgccagccttttgtcgccgccctcaacctcaaacccgcatccccaccctatcttgccacaccggcctcctccgccggccgcgcgctttacctatccacacacacgaccacacccgcaagcgcccgcgcattccactgccgacgcggtccgctcggggatgccggcaacaagccaccgcccggcgacgggtggcacgagcaccctcgccacggatactattgccgttctgggccatttggcggcgtgtttggcccgcggtctgtggatcccgacaggttcgagccgcccatgcgcgggctgatgaaatttggcgccgcggcgtttgtgggaatgacagtgttttccatgaccaagccgttgttctttttgattgttggcggtgcactcggatatggcagttatcgcatggtcagggcgtacttggatgtgaagttcccgccgtactaccgcccgatgagcggaggcgggagcagcagctcaggcgcagatggcgccaagggaaatcaatcggacgtcggtgtcaatgaccccatgctcgactggatccagcgtgaccttggcgtgcgcccgcccttgggctcggccgcacgctacactcccgaagatgcaaaggcatggatagagacgatggcggggccattccggcaaggcattcttgagtttgcccagcgcgttagccagcccacgacacagctgcgcaaaatgacaattgcgcaattgactgcagatgactcgcagttcaagcaagctatgccgaggtcgtatgagtttgcacccatccggtttgctgtccagcgcggcgcggtggactcgataaccggtcgcagcggatcgatcgagattgagtttgatgtgctcgacaaggacagtggaaaactcattcccatcaaggcttatggtgaggtggatcgcgaccgcgtgagtgcggcggttggtgggctggttgtgcggtggatcgaggttggaaacgggcctcgggtttcagtgaatgccgagttcccaaagttcaaccaggaagcgggcaagcggcccgatgtggttgagggcaaggcgaccgacgtcacgccacccggcagccgcaagtgaggtccttattttcatgttcgcgcccattgctgcgtctccaactcaataagcaatgaagaatcaacaagtttgttgtc

SEQ ID NO: 11566 - DNA, 2029 bp, Oryza sativa
  ref <308>: DATABASE ACCESSION NUMBER: AK108914
  ref <309>: DATABASE ENTRY DATE: 2002-08-28
ttttcttgtcgttacgcaaggcttttcgttacgcatcgcctcgttgacaagtaattctttggccttttgtgccccgtcactcgttatacacattatatcctaatactacccgcttcactcgttcagcggacaaacaccctaccccctactaccagacttaatattgcatccaagatgaagtacgctttcgtcaccgctgccctcgttggctcagtctttgcttcccagcacaaggcccacgctggtttccaccagcgccgccacgagtaccctgtggctcctcaggctgatgtttgcacggtctgcaccaccgtctacgtgacaccagagcacccagctgctcactaccccactgccacccctgagacccccaagccctctgccccagctcccgtcccagaggtctcgaagcctgtctacccagctgttcctcagcagagtcagcctggttaccctgcggttcctcctcagagccagcctgctgtccctcagcaaagccagcccggctaccctgttgttccccagcagaccaagcctgctgtccctgagtccacttcctgcactgaggagacccccaagcccactggacctgctcctgtcccccagcagagccagcccggctaccctgccgtccctcctcagagccagcccgctgttcctcagcagagccaacctgctgtccctcagcagagccagcccggttacccttcggttccccagccaagcaagccggctgttccccaggagagcaagcctgctgtcgctgagtctacctcctgcaccgaggagacttccaagcccactggacctgccccagttcctcagcagagccagcccgcttacccggccgttccccagccaagccagcctgctgtcccccagcagagccagcctgcttaccctgctgttcctcagccccctaaggagtccaagcccagccagcctgagacccctaagcccaaccagccttcctaccccgctgttcctgagcagagcaagcctgccacctctccttctgccccagccggaaagcccactccttcccaaggaggtgacaagcccaagcccactgcccccgctggtggtaacggccacatcgtaaccaacggcgacaagtggtccattacctacaccccttacgcccggtctggccagtgcaagactgctgaggagattgcctctgatatcaagaagatctccgagcttggcttcaccaccatccgctcctacagcactgactgcggtgtcttcgagcacgtcgttcccgagtgcgagaagtacggactgaagatcatctacggtatcttccttgaggctggtggcaaggacggcaagggctgcttctcccagtacgccgacgagcagctccaggacatcaagaacaaggctcccaaggactctgtcgccatggttatcgtcggtaacgagtgcatgttcaacggcaactgcaagcccgaggagctcgcttcgtacattgaccacgtccgccaggagctccagggcgccggcttcccctcgtctgttgccgtcaccaccaccgagcccgtcaacgtctgggaggagaagggtgctgccctctgcgaccacattgacgtctttgtctgccaggtccagccctacttcacctcgtcaatcagctccgacatggccggtgactttgctgcccagcagctcgagcaagccgccaaggtgtgccccggcgccgctgccaagggcaagtacattggcgagattggctggccttcttccggccaggccaacggtaaggccatcgctagccccgaggaccagaagactgccatgaagagcatccaggacaaggttggtgctcacgcttccgtcttctctttccaggacgacacctggaagcctgctggcgagtacggtgttgagcagcactttggctgcgttgatgctctttcctcctaagtccatctcgggaagagtcatcatgtcttgtatttagcggatcacacacatttttctcaagtctaaactacgggttttgctccgtcacgcccttcatgtg

SEQ ID NO: 11567 - DNA, 1120 bp, Oryza sativa
  ref <308>: DATABASE ACCESSION NUMBER: AK108915
  ref <309>: DATABASE ENTRY DATE: 2002-08-28
actaattaatatttttaataatatacgaaatttatttgaacttggaaagcatcgggagaaggaaagatggcttttgtcaaattagtcaagaataaggcttatttcaagcgctttcaagttaaattcaagaggcgacgagagggtaagactgactattatgccaggaagcgtttgatccttcaggagaagaacaagtacaacacaccgaaataccgaatggttgtccgattctccaacaaaaacatcacaacccaaatcttgtacgctcgtatcgagggtgacgtcgtgcttgcggccgcgtactcgcatgagttgccacgctacggcgtgaaggtcggattgaccaactacgcgtcggcctacgcgacgggtctcttgttggcgcgccgtttgctcaagaagctcaagttggacggcgtgtacgctggtgccaaggacatcaacggagccgagttccacgtcgaggacatcgaaggccagccaggcgcgttcaccgcctacttggacgttggtttggctcgcaccaccactggcgccaagattttcggcgcgttgaagggcgccgtcgacggtggcctcaacatcccgcactccgtcaagcgcttcccgggctactccaacgagaagaaggagttcaaggccgaggtgcaccgacagcacattttcggcgtccatgtggccaactacatgaaggcgctcaagggtgaggacgaggacgcctacaagcgacagttctcgcagtacatcaagcacggcatcactgccgagaccgttgagtccacatataaaaaagctcacgctgagatccgaaaagatccggaggcgaagccgaagacaaagaagaccacacccgagggccagaaacacaagagatggaaccgagcgaaacttacgaaattgcaacgtaaagaccgagtcaagcagaagaaggagtccttcctcaagaagttgcaagcggtcgccgcaggagtcggctctgcgtaaggtgttcgccgtcgtcgtcgccgccgcttaaaataattgtttagaaatgtttttgtttcgagtactttttcgtgatatatgtacaactttaaacataaaatttatttgaaataaaatgtttctaaattgcaaaaat

SEQ ID NO: 11568 - DNA, 1532 bp, Oryza sativa
  ref <308>: DATABASE ACCESSION NUMBER: AK108916
  ref <309>: DATABASE ENTRY DATE: 2002-08-28
atgactgccgtgcgccagcgcccgctgcgccctttgtcgtcggccactgacctgaccgactacactgacgtgacccattccacgctcgaggtcgactcggatcccatgtcggacgagcctgccgactttgaatcagaaacccagagtctgacgcccagcatatgggactatgtccactcccatggccgcacgtaccaccgatacatggctggagcgtacatgttccctaatgacgaggtcgaaaatgaacgactcgacatgcagcacgcgattatcaaggcgctgttcggccaaagaaactacttcgcgccgctcaagcgccccaaacgcatgctagatattggctgcggcaccggccgatggtgtctggaaatggcaaaggaattcccaaaggctcggattgaaggaattgacccgtcgcccatccagcctgatgtcacgcccgccaacgtcgacttcttcatcgatgacatccgccgcaaagaatggtggcactgcacccaaccttacgattacgtccatacccgtatgtcgctcggcatcttccgtgatttccgcgagattatacaaaagggcttcaacaacctcgagccgggcggatacatggagtcgcatgaaatgtactccaaagtctactgcgacgacggcaccatgccgtctgatttcaagctccttgagtggacgcgattacacgacaaggccgctatgaccctcggcacaccactgcgcatagccaacaagctcaagacatggtatgagcaggccggctttgttgatgtgcgcgaggagacacactcgatccccattaacagctgggcgcgcgactcacggcacaagttgcttggcaaattcatgctctggaacatgtgccaaggcgtgcacgcctggagtgtcgagtattttgtcaaagcactgggatggaacgacaccgaagtcgaggtctatctcgcgcatttgcgcaacgcactggctgatcggtctgtccatgcgtactacaaggtctgggttgtctacggccgaaaacccttcccctcggaacctccaagccaagtccccaaaccctcccactggcccaaagaaccatcaagcgacgacgaaggcgacgacgatgacgagtagcacgcaactcacatttctaccaacaatgttaacttgcttttgaaacacgatatccttccttcctcatgaccgaacccttattcttttttcaagcaaataagttcggcgtctggcgtctttttaagtcattttcaaagaagagctgcggcgtcgagcttttccttttcctttctctcgattccttcgaatcgtccgccatttgggatctgggcgttatatactactcatttatgggtggccatcttgtgtttaatttgttctctggcatagtggagcgagcaggggcagatgtggatgtatggtgaaaaattcgaggagagttgggatatggacgagaggggaaggagctgtgtacattgtgctcgcgatgtaaagcaggtctatattcgagtatcaagttacactttttgaac

SEQ ID NO: 11569 - DNA, 1220 bp, Oryza sativa
  ref <308>: DATABASE ACCESSION NUMBER: AK108917
  ref <309>: DATABASE ENTRY DATE: 2002-08-28
atcgctagctgcagtcagtcaccacgtcaagccagtggacacgacaggcaagacgagagagctagcatggctttagctcacgaggtcgctttcgaggtgaacctgatcgaggacgacggcggcctcgccggctgggcgccggtgggcacgcgcacggcgctgtcctcgcacgccgagcgcgacacggccatgctgatctcgggcgccgtgtcggccgcggagccgaatgagcgtattagacgatcaagcggacggtacatcgtcgcgtcgcgccgcgccgacgaggaggacgggctgcggcgcgcggttccggcgggcgcgctcgtgccacgggtcacgtaccgtgtcgtcgggtgggtcagcgtgcagggccagggcgacgggaggcaccatgcggtgcgcgtcggcctccgcgtggacggcgacggcggcgacgacgagcgcggctcttcgtcaacgactacaacgtcctgcgtgggaacgaccccaacgcgacgccggagaagtacgtcgagctggtggacgcgctgcggcgcggcggcgcggcggtgggcgggatcggggtgcaggggcacatggacagcccggtggccgggcaggtcatccgcgccgcgctggacaagctcgccgcggcgggcggcgcgcccatctggatcaccgagctggacgtgagcgagcccgacgtggggctccgcgccgacgacctggaggtggtgctgcgcgaggcgtacgcgcacccggccgtggagggcgtcgtgctctgggggttcatggaggggcagatgtggcgccgggacgcctacctcgtcgacgccgacggcaccgtcaacgaggccgggcagaggttcctccagctccagagggagtggaggtcggacgcgcgcggcattgtcgacggcgatggccgtttcaagttcaggggcttcctcggcacgtacgtcgcgcaggtgacgacggcgacggggaagatgctcaagacgttcaccgtggagaaaggggataattctctcgagttggatttggatatcgaaatttgaaggtttaatgtgatgatatcgtcctagtcgtaatgtactgtgagcttaaagttcatctccatcgtgctggactactgaataatgacgtgcatgcatatactactgcgcttgatacattattgtgaaggaacaatggaacatggattaattagttcagtaaataaaaatgatacgattggatat

SEQ ID NO: 11570 - DNA, 963 bp, Oryza sativa
  ref <308>: DATABASE ACCESSION NUMBER: AK108918
  ref <309>: DATABASE ENTRY DATE: 2002-08-28
aaacgatgccgcgccagccagatgcagccgtctgccacgccctcggctagccgtcgaggccgtcatgtctccggtgaccacgatcaccgcgaccgcagccgctgctaccgaaacgcaccaccaccgtgcctccttccaccgtgccacagcagccgctgctgtcgttgtcatcgcggccacagcagccgcggcggccgccgccacagccacagccaccgccagacgccacagacaccgccgccgtcgccacacgggagtcgccctttcctccacgtagccgcaccctgccgcctcaccaccgctgcaacaagcgccgctgtgacgctgagtctgggcaggggaggtggatctagccacctccttcatccagcacctcaccaccatggcctgcccctccagttttggctcgctgtgaccatggagaacggatattattttctcgaggtcttgcttgatgagcgatatctcctcctctgcacccttgggcagcttgctgccgtgacgacgcactagctcctccagcctcccggggaggctgaccatggcgccctccatagatattactctcaagacaaatcaagtgcgtatatgttacagatttgcaaggcatacgtactgctgaacagaagcaaataataaaattgaaatcactgaagcaaacaaagctagagagggattactgaatagcagttgaaggcattagataaatcactgaagcgaagaagagagggattactgaacctagaagctgaaggcatcagatcaggttaggatgagcgggctctccgagcggtcagagttggggatcatttccagcttccaaagtccgatattttcccctctgcgtttggtcaaaatcattgtctttatgcccatccacccattccacaagttctgttcagaatagacgacggggacatttgagcagctgttgggcactttaatgtgacgtactccctccat

SEQ ID NO: 11571 - DNA, 1134 bp, Oryza sativa
  ref <308>: DATABASE ACCESSION NUMBER: AK108919
  ref <309>: DATABASE ENTRY DATE: 2002-08-28
aggcccagtcagataacgttcgctactgcttgtcgattccattcgcttcatcgacgacctttaattccctcgacgtccaagtttccgccgtattatcttgccgttcaatacttctcgccgtctccaattacatacctaatacctaatcccttagtttctgtcgtcaacccccaattcgattcgatatttcccgccttcgaaacacaacacgtcttcacaatggtttctctgaggtcaactcttgtggcgaccgccgccctcgttgctggtgtccaggccgactacttcattcagccctcgagcgtccccctgagcacccgtaactcgtggtgcacaaaccagaagacccagtgccctccgatctgcctggacatggatcccgcttccggaaggcccatcaagaatacctgtgacgcggctaccctgaccttcgagtgtgtctgcggaaacaacattgctcccaacctcaccgagtactcccttaccatgccctaccacaagtgcgtgcagttccaggaaaactgcgtcaccaactgcggccttgccaacaacggatgcgccgattcgtgccgcaaggacatcaagtgcggtgcctcgagccccaagggagccaccaacgccactgcctcgaccacaccaggctccgccgccaccaccacgacgagctctggccccaagcttgagaccggcttcggcaacgccggtggcggcccggctggcagctacgctacctcgctgcaggcctcgctgtcacttgctgtcgcaatcaccggtgtcctgattggtcctcttctgctgtagattggacaggcgggcgacggggcgtggatgtcggaagaacgggaggacctgacagctccgctgtaaggtcctctggtctctatacggcagttgttagtacgggccgatgtttcagtctcccccgctaggaacaggaggcatgagtaaaatgtaaattggcaggttttgatggcatgcatttttggcgcatctggcttttctcatttttttttcggagtcggcagcctctccttggctcgcatcgcggccgcctgatactcgttcgatgtcggatggtcttggacttgcgccgacgccgcaaagtcctggtcttaatatgaacgtctattgtag

SEQ ID NO: 11572 - DNA, 945 bp, Oryza sativa
  ref <308>: DATABASE ACCESSION NUMBER: AK108920
  ref <309>: DATABASE ENTRY DATE: 2002-08-28
aatggcaagctcatatactgtctgaccagcattaattccggccagccgcgagccatggcgagggcaatcctcctccatctccactccgacgaaaccgtgcctctcctcgtcgtcatcgtcgccgcggtggccgccgtcgcgctggtcatcgtgtcgctctgcacgagcagcaagcacggcaagctgtggaagcagcagcagcagagaagtgggtcgtcgttgccgcagctgaaggcggaggaatcagcaggcggcggcggcggcgccagccggaagcagctgctggccaccctcagcggcatcggcggaaaggcggcggccatggcgaagatggtgtcgtggaacaggcggtcgtcgcggcagggatgcagcagcgacgacgacgacgaggccggcggcggcggcttggcggtggaggaggaggaggcattgtggaggaagaccatcatgatgggagacaagtgccggccgctgcagttctccggccacatcgcctatgactccgacggcaaccagctgccggcgacgaccatcagcaaggaagcagccaatgcggatgcggtcaacaatatttatgtttaacaatcatatgcatcgagaggaaaaataaataatagtaattgtgtacatgagatgcagtgatgtacagaatgacaacctgctgcgaaaacgtcgaaaaggtccatattctagtggttacaacttacaagtgtcatagtagcaccttaagtcttaggttggactcaaatttttcaggatttaacgactttatgcttcagtggtagacgatgtacccatcaatagcgagatgcctataatgactttgtcaatttacagtatttactggtccagccagtgtctttataggagtgagtgtgtgtgcattgtgagtgtctattgtactgtgtaatttaaaaaaaatgacaacgtgctagctacggaggg

SEQ ID NO: 11573 - DNA, 1264 bp, Oryza sativa
  ref <308>: DATABASE ACCESSION NUMBER: AK108921
  ref <309>: DATABASE ENTRY DATE: 2002-08-28
acataaagtttttaaaaaacaaagaagtgtgattttatattttagctaagctaaacacaaaaagaaacaaaaaactattttaaaaaatgtcggagccaattcgagttctagtgactggtgcagctggtcaaattgcctactcgcttttgtacgcgatcgctaacggtgacgtgttcggcaagaaccagccgatcattctccacatgttcgacatcacgcccatgctcaccgccatgggtggcgtcaagctcgagctcgaggactgctcgttgccgctcctcaaggacgtcgttgtcagcgatcaggactcgatcgctttcaaggacatcgacgtggccatcatgactggtgccatgccgcgtcgcgagggtatggagcgcaaggacttgctctcggctaacgtgcgcatcttcaaggcccagggtgaggcgctcgacaagcatgcgagaaaaacggtgaaagtacttgtggtaggcaatccggccaacacaaactgtctcgtcctcgccaagtacgcgccatccataccgagcgagaacttctcgtgtctcactcgtctcgatcacaaccgcgccaaggctcaggtcgctctcaagctcggtctcacgtccgacaaagtgaagaacgtgatcatctggggcaaccactcgtcgacccagttccccgatttggctcacgctcaagtcacgttgaacgacggctcgaacaaaggcgcctacgaggcactcaaggacgagaactggatcaagaacgagttcataccgtgcgtgcagaagcgaggcgcggccattattgccgctcgcaagctctcgtcggccatgtcggctgccaaggcgatttgcgatcacatgcgtgactggtggcacggaacgagcggcgacgagtgggtctccatgggcatcatttcggacggctcgtacggcatcgagaaaggtctcgtgtacagctacccggtgcgaatcgtcaacaggaagtggacgatcgtgcaaggtctcgccatcaacgactgggctcgatcgctcatggacaagactgctcaagagctcatcgaagagagaaacgacgctttcgatgctactaaatagaaattttcattctataatttttaattgaacactaaaaaaaaagacgaggcttcaattagatctcaactaaaagcatatacaacaagttttcattttttatttttacttatttagatttgtttttgaaagcatcatttacattagaaaataataggttttcttttgtgtttaagttttgc

SEQ ID NO: 11574 - DNA, 785 bp, Oryza sativa
  ref <308>: DATABASE ACCESSION NUMBER: AK108922
  ref <309>: DATABASE ENTRY DATE: 2002-08-28
atcgtactatcgtagtagtaagtacatattcttctgtttcatgaaacagagggagtacagtgtatcgttattacatcttctccttccaaaggcaaattaaatcatggcgccatcgctgctcgcgccacggctagccgtgcccttgctcctcgtactcgcggcagcggcggcggcagatggcgtcgccgacgccggcgccggcgccggcatgacgcacctccacttcttcttccacgaggtgttcacggccggcccgaacggcacgacggcgacggttgctccgccggcgcgcagcggcgacgggagctccttggggttcgtcggcgtggtggacgacatgctccgggagggcgcggacccggcgtcgcgcctcgtggggcgcgcgcagggggtcaccgccggcacgtcgctcgccgccgccgacggcgcgggcgcgatcacgacgatgctgagcctggcgttcacggaggagggcccgtacgccgggagcacgctgcaggtgttcggccgcgcggtgctgggcacggtgatggagcggccggtggtgggcggcacgggcaagttccggatggcgcggggtcacacgctcagccggcgcgtgaactcgtcggaccccgacaacctcctcgtcatcgagtacgacgcctacgtcaccacgtctcccatttagctagctagctatagcctagctaccatggatgggtagctttgatttgtgatcgatcttgtaatgtggtttttttcttgatcatattctaaataaacaaaatcgtgtgttttgtgat

SEQ ID NO: 11575 - DNA, 1671 bp, Oryza sativa
  ref <308>: DATABASE ACCESSION NUMBER: AK108923
  ref <309>: DATABASE ENTRY DATE: 2002-08-28
aagatatcaacagaaatctcagggaggagctacggctatgacaattccccaagagccagtgagttcgatgaacatgatctgaccatcaggaggctcaacgagtacagagcacgcctgtcgagtcttcagaaagagaagtctgaccggcttcacagggttcttgagcacgtcaccgaggtgcactccctgtgcgacgtgctcggcgaggacttcatcgccatcgtcaacgaggtccacccggggctgcacgagacggcggatcccggcaagcccaccagcatcagcgacagcacgctggccagcctctcccaggtcgtcgcgatgctcacgtcggagaagaccaagcgagcagccatgctgcgagaggccgtggtgccactggtcgagctctgggacctgatggacttgccggaggaggagcggcggagcttcaggaaggcgacggccgttctgaggccggcgagggaggaggctctgtcctccggcgtgctgtccatcgcaaccatcaagaagacggaggaggaggtcgagaggttgacgaggctcaaggctggccggatgaaggagctcgtgctcaagaggaggttggagctggagagcatctgcaggagcatgcacgtcgagcctgacaccagcactgtgccggagaagtccatcgcgttgattgattctggccttgtgaatccttctgagctcatggccagcatcgacgagcagatcgcgaaggcgaaggaggagcagcagtccaggaaagaaatcatggacaagatcaacaagtggctgctggcgtgtgaggaagagaaatggctcgaggagtacaatttggaagagaacagattcaatactggaagaatagcgcgtctgaacctgaaacgcgccgaaaaggcaaggcttatcatcaacaagattccagcaatgatcgacaacctgatgagtcgaacactagtctgggagaccgaaagaaacaagccttttctgtatgacggggctcgcttggtcgccgtgttggaagagcacaagcaagccaggctgaggcaggaagaagagaggaggcgcctccgggagcagaagaagctgcgcactctgttcagcgagaaagaggcgatgcctcacctgaaaaggcccggcagcagcttcggcagggcgacggagccgtgcaacatgagccggaagagggtcgacgccgcgccgccgtcggtgcgcagcagcagcgggtccagcgggagcagcggcggcggcgcggctgatcccttcaggccgcggtcgtcggcggcggccggatcgggcgcggggcactgcggcgagttcttcaggagcggcggtgcgaggcggctgtcggcggcggcgccgttcaactacgtcgccgtgtccaagggcggcggcggcggcggcggcttgtcgtcgtcgatgatgtcatgaagcgcgtagctaggtgggcccgtgtagataacacgacactagctagctgtcctgaaacacatgcacttttattcccttttgtaccgctcggaagcttctagaaggttcgtttgtgacggcggatttgattattggtttatttcagaatgctgtaccggatacggttagtacaacgtacggtgtatatatatgcgctatgtatagtaattgaagtactctatgtgggtaatggagagaggtggttatgtcctt

SEQ ID NO: 11576 - DNA, 935 bp, Oryza sativa
  ref <308>: DATABASE ACCESSION NUMBER: AK108924
  ref <309>: DATABASE ENTRY DATE: 2002-08-28
actcttctcccacgagaccaacgttttctactgtgcacgtgcgtacgttggtttcctcttggagttttacacgaaggaattgaagtgagctaccaagacatggacgtcgaacagctgcagcagcatgccaggaggcttctgtcgaacggcagggtggtgtcggcggcggcggccgccggcgcgtcgcctggtccggctgggcgcgtgttggaaggcggcgcggcggcggcggcgcgtcgtccggcaccgttcagctcgctggacgcgacggtgatcacggtcctgtccctcctcctctgcgtgctcgtcgtcgggctcgtgctccacgcgatcgcccggtgcgcgttccgcgtcacgcggcgcatgtgctacggccaggagccgcccggggatcacggcgacgaggcggcggcggagcgatgcgcccgggtagccaggaagaagccgggacgcgccatcgcggagaagatcccggcgatcgtctgcccggccggcgggctcgatcggctcgccggctgcggctcgacggagtgcgccatctgcctctccgagttcgcgcagggtcaccgcgtccgcgtgctgccgcgctgcggccacggcttccacgcgcggtgcattgaccgatggctcgccgcgaggcagacctgcccgacgtgcaggcgggagccgtttgcggcggccgcggccgtgcagctgcaggtttaccctgacgccgccggcggccagcacgagacgccttagcaccaacgtgactcaactgtacagtaggctatcacagtagttgggaacacagtgaacatttttttgcttttcttttgtcatccgagatactgtggtcattatctctgttttttttttcttttctgttatgttcatgtcgaagtgacccggttccgatgaaatgaaggtgaaaaccacccgagtaaattttactg

SEQ ID NO: 11577 - DNA, 1133 bp, Oryza sativa
  ref <308>: DATABASE ACCESSION NUMBER: AK108925
  ref <309>: DATABASE ENTRY DATE: 2002-08-28
aagcgaaaaaccgagtttgtatactcgataaattaaggagatgcgtgctgtcgtggttctcctggtgctggcgctggctgccttcgcgcgtgcggacaccgaggcggtgagccaagctgtctccgcagccgacgctgacgagcaggctgtagccgacttcgccgtcgacatggacgtcgctgaggatgaggctgtggaagaggacgctgctgaggacgagtctgaggtggaggccgaggacgaggcggaggaggagtctgaggacgagtctgaggaggaggagttctctctgattgaggctgaggccgaggcggaggccgatgaggagcgcaaaggcgcgaagaagccgctgaagaagcgcgttaaggtggtgcgcgccccgaagccgctcaaggcgaagccgttcaaattccacccggagcgtgtgcgcgctgacacctcgaaaccgacggacccggcgctggagaagctggaccttgcgctggctgcggtgaaggaagacattctgtcgaccaacaaacagatcacggacgagcgcaagtgggtcattgcggtcgccaaaatcattgccgcgtacaacgacaagatgaagcgcgttgaggcgcacatcatcgctctgcgcaaagagatgaagtcgctgtatcgcaagaagaagcagatcgagaacctgaaactgcagaaggcgttggaggccaaactgaaggaggccaaggccgagcaccagactctgctcgactccctgaagcacgttaaggtgaagtccacggaactcaataactccggcctggcgctgcgcaacaccatcgccggcatcacggcgcagctgcgcaaactgcgcggtcagaccgtgcgtaagccgcgcgctgccgtgcgcggcggcaagaagtgcggtaagggcaagcgctactcgcgtcgcgccaagaagtgcgtggcccgcaagtcgcgccgcgccgccaagaaggttgccgctaagaagttctaagcgcgtctctgctgccggcactgctgccgacgcatcgcgttagcgaactctttttcggatgtcttctgccattcacttcccccaaattgtcgtttggtcggttgttcggaggaatgacggcggttgcagggctgcctgcgccgctctttcg

SEQ ID NO: 11578 - DNA, 1126 bp, Oryza sativa
  ref <308>: DATABASE ACCESSION NUMBER: AK108926
  ref <309>: DATABASE ENTRY DATE: 2002-08-28
attgacgtcctgccagctgtacaccgctcctttgcttgcactctctgacatagctttctgatccggtgcgcgcgcgagaatggtctcgttccagtgcgagggctgtggggatgtcctcaccaagaagaagttggacggccatcgcaaccagtgccattcgtccttcagctgcctcgactgcatgaccaacttccaaggaaccacctataaagcacacacctcctgtatcagcgaggaccaaaagtaccagggaaaactctacaaggagaagaagcccaagggccaacaccagaagaaagacagcgcatcggcccacactgcctatgtcgaagacgctcacgatgcagacaacgccgttgccatcgtcaacgccccgcctcgcgcgcccactcctccgcccgccgcccactccctaggataccaccagcaagcagcgctcccgcctgtcaatgtcttcgacttcctcgacggatcagagacaccgacagtcccaagaacacatgctctcatcgacgaatcgcgcatgatcgaagacagcgcgccgccagcatacgttgagacgccaatgccctccatcaccgacgtcatgaagtttcaggtcgccgatgacgagggctttgcacaaaatggattctcctacgggaatgagcctgtccggccaaccagtgaacggtacgactcgtaccaaacccctgcacccaagcccaaacattccaggacaaagtctcgtgacacagacgtcgagacgaccacccagaagactgaccgtaagcgtaagcgcaactcccctgctgaactcgacatgtctcttgtccgtgctcagcaggagagggatgtcgctatggcggatgccccgcccatgcttcactccggcctcactggcggactcaacaggttgcttgcacgacctgagtttcccccttcccctgaggactctggtgattgggccaactcacctctcagccccatgaagcgcgcaaagcaaggcaactccaaagccctactccgcgcccagcgagaatgggagagtaacgacgtcaaggaccgcaaggccgccatcaaagaggagcgtcaagctcgagacctagccgagaaagagaaagagaaagaaaaggagaaggagaag

SEQ ID NO: 11579 - DNA, 2158 bp, Oryza sativa
  ref <308>: DATABASE ACCESSION NUMBER: AK108927
  ref <309>: DATABASE ENTRY DATE: 2002-08-28
actaattaatatttttaataatatacgaaatattttaggtcgtatataaagtagaagagctgcaaaatgtcgcactacaactttaaaaaagttacgaccgttccgacggccaaagagtttatcgacattatactgtcgaaaacccagcgaaaaacgccaaccgtcattcacaaacactacaagatcgctcgcattcgttcgttctacatgcgaaaggtcaagttcgcccagcagagttaccacgatcggctgacgctcattctagacgagtttccgaaactcgacgacgttcacccgttctatgccgatctaatgaacatcttgtacgataagaatcactacaaactcgctcttggacaaatcaacatggctagacatctcgtcgacaatgtgggaaaagagtactctcgtttgctgaagttcgccgactctctctacagatgcaaatgcctaaaaaaggccgcactcggaagaatgtgtacgataataaaacgccaagcgcaatcactcgaatacctcgagcagattcgtcagcacttggctcgcttgccgtcgatcgacccgaacacgcgcacactgctcatctgcggcttcccgaacgtcggcaagtcgtccttcctcaacaaggtcaccaacgccgacgtcgaggtccagccgtacgcgttcaccaccaagtcgttgtacgtcggacacaccgactacaagtacttgcgctggcaggttgttgacacgccgggtattcttgatcatgcgctcgaggagaggaataccattgagatgcaggctattactgccatggctcatttgagggcttccattctctatattatggatgtttctgagcagtgtggatattctcttgaggagcaggtgtcgcttttcaacaacatcaaagccctattcgccaacaagccgctcattctggtcgccaacaaagtcgacataaaaaagatccaagagttgccacaagagaaactaagatttttcgaacaattcaaagccgagaacatacccataatcgagatgagcacgctcaacgaagatggcgttatgacagtgcgtaatgaggcttgtgaacgccttttggcgcgtcgtgtcgagctcaagatcaagtcttccaagatgaacgatgttcttaaccgattgcacatggctgagccgaagaaacgagacaacattgaaagaccagcatttattccgcctcaagtgaaagcgaaacgagaagctcaagctaaacgattagaagcaggcgaaatggaggttgaagaagcggcggccaagacgttgaagaagaccgaacgcgatttggagctcgaactcggcgacgagtacattctcgacctgagaaaacactgggatctgaagaacgacgaggagaagtacgacgccattccggagatctggaacggacacaacgtcgccgatttcatcgatcctgaaatcatggagaaattggaagagctcgaaaaagaggaggagaaattaatggaagctggattttatgatggtggtaaggtcgaaaagttggacgatgagactaaggagttgaagaaacttgccaaaaagatccgcacgaaacgaaagttgggcatactcgagtcacgctacaacaagacgcaccgtcgcgcatcacacgtgccacgcaaggcgcaaaaagtgcctcgcagccgcctagagagcaccatggaagatctcggcttggacatgagtgacaaggacggcgcgcactacaacgcgagccgcgcccgcagcgagtcgcacaagccggtgaagcgcgctcgcacggactccgagggccgcgtgcgctcgagttcgcgagtgccgcgcgacaagtcgggcattcgcgacgaggccatggccagcaaggtcaagaccctcaagaagaaggccgagcgcaagcttctccacaaggagtcgcgtgtctccgaggccgatcgcaccatcatcgagaagaagcccaagcatttgttcagtggcaagagaggaatgggaaagaccgatcgacgataaacctaacaatatatccattgttatatccattgtcttctttttctatctatctcttcttttttgtttaatttgttctctctgttaatttttcatcatccatgtggtttttttttgtttgtttttgttttgaaaataaattatttcaaac

SEQ ID NO: 11580 - DNA, 1869 bp, Oryza sativa
  ref <308>: DATABASE ACCESSION NUMBER: AK108928
  ref <309>: DATABASE ENTRY DATE: 2002-08-28
cagcagcagggtctggcctggcagtagacctcactggcaagaaggcgttcattgctggcgttgcagacgatcagggttttggctgggccatcgccaaggctctggcagaggctggtgctgaaatctccctgggtgtctgggtgcctgcactgaacatctttgagaccagcttcaggcgcggcaagtttgatgcgtcgcggaagctgtcaaacggcagcctgctggacttcacccacatctaccccatggatgcagtgtttgacacaccagaggacgtccctgaggaggtgcgtgccaacaagcgctacgcaggtgccggccagttcaccgtgagtgaagtggctgagcgcgtcaaggcagacatcggcaacatcgatgtcgtggttcactccctggccaatggccccgaggtgaccaagccgctgctggagacctcccgcaagggctacctggccgccatgtcagccagcagctacagctttgtcagcatgatgcagcgctttggccccatcatgaaccccggcggcgcagcagtcagcctcacgtacatcgccagcgaggacgtcatcccaggctatggaggcggcatgagcagcgccaaggcgacgctggagtcagacacccgtgtgctggcatgggaggcaggccgcaagtaccaggtgcgtgtgaacaccatctctgctgggcctcttggcagtcgtgccgccaaggccatcggcttcattgacgacatgatccgctacagctacgcaaacgcaccagtgcagaaggagctggcagcacaggaagtgggcaacgttgctgccttcctgtgctcccccctggccagcgccatcaccggccacacctgctacgtggacaacggcctcaacatcatgggcctggtagtcgacagcaagactttggacagggaggcggcttgagtgggcagtacagctgcagtacacctgcagtacacctgcagtacacctgcagtacagctagcttcatagacttgggaagttcatggtagatgccgcgtttctgggtgtttggggtattgggaagcctttttgatgccagctgcggttggggttaaatgtggtttgaccgcagtgtggcctcacagggcggttgttgtgcctgtgcttctctacaggcgggttggtggtgcagtgtggtggcgcatgcatgggcgcatgacatgtgctgccaaagcatgcatatgccgcaaacatgcatgcggtacacacatgcacatactatgaaggcttgctgttgcgtcagttttcttgccgctgccttgtcagcaccgcttgctctggatgtgcacttaccaatggccttgctgctgcgtatatgttgcattggtgagcggcatcaaaggccggctgctgctgccggaccagcagcctgctgagcaggcctctggtcagcgtgagcaatatggtttgtgtgtggtgcctagcatcaacaagtatgagcagtgtagcggtgcaagcgccctgtgccaagcagtagccgatcgctgtgaatgccaacaggcatcactgcgggcgacaaaccaggggcagtgccagcactgtgtttcaaacatcgctgtgtggttgtcactgttgtacagccgctgtccactgctgtaccgcttgttctgataacacaggtcagctcagccacaagcagtgcattgcaatttgcatgtgcctatttctctttcacacgtgttatgcacaattgatgcatgtttcggtgggacagggattggcctcaagtgacaggcttgcattgcgtgatgcccattgtttgatgggtgcatgcatgataatgggtgcagatttccaccaccagagtttctgtaagtaagtggcccttttaaaaaggtgcaaagat

SEQ ID NO: 11581 - DNA, 1451 bp, Oryza sativa
  ref <308>: DATABASE ACCESSION NUMBER: AK108929
  ref <309>: DATABASE ENTRY DATE: 2002-08-28
aacgaacgctaaaaaagtaacagtttctgtactttattgagagagtagtgtgtgtttgtgctcctttgacgaccacatgtctggaggcttcgccgagggtcattctacggcagcagctaacagcttggcgagccacgaggcactcctgaaaagccgatggttctttgattggtacctgtcgaacccggtacggtcgaagctgcacgcgatggcggcaaagaagctgcgcgacaacttccatctgctagtttgggaagccgacatggactcaacaacagggacgtacctgactgcgccgggcgttatggacaacatcaacctccccccgagcaccaaatacgaagaagtgctcgatcgcatcttgatcgccttcggcgccgccgcgtcccagatcgagctcgcagtctcccctctgcagcttgaaggctgcaaggacgacaaggagcgcctcacgcaggccctggagcgccagctgcggctcagccccatgtggagcgtaacgctcgacttctatcgtggcacgcagctgtcgccgcccgtcagcattcggaacaaccggcagtactttgtcgatggcatcgtggtccttttagagaaggccaccaccgacatccgcggcattctcctcgacgaaaccgtgctcaacgtgctcttcccccaaacggtaagcagcgccacgagtgggcaggtggtgacgtaccccgtcatgcttccgcatgaacagtacctgataaagaaggacttccgcgcctgccagatgatcctgcgagtgatgagggcggttccattggcgttcggcctgcttcccatcgatgcaacacaagacgaggacgatgactcggccctggtgcgctcgcctgatcgaatggaattcggacgggcggataccgccgaaatgaccgaggctgaagactggatcgcgtaccactggacgcgcgaggtgaggccgaccctcctccgcatggtggcttttctcgctgcggtcgacttccggcaagtggcgctcgccttcgtggtctccttctgcaaggcacacggcaactcctcgcagatctcgagcgacatccgcacctacatcgagccgtacttcagccaagccgatgcggcgaaaatcgatcgcactttgccaacctggtgagaactcgttccacccaaagcgcgttgtgcgaaaagctctcgagacggaagtgtttaaggttatcgtggtgtgcgccgtctgtggcaggggtgctgctgcttacttcctgcagcgttgcttcgcccccatccctcggatgcagcgccctccaccagcctatccttccatatcccgtcccgcgctctctgtcctctctctctcgctcttcttcctcttggcagattactactccgtgacgtggtcgtcggtggatgggaaaaacacttcagagctccaatccagacaactcgcctgcaatcacgttcgcacactc

SEQ ID NO: 11582 - DNA, 955 bp, Oryza sativa
  ref <308>: DATABASE ACCESSION NUMBER: AK108930
  ref <309>: DATABASE ENTRY DATE: 2002-08-28
atgatcacttgcatttcatcttttcatgaacgtttttttgtgcatgttgtttactgcatttttcagtttcagctgtgtagtagcacactctgtttgcttcatcgtttgtgttcgagatggatcgagacgagagcttgggcacgcagccattgaccgggaggcgggtgcgcgcggacacaaggcacccggtgtaccgcggcatccggctccgcagcggcaagtgggtctcggagatccgcgagccgggcaagtccagcaggatctggctcggcacgtacccgacgcccgagatggccgccgcggcgtacgacgccgcggcattggcgctgcgcggcgccgacgccgcgctcaacttccccggcacggccacgtcgcgcccggcgccagcctccggctcccccgacgacatccgcgcagcggccgcggccgccgccgcgatgatcggctccggtcaccgtggcaaccagcgcgccgccgacgcgagcacgtctcgcgcggcgacggcggcgccggaggccgccgtcgccgctggggcgggcgatcagaagcgcgtcgtggacgaggacgacgtcttcgagatgccgcggctgctggtgagcatggccgagggcttgatgatgagcccgccgaggctgagcccctcgacggacggcgtcggcggcgtgtcgccggaggacgacgaggacgaggacggcatgagcctgtggaaccattcctgaaatgggcttacgggtgcatagcatttgcaggaggacaccatgtattttccatgtgttcgtatgaattctgtgcctacgtacagtacgtactcggcacgtatgcgagataggaacagagcagagcaggatactgaattttatcgtagttgtcctgttacgtgtatacggtatatatggtcactccactgatgtataagccatccgtagacgaattatggctgaaaacgatgcccctg

SEQ ID NO: 11583 - DNA, 917 bp, Oryza sativa
  ref <308>: DATABASE ACCESSION NUMBER: AK108931
  ref <309>: DATABASE ENTRY DATE: 2002-08-28
atcaaggaggagacgaaggcagcagcagcagcgagctcaggtcagacgacggcggcggcggcgacgagcaagagcaacagcaccaccgtgggcgacatggcggacacgacgttcaagagcatcggcgacgtgctgaagctgctgccgacggcgacggtgatcgtgtacgaggtgctgaccccgatcgtcaccaacaccggcgactgccacgtggcgaacaaggtcgtcacgccggtgatcctggtgctctgcgccttcttctgcgcgttctcgcagttcacggacagctacgtcggcgccgacggcaaggtgaggtacgggctggtgacggcgagggggctgctgccgttcagcggcggcggcggcgccgacggcggggacgccgccggcagggacttctccaagtacaggctgcggttcggcgacttcgtccacgccttcttctccgtggcggtgttcgccgcggtggcgctgctcgccgacgccaacacggtgtcgtgcttctacccgtcgctcaaggaccagcagaagaaggtggtcatggcgctccccgtcgtcgtcggcgcgctcgccagcgtcgtcttcgtcgtgttcccgtccacccgccacgggatcggctacccgccggcgaagcccgccacggcgtcgctggcgtcgctgtaggcggcgagcccgattagtcgatttgcattgccatgcaggcatgtgcttcctttttatgggttgtgtttttttaaatatttgcacgtgtgcatatgtgttctgtctgatgcttttgttcgcatttgttcatctgtctgtttgtgacctaataaggccaagagctagtttgatctcgttgatttgcctcatctttgtgcagtttatgacttgttatattccatcgcaatggatgaatccgtggggaactatatgat

SEQ ID NO: 11584 - DNA, 1066 bp, Oryza sativa
  ref <308>: DATABASE ACCESSION NUMBER: AK108932
  ref <309>: DATABASE ENTRY DATE: 2002-08-28
tacatatcgctgggcgggccgagcagcaccgccggcttctccacgacgccgctgctgacggcgtcgaacgacccgacatactacatcgtgatgctcgccggcatcagcgtcggcgggcagccgctgagcatcgacgcgtccgtgttcgcgtcgggcgcggtggtcgacacgggcacggtggtcacgcggctgccgcccacggcgtactcggcgctgcggtccgcgttccgcgccgccatggccccctacggctacccgtcggcgccggcgacggggatcctggacacctgctacgacttcacccggtacggcaccgtgacgctgccgacgatctcgatcgcgttcggcggcggcgcggccatggacctcggcacgtcggggatcctcaccagcgggtgcctggcgttcgcgcccaccggcggcgacagccaggcgtccatcctcgggaacgtgcagcagcgctcgttcgaggtgcgcttcgacggcagcaccgtcggcttcatgcccgcctcctgctgatcgatccatcctaacaactcacccacgacagtattcttctttagtacgtacatggcgtataggtgtatagatatacgcgtacaatgtacgtacgtacacgaggatgataggcgcatatacataacataacactagtagtaggagagtacatagtacacaaatacacaaaggttgtaaggcatagtactttcgttagtggatatacgatttttgagagtaataataataaattagttaaacgggctaaccatgtgcacgtgttaggcgcttgacacgcttggtttgatttggtgcgtcgtggtcagtggcacggtgctcaactgatgtgctacgactaaaagtctaaaactagtggacagttagggggacgtgtgggactgtggggccacctcgttctgttgtgcattgtggctgctgtggcccaaggcccagagagaaaacgttatctttttttttaatctcgtagataatgctggatctgtattgttgatggttgttagccgaacattcacctgatatttgtgtgaaagtcaagggccatagagtt

SEQ ID NO: 11585 - DNA, 1520 bp, Oryza sativa
  ref <308>: DATABASE ACCESSION NUMBER: AK108933
  ref <309>: DATABASE ENTRY DATE: 2002-08-28
gagctggaatgataacaacaacaacaaccacaaccagcagcagcagcagcaacatgctcacggccaccaccagcatcatcaggtcgccgccggttgtggaggcggcggcggcggcggcgacggcaatagccatgagcttctgcagcagcagtcaatgattccgggcacgcttgccgatggcggcggcggaggcggcgcggtggggccggcgaagccgatgtcgatgtcggagagggcgcggctggcgaggatcccgctgccggagccggggctcaagtgcccgcgctgcgactccaccaacaccaagttctgctacttcaacaactactccctctcccagccccgccacttctgccgcgcctgccgccgctactggacccgcggcggcgcgctccgcaacgtccccgtcggcggcggctaccgccgccacgccaagcgcgccaagcccaagccggcgtccgcggcgggctccgcctcagccgccaccaccaccgccggctcgacgccagcggggtcgacgacgacgacgacgacgtcctccacctgcgccacgcccaacgcgcccgccctcccggcgatgctgggcggcaacctctccatcctgccgccgctgctccgcctcgccgacttcgacgccatgagcctcggctccaccttctctggcatggcggcggccgccggcaagccaccgcccgtcgacgcggccggctgctactccgtcggcgccgccaccggcctcgagcaatggagactacagcagatgcagagcttcccgttcttccacgccatggatcaccaggcggcgatggcggcgccaccgccggcaatggcaatgccggggatgttccagctaggcctagacggcgacggccatggcagcggcggcggcgaagacggtggagagctccaccatgcgatgccatcatcgaagagagaaggctacccaaggggcatgtatggcgatcatcacctcgctggaggatacacctcctactccagtgcaaccacaggtaaccatctcttgtaatgatcgagagctagcctataactaatcgcaatctagctagctaatggcagagatctgcaaatataatgcagactctctacgattagctagctagatatatattcataatagggcgtgtgatcgatcatatcgatggtgatggtgatggtggtgtgagatatagaaccaaattaagtttaaggatggttgatctcgatcgatcgagatcgagatcgaggcatttgcattttttgcacttgcaattaggtgatgtgtcccaatgaagactggaggagtgtgtgtttaattttgatcatgcaaaagtagtactagtattttctagctagtttagctttgcatgcatgatctaatctcacttgatgtgtttcttcttcttcttcttttcttttaaatgttagggttttttttttctctctcgtgcatttggggccacgtacgttatgtgtaccactactgttgttcattttgttaatggaaactcctattatatgtc

SEQ ID NO: 11586 - DNA, 2414 bp, Oryza sativa
  ref <308>: DATABASE ACCESSION NUMBER: AK108934
  ref <309>: DATABASE ENTRY DATE: 2002-08-28
aagcgaaaaaccgagtttgtatactcgataaattaagatgagcggactgccggagggctggacggcgcacaccaacgccgccgacggcacttcctattactaccacgcagccaccggcacgagtcagtatcagatgcccaccgccgaccagcagccgccgtcggcgcatatggccgtatccggatccaattcgcctactgctgccgccgcatccggtgcctccggtgcagcgcttggggactcgttcgtcgtcgtacctccgccgtcgccgcctatccccgccgctgttgagccgctgccagtgccggtgccggtgcccgttccggtgccggtgtcgggcggtccgccaccgccgccgccgcacacagacggcgttgtcgccgctgcggagatcacgctcgtcgctggcgccgatctgctgccgcagcccatcggcgcgcccactccgccgcaggccccggcgccggcgccggccgcagcaataccggccgtcgagctgcagcccatcagcaaaccgccaccgccgcccgtagcggccacaggcggtgcaccgccgccgtcgccgttcgcagtggctgcaaagcctgtgccggctgtggctgtggctgtggcgccggcatcgccgggtctggcgccggtgccggacacactctatttcaatgtcgagacacagaacacggccgataagagcattcataagggcgtgctgacggtgacgagtgtgcgcgaagggctggtgtcgggcacactgcgttgggcgcatttgggcggacgcgtgacgcgcatcagcggtatgctgacggccaaagactggctttggaaggagtaccaaaaggagttggacccggcgctggagacgtaccagtacctgtgcgagaacaagagcggcgccgtcacgctcgccggcctgcacaggggcaagttctttatgggaatgtatgcgcgtgaagacgccaacggagtggccgggccgtcgctcggtgcagtcatcctcagcccaggcaaagcgccactcagcgtcgagacgagcccgcgcaccggccccggtaccggcccgcagacaccggtcagtccgatcagccaaacgcgcccgccggcgggcactatcgcgggcacagcgccgctgttggcgctcggagacagcgccgtatccggcgattacaagtcgcagccgatgatggcgtcactggcgcccacgagcccgctcgccagtgccgccgccggatcgggcggttcgatgacgtccaaagcggacgccgcactgctgccggcagcgggtagccgcacgctcgtgtcgccgtcagccgtgttcctcgtactggagacaaagaacaaacacacggctatggtgttccgcggccgtctgttcgtcaactccgtcgatagggagacaggccgtgtgtcgggctgtctggtgcgtccgccgtatcagttggaggcgtgcagtgtgacgggtacggcgctggcgactgagtttcagttcacggaatggcagaaacagacgctggtgaacggcatcgattacgagtaccgttgcgacaccgtgggaggcgccatcacgatggaggccatcggcgcgccgggcttccgcatcagcggtcagtaccgaccggtcggcaccaatgagtggagcggtgacgtcacgcttacgctcgcggatgagcacgcgcgtgcagagctcgcagcggagcgctctctcgcgggtaagacaccgcacgagcagatgacggaggaggcggagaagtatccgcgcgacaaacacacagacatcagctacttctactgcgagaagtgcaaccacttcgtgtcgaaagcggacaacgcgaagcagctcgcggcgggggtcaaagagtgttggcaccacccgtacccgctgtccagccgcctgcgcgacccgatcacgggcgaaccgctgttcgcgtgctgtcgccgccccaacgacgcacggtggcgcaaaatgggttggggcggcaacggctgcagcgtgtcggtgcacgacaccggcgcgtgctgcacgctcatgtaaccgcatcacccgtcgcactcacacccgtgccgctccgctcccctgtgccgcgccgctaccgccttccgttggcggtatctgttcccaccgtgttgtttcggtcccgcaaccccgcgcggcgctgtatgtgcgttcttaagttcactcccaatctctttgccctgcgcatgtgtctgcgactcttaaccccgccgttgcgtttgtcgtctgacgcacacactgtctcgcgcgttcacctctgatgttctgttcgtccgctccgttccgctctgtaccctgtcactgtgcgtgtgaccgcgcgacgtctccactcccaattgaacactgctctgcctgttttgctgctgttgtctgcgccgtgtgaacgcctgaaaatgaccggagttgc

SEQ ID NO: 11587 - DNA, 1307 bp, Oryza sativa
  ref <308>: DATABASE ACCESSION NUMBER: AK108935
  ref <309>: DATABASE ENTRY DATE: 2002-08-28
ctgcacgcagttggcttacacgctcatgcatacaccccgttggccgtcgaactctgccgtcacggctatgatgtatacgctttaaatctgcctggtcatgggccggcagcagatacgcccttggccaagtatgaggtgcctgtcattgtggagtacctagtgagggctgtggatgttgccggactgcgtggctgcctatgcctgggccattctgctggaggtgcatttgcaatcattgccagcacaaggtctccggggttgttttcagccatctgcagctttgaggctgtggtcagcagctcagacacacacgcctttatgaaagaagccagggacagtggcagaatagcaacagccggccaggccctggctgcacaggcacgcaagcgccgttcacagttcagcagtgcagcagctgctctggcgcacctgagccagaagccgccagtggctggcatgcacccacaggcagcccacctgtatgtactgcacggcgtgcggcctgtgcagcagcagcagcctcagcaggcatcatgggagcagcagcaccagccaggccttgaccagcagccagtgcagctggtgtgcagcccactggttgaagctgcctattatgaagcattggacccaccaccggcagtgccactgccagggcctggctgccctctgctgctgatggtggcaggcagccccagcacacaaggacaattcagcacgcacgccgcggtcaaggcatggctgctgcaggccagtcataagcagcaggcatcaagtggcttgcctcctggctccttgccacctgggaaaggggctgcaggcggcagcactgctgctcctggcagcagcagcagcagcagcagcagtggcaacctgtcgaaggaaggtgctggtctgcatgctgtgctgcaggtgctcaatgcagaattggctgcagcactgccactgtcacagcttgaagaggtgtctggtgtatcgcattttgggcccttggagaggccagagttgatcgcagacatcgcagcctcattttgtcagcagcagcagcagcagcagcagcagcagcagcagcgacaactaggtgccgcagcattggccagcagcagcaaaacgcagagcgacttttgtgttgaaggccatcagggagtatcgtcgaagctgtaggtggcatttgtgatactggctggtcaatgcttgctgactttggtggcctcagctcaacacgcattggcacgtttctccttttttgatacgagatcgtagtcaattcatcaattaggtttatgccaggagtagggcgatgcactgtg

SEQ ID NO: 11588 - DNA, 1020 bp, Oryza sativa
  ref <308>: DATABASE ACCESSION NUMBER: AK108936
  ref <309>: DATABASE ENTRY DATE: 2002-08-28
agcaaccacttcccactcaccacgcatgcagccgccgccaagaacccgcgatccggccatcgccatcgccggcgacggcgcggcgcggcgaggtcccccgccgatgcagccgcccgggccgccgccggtaaggcatggtccgccgccggtgcggcagcagcacggctactactacgaggaggagcagaggccgctgcacctgcacgtgaggacggcgaggtcgtcgtcgtcggcgctggcgtcgtgcctcgtggcggcggcgttcctggcgctggcggtgggcggggcgggggcggcgctgttcgtgctgttccggccgcgcccgcccgacatcgcggtggcggcggtgcggctgccggcgttcgcgtccggcccgaacggcacggtggcgttcacgttcgagcagacggccgccgtgcgcaaccccaaccgcgcgccgctcgcgcacttcgacagctcgctccgcgtcgcctacgccggcggcgagctcggctccgtctacatccccgccggcctcatcgacggtggccgcaccaaggacatgtccgccagcttcgccgtcccggcgttcgccgcggccaccccgccgtcgctgcctcaggagcagatggccgccgccgccgccgcctcggcgcagcagcagcagccggcggcggcggcggcggtgatggaggtcgactcgctgctggtggtcaaggggagggtgaccgtgctgcgtgtgctgacgcaccacgtcgaggcggccaaggtgtgccgcgtcggcgtctcgccggtggacggcaaggtgctcggcttccggtgctgaacaccactatggatttggatttggatgaaatccaaattaagccgaaattttgcgggaaagaatgtaatttaatttaaattctgcagaaaccaagcattcccgttaagtttctgagctccaaactggtggtgtaatggtagatgatgatatactatgtaatatgttccattcttaagacacggtgaaataccagagtatcagtagcattttagctc

SEQ ID NO: 11589 - DNA, 967 bp, Oryza sativa
  ref <308>: DATABASE ACCESSION NUMBER: AK108937
  ref <309>: DATABASE ENTRY DATE: 2002-08-28
ttttggtaagcagaactggcgatgagggatgaacctaacgttgagttaaggcgctcaaatgtacgctcatcagataccataaaaggtgttgattcataaagacagcaggacggtggccatggaagtcggaatccgctaaggagtgtgtaacaactcacctgccgaatgaattagccctgaaaattgatggcgctgaagcgtactgccgatactcaaccattagtgcaaatcgtatgaggcactaatgagtaagactcctccctcgtcacgcaatccccaaatccactcctccctgccggctctcccctcctcccttcgctgacgccgactcccctcctccctccgccggcgccggctctcctctcctccgggcggtggctcccctcctccctccgccagcgccagtgccggctctcctctcctccgggcgtcgtcctcgaagaagcgacggcagcgtcctctgagccgtgcggtggcgtcgtcctcggggccgagctacgacggcgccctcgaagacggcggtggcggcgcggatctggagcgcggaggacggtgcaagcgcgggacggcggcggcggcgcggatctgggctcctcctctctcggccggcgacgaggagacgaagccgctcgtggtcgttgtcctcctcgctttgtctccactttccgccgccggcggcgaggagagaaggacggcggcggcgccctcggcgacggtcctcggcgacgtctcatctcctcgcaaagtgggccccgcgcctgactttttaagcgaggttgctcgttcctctcctgggatgcgaagaacccagtgtagctatgggccctaccaacttttttcgccacatagactaggtaacacaccacgtaggactaggtaactcccactgtgaaaggcctaagcactacaacattttgacatggactccaccgtttctacataaataaacattcccaatactgaatgc

SEQ ID NO: 11590 - DNA, 905 bp, Oryza sativa
  ref <308>: DATABASE ACCESSION NUMBER: AK108938
  ref <309>: DATABASE ENTRY DATE: 2002-08-28
attcctccccctccgacgactccgatccgtagagatggaccggttccgaccgctcaggcggatccaggtggaccccgagcccgccgccgccgccccgcccccgccggcggcggccgcggcgaacggcggcgcgggggaggacgtgtcggcggcccccgcggcggggctcctcatggcgtcaagggtgcggcgccgctcggcggtgtaccgcgactgcaagggcgactacatcggcgtccccaacgacccgtgcctcaccaagatcctctccaagcaaggggacaacaaagttctgtttgcagataaggtattgaagttcactcaatcaggaaagatgaaaaggcgcatccttgtgatcacagattttgctctctaccttgttgatcctgatgctgatatattgaagaggaggatagcgctcgcggctgtcgataagctatgtataagcaagctcagtgataacttctttgcaatcatcgtgccaactgagtatgattgtttaatggccaccactagaaagaaggaaatagtggatattataattaaggctattaagagcaattctgaatatcagcctcaagtggcttcttctaacaggtctgaataccatgctgctgctgaagtgattaaagaagttgagtttgaggaagctgaaggaggcgttaaaactaggatcacgcacaaggcgaaggcgaagtcatgattgagaaattatgtatgattgttccctgtaaaatgtatagttcttcgagtttcaagggattcttatcagcgctctttatgcaaagttcaaacagacaattctttgatgtattgtgccttctattttctctgatgtttctctgggaaaaaaaaggtgacctgtcgctgactatatacactatcgctagatttttctttttatc

SEQ ID NO: 11591 - DNA, 1965 bp, Oryza sativa
  ref <308>: DATABASE ACCESSION NUMBER: AK108939
  ref <309>: DATABASE ENTRY DATE: 2002-08-28
aattaagacgaggtgacgaggtgtaattaagatgaagattacaagcacggcgatgctggcgccggtgtacggcacgccgcacccgctcgccggcgcggaggtccagctcaccgtgttcgaccgggcggcgttcgacctgtacgtacccagcgtgctcgcgtaccgggcgccggcgccgtcgaacgaggcgatcaaggagggcctcctcagggccgtcgcggcgtaccctcacctcgccggccgcctcgccgtcgaccaccacggccgccgcttcctccacgtgaacgaccagggcgtgctcgtcgtcgaggccaccgtcgacggcgccgacctagacgacgtgctcgccaacagcggccgcgccatggccaccgacgtcgccgacctctaccccgcgttgccggaggacaacgtcggcgccgcgctgctgcaggtgaagctcgtccggtacaggtgcggcggcctcgtcgtcggcagcatctgccaccaccacaccgccgacggccactccatgagcgccttcttcaccgcgtgggcgaccgcggtgcgcgagggggagggcttcaccgcgccgacgcctttcctcgaccgcgccgccacggccgtgccccgcaccccgccggtgccggcgttcgaccaccgttccatcgagttcgacggaggagaagccgccgccgccggtggcggcaggtcgtcctacgccgccgtgtccctggacaagatcaaggacctgaccgtgcacttcacggcggagttcgtcggcgagctcaaggcccgcgccggcggccggtgcagcacgttccagtgcctgctcgcgcacgtgtggaagaagatcacggcggcgagggacctgagcccggaggagttcacgcaggtgagggtggcggtgaactgccggggcagagccaacccgcccgtgcccatggacttcttcggcaacatggtgctctgggcgttcccgaggatgcgggcgcgcgagctcctccgcgccacctacggcgccgtcgtgggcgccatccgcgacgccgtggcgagggtcgacggcgagtacatccagtcgttcgtcgacttcggcggcgcggcggcggcgggcggcggcggcggcggggatctcgtggcgacggcggcggcggcgggcacgatgttgtgcccagacctggaggtggatagctggctcgggttcaggttccaccagatggacctcggcaccggctcgccggcggcgttcctgccgccggacctgcccgtggaggggctgatggtgttcgtcccgtcgcgcgcggcgaagggcggcgtcgacgtgttcatggccgtggcggagcaccacgtcgaggcgttcgagcgcatcatctactccttggaggaaggacatgggcatcatgtcggcccgtgtcacctctagacaacgatgcataatgcattagatcactctaaactctactacctctgccccaatttaagtgtagtcgtggtttttcgtgttcaagtttgatcgcccatcttattaaaaaaatagtttcacataaagtaatattcatgttttatcatataataacaataaaaatactaatcataaaagtttttacaaataagacagatggtaaatgttgaacacaaccaatgcaaaactgcagtcttctgggatggaagtagtataaaactatggcgtgcgggtggcaaactgatgtgattagccacttgtctttccacgatgctgttttctcgagcttgtgttgatgttaagcgtgattagccacagtctaatgtgcaaatttgttctgtaaatatatataagattgatggcttgatggggagaacagcaagtttatgtacagtggagtatgtaagagatataaaacgaatatcttgtattttgtgctggatgattatgactgttcagcattgcttatgacaaacgcattacccaaagaattaaagtatagaggcgttttgaagtgtttgaac

SEQ ID NO: 11592 - DNA, 1584 bp, Oryza sativa
  ref <308>: DATABASE ACCESSION NUMBER: AK108940
  ref <309>: DATABASE ENTRY DATE: 2002-08-28
tattctcctcacctttctatctcgtcgaaattcccgttacgagtccattctttatctaccgatttcctccgataaacaccgtagccatgttcaagcgctcgtttaggtcgcaagaccccggccgtgtcgacaaggctgcgagactgaagagatcgggcgctcaccgggaacaaacgaagatgtcgaagttgcaaagatcgctcaatgagcaggacactattccgcaaaagtccgcacctaccgccgcgcctgcaccctcgcctatcgtcaccctgacggttggtcgagatggccggctctttgcagcacacgaggaagtgctccgccagtcgcccttcttcgaagcggcccttcgcggaaaccacttcgaggcacagagcaaaagaatctcccttcccgacgaagaacccgaggtgttctccgccgtcctcgaatatctctacaagggtgattactacccacgtctgcttcacaataagcagcgcaactcttgggagctagaggaccaggcacgtacacctcacacctcacctaaccccgaaaccggaggtggccgcgcaggcgacacgtctgaagccaccatttatctgtcgagtctcgacatggccatcctccgcgacacggtcgtctactgtgccgcggaccgatacggccttgaggagctaaagcgtctggccctgcgcaagcagggactgcaatccggcatcgatgtcgggaccattatcaggtcagctcagtacgcctacgcccacacacccgactcagacagccgtctgcgcgctcactacctcgccctgattatccgctgtcgcaagaccttcaagcgcagcgggaccatgcaatccgagatggaagcgggcggcagcaagctattcttcgacctgtttgtggccatgtgtaatcaccttgacgacgtcattgacgtgagcaacgctcgcacgcccaagactgtctgaggtgattcaagacaagccgaacacacacatgtataacccctcaaacaggcctccagatgcctcgtgtgtttgatcatcgctggaggacataacaaacagaataccgccaaagccgcgaaagtacagaaaaccacaaaaaaaaagtgatgcttgggaaaagttggaattcggcgttcggtgcttttcatgctccatcatcagattgacgtcctaaggagctttgttttattacatgactcccccttctgcgaggttggccgaccgaattttgatgatacacgagctgagaggatctaatccgacgccatacgaagtccctcacatcctctgctcacttattgtgcgatttcgtctatcgcgagtttcttgttttgttttgtcattttacaactctgctttgatacccaactcacacacacccaggtactgggacatttcctttcctctacacactctactctggcgttttgttatccactagaaaaagacccggctgtctttggtttcaacaccagagttttggaatggggggagatctgggaaggattggaacgcttgactgctgtttctatacccgcgagcaaatgtcaccgaaattggcacaaagcttgcatttgcaccatcacgg

SEQ ID NO: 11593 - DNA, 1052 bp, Oryza sativa
  ref <308>: DATABASE ACCESSION NUMBER: AK108941
  ref <309>: DATABASE ENTRY DATE: 2002-08-28
cttgtcccgtccgttcggtcgccgcgtcgaggaggcagggagctcgcggcctcgcaccaccgccgccaccccgccatgacgagcgcctccgagctcttcaccgcccgccgcgcccgcgccgcccgcctctccgaccccgatccggacccggatccgcctgcggacgcgctccatgacccgcacggcctcgccgatcgccgcggccggcgccggggctgccgcccgcgccgccagctcgacgccgccggggacgtccgccagcacctgcacaccggggccccgccctcccgccgccgcgcttcgtacaccgatcgtgtcttatcatacatagacaatagcaacattggggactctgcaactaggaggaaccgactggataggctgatgttcagaacaaatgagcggcttcctggtgctgtactgcaagcacaagcacgtgttctagagagactgagaggcatttctattggttcatctgtgtcaaggccatctatcacattggatgaattttcagctactgatgtgtttagaatcattgacttcgggaacagggatgctccatatgaagcaaataggtccagctcatcattggcccatccaagtagcgagtcagatgaagaaaggtcacccattgacaccagttccttaaaaagatcacgtgggctgagcaaggcggccttccttcggctacagatagagatttttgaggcaagcaaagatgacaacagggaggcatcaccagaatgctcgatttgccttgatggattctatgacggagatgagctcataaagctacgttgtgggcacaggtttcactcgaattgcctggagccatgggtacggaaatgtgctgattgcccatattgtcgaacaaacatacagtcacgatcctgactaccttagttctgcattggcagtttggcactctcattagaactgtaattaacagtaagatgtattgttgtaattcagtgttatgtgcatgcctgttacccggagttggtatgacatcactctattgaatttcattgttgccactggagttgtgctgc

SEQ ID NO: 11594 - DNA, 1006 bp, Oryza sativa
  ref <308>: DATABASE ACCESSION NUMBER: AK108942
  ref <309>: DATABASE ENTRY DATE: 2002-08-28
cagatagataaaaataaaaacaaataaaatcatgctactacgagtaagctgtgtggcaatcttgattgccgtggcgtgtttccaattcagctcggctgagactaaattgatggacaagctcaaggaaaatgccgagatgactcaaaccgaaacaacggacttgaaggagcgaaacaaacgagccttgtactaccaaaacgacttgatctcgaacaaagaacgacaaatccgcaaggcattcccactaggaccaatcggcggcatcggactcggcggaatcggtggcatcggcggaatcggcggaatcggatacggcctatacgactacgcgtacggtctaccattctatgactacttggcctatgactactacccactctacggtggcgtgtacgactacggtctatacggaggtggtatcaccgatagcttgccagcgagagcggcggccgcgccagccattgccagctcgaacgccaaggccgtgcaaactgttgtcaacccggctcttcaggccgctgttgaatacgacgatgacgacgatttgaccatgttgaatgctcgttatgccgccgctcacaatgctgcccccatccagcaacacggcgctcgacctctcgccgctcaaatccagccgtcgcaatggagcggctatgctcagcagcaacaattcgccatcccacagcaatacggtcagcagcagttcgctcatcagcaagctattgctccacaggccatcattgccaacccgcaggctcagcaatatgctcccagtcaacgaagtgccctaaatgctattagagccgcttcgtccaggagcgccaagaagaattaattccgcgcggtttcgcttctttcttgttttaatttattatcgctttttttgttttattttatattctagtcaaatatagaagtgtttgttttttgttccttgttaaattactatttttttagtttttatccgaaattatatatggtttaataaaaaaattattaaaaaaac

SEQ ID NO: 11595 - DNA, 868 bp, Oryza sativa
  ref <308>: DATABASE ACCESSION NUMBER: AK108943
  ref <309>: DATABASE ENTRY DATE: 2002-08-28
agtttatcttttatgcttcagttgactcaatttgaagaatcaaaagaatgccaaacgttgaagaaaaccaaaatgaagaaggatgctgccgaccagggtccaaggtggtgatgctggtctttttatttgtggcggtgcacctggtgctgatctccgtgatcctgggaccgctgagcgtgatttccaagcaagttgccaacgagtgcttcccctcgtcgagcaacaactggatctgcgatgaagtgtgggaccggggcgccgacctggagctgcccgccatcatctgcggctccatcggcggcgccttcctgctggtggccatgtcgatctactttgcccgccgcaactgcggagccagcccgcccgtgagctccattgtgtgggcccgcgactgctgcaacaaccgctgcaacctgaccgatgtcaaccgcgtgggctggttcttcgccttcagcgcctacgtgctggtcatcaccggcatcgtcatcgtctgctacgccgcttccctgggcagctccttcgcctggtggggcgccagtgaagacgcctgggccctggctgagttcatcgacaacctcaccttcagcggcatctgcatcttcttccccatcggcttcggcttcctcttcatcagcttcatcctcttcggcactgagcacgcttaccgcaaggctgcccccgctgaggctctgcctgagtaccagctggtggctcgtgaagaactcgtggtcgagaagttgtaaagcctccttttactccatctccaattccagctccatctccaacccactctttcttttttcctctcttttttccgattttgttcttgaaaatcaataaagaagaaaaagaaatagtatcttaaatt

SEQ ID NO: 11596 - DNA, 1112 bp, Oryza sativa
  ref <308>: DATABASE ACCESSION NUMBER: AK108944
  ref <309>: DATABASE ENTRY DATE: 2002-08-28
ctcactagctaagctcgggaatcctaagtaagtgaaagcttagctagcttcgcataaatccagctctctcttgctaatggcgggcgtcgaggtctccaagccgtcgaggcgcctgtcgccgaaggggagcttcaagctgagcctgcccagcctgctggcgtgcgggcagtgcaaggccacggccgtctcgccgccggagtcccccacgggcgtcggcgcgaggtcgttctcctcgtcggcgtcgtcgtcggcggggacgtcccgggggagggagcgcgaccgcctggcggagctccgggagatcttcggccacttcgaccgcgacatggacgggcggatctccggcgacgagctccgcgagttcttcgcgtccatgggcgacgactccggcgccgccgccgccgccgccgcggcgatggggctcgacggcgcggcgggcggcggcgagagcggcggcggcggtggcgggctgatgctggcgttcgaggacttcgtgcggatcgtggagcggaagggcggggaggaggaggagcgggaggacctgcggcgcgcgttcggggcgttcgaggcggtgaaggggtccgggaggatcacgccgcgcgggctgcagcgcgtgctcagccagctcggcgacgaggcgtccgtcgccgagtgcgaggccatgataagcgcctacgacgacgacggcgacggcgagctcgacttccacgacttccaccgcatgatgagccaagactaagctatagctccgccgtgcgtgcgtgttccgcgcgcgccgtccgtcgccgcgtcgtcacgaggaaatttgcctccgcgggttcgatcgtgtctgttcgtgtgtgtgctgttgtgtacgtgttcgtgcgggttgtgggaggccggctgtgactatgtgagatggagtgtgtgttttggtcgcgtgatcgtatcgatgtgcgtgcgtgcgtgcgtgcgtgcacgccgcgcgcggcgcggcgtcgtacggttgtctgcttcgatcggtcgatctatgtatgtggtgcacgaacgcgggacgccttagcaatttagctgtgctttgtttaacacgaagccagcatgagtactagtaaaaaaaattcccttgtacctct

SEQ ID NO: 11597 - DNA, 1276 bp, Oryza sativa
  ref <308>: DATABASE ACCESSION NUMBER: AK108945
  ref <309>: DATABASE ENTRY DATE: 2002-08-28
gagttgtgcgtacacttcagcttatagtcttcttggctccatacatcacgtcaagtatccttgaaactgtttagagagcaaacatgaagttctcctctactgtcgcagccgcagcttcattgctggcaggcgtacacgcacatggcggcgtagacacatacactgttggaaccacagtctaccaaggctggtccccttacaactcgccaagtggacaaaagagtctgcaacgccagtactcgacatgtgatccactattcatcaaggacctctccaccgtcaacatccgttgcaacaatgcaggtgcgctcggcactggcgtctcagggactgtggctgcaggacagaagctcaaggcccactggaaacaatggacccatagacctgccgccgtgatggtctacatcgccaaatgccccagcgcaggctgtgacagctgggacggcgcaggcaaagtctgggccaagatcgcacacgagggtctcgtatctggcaccgcaaacgcaggcgtctgggccggcgacgccatcgtcgacactcttgagtacaccgtgacgatccccgagagcctcgtcgcaggcgactacttgatccgccacgaactcctcgcactgcatcaggccaacaacccacaattctacccagaatgcgcccaattcaaaatcaccggctcaggaaccgcctcgcctccctcctcgctcctcgtctccttcccaggcgcctactccgcctcggacccgggcgtagcattcaacatcgacagcgacgcctccaagacgtcgaccacctacgtgatccctggccccgccgtgtggaccggagcaggcggcgagacgacgcccgaggagcccgcggcctcagagacgcccgtggctacgccgacgcccacgacgctggtcaccagcgcggcgccgagcaagacggcggtgccgagttgcacggtgccgaggtatgggcagtgtggcgggaagacgtataccgggtgcacgttctgcgacgctgggttgacgtgcagttcaggcggagagtattattctcagtgcacgtagagattgcggtagatagcttgagcgaaggtaggagagacgtgagacgtaaaaatagcggaaggcatgggggctttttttatattgcatcgtgtaccatgaagtcccattgtgtgtgtccagggttgtcgctatgagaacgatgggttgtaagatcgaacagggcgactaagagagcgagctgtagttcagtcaggtgttgtattcacaataaatcaagtacgtctcgc

SEQ ID NO: 11598 - DNA, 1667 bp, Oryza sativa
  ref <308>: DATABASE ACCESSION NUMBER: AK108946
  ref <309>: DATABASE ENTRY DATE: 2002-08-28
tttggtggagtccacagaccggacgctcgacgaacaacggcgacgaggtagtcgagcagggcagcagcagccacaccggcacgcgcagcccgctgaaccgctcctggcagagctgcaagcagaggacggcacagccggagcacagcgtccggtccgcgcccgcagccgccgccgcagtcgatgccgtggtgaactcgagcgccgccgtattccgctacgcgacccacgtctcgccgtcggagttgaagatgccgtcgccgagcaggtcacggaagacggtgtgccagaaggggggtggccgccgccgctcgccgtcaaccgaagcaacccagccgcgcccgccgtcaacctaagcaaccctggggaagtgaggaagaggggtggccgcagccgctcgcctgcgccgccctgccccgtcgcttgcctccccgcgttccctgcctccgccgtcgcctcgccttgcctcgccgcctccgctctcctccccgcgctcgctgcctccgccgccgcactcgctacctccgccgttgccgggaggagagagtgtgtgtgagagatagaagagatagaagagagagagagtatgacatctggtcccacattttttaataaacagaacgctgactggactgccacgtgtatgccacgtaatttaaaaccaccgcggattggatcgaggggggtaattcgtccggtttgcatagttggggatgaagaatatccggttttatagtttagggagtaattcggacgaccacgatagttcgggaggctaattcgtactttttccttatactattcgatttgacaccatcaaattccaggtgcgcgatgccatatggaacatgccaatcccgcccaacaccctgctgcgcggttgccggccggaggacgacgcccttctctgtgatccggcagttcggctacctccaactagcgaaagcgcggtgacgcgtcgaggaacacgacacgggcgggggctagctgctgctacctgcgcgcgaagctccgaagacgcagccatgctgatcactccacttaaaaaaatgccgtagccgacgacccgacgtgctgatcaggaaaggtttcgcgcaagttcagagaaccaaggtggtggcgatatgcagatcgggtcaattcatacaattcgtttcacgtgcgcgttcctttcatcaatccgcgattaccttttgcctcatctttccatcacccggtggcagccgactagcagaaaccttttgggtgggtttggtctggggtgtgttgggtacttgagttactgcagctcgcacggcttagtacgagcactttgcgtgcgcctaaaccatgttttattgtatttgacctgacattcctggtcaatttaaacaggccagcagcacacgtacgagtttaaggaggggccagcacaaaagtgatagctgcctttggtcatcaacgttataaaggtcataactaattcataagtcataacagtgaactattgatcttttaattaggtgataggattagtgatgttctcctcaaaaaagattaatgctgttgaaagattagtgggtagatggtctgctctcctgcgttaagatttctctatattaccaatagtagtgaatagcccacgaataccacatgcaaatttgaattatgaagatacatgtctattcatt

SEQ ID NO: 11599 - DNA, 1510 bp, Oryza sativa
  ref <308>: DATABASE ACCESSION NUMBER: AK108947
  ref <309>: DATABASE ENTRY DATE: 2002-08-28
atcaaatccccaaacccctcctccttctctccaagtcctcgtcttggttgtcgcaatcattcgtggggcgcgttaatccctccccaaattctgtggcagccagcttccccgcttgcttggattggatttctccaagattgattcgttccctcccaattcttcacttcctctatccatttccaatccaatcttggttttttgcattgtttcctcccgatttgtcttcctctcgctctccctctcccaccatatcttggactcggtcctatctgtccgtgcctcgcttccatcgccattgctcttttgctgctaaagtcttctctttggagggagagactgggactgggagctagctcgcccttgtgttgttcagggagtaaatgcgcgtccttggtggtgcttggtcccagcattttccgccccaaatctcgtccttgctgccccgacttaagtggtggagattccgtcaccggcggtcgtagatgaggaggaggagatcctcctcctgatctactcttcttcttcttcttcttcttcagctcctggctgctgctgctccactccccctgatccccctgcaggagcatggatttcttggcctgcgtctgcctcctccacctgctcttcttggccacttcccgggtggcggcgcaggcgtcgtcgccggccagggccctggacgcaatgctgcaggaccacgcgtaccgggccttcgtgcacccgcacactggcattgtctacaacgccaccgtcccggccaacctcaccggcgtcgccctgtccgcggtccgccttcgcagcggcagcctgcggaggaaaggtttctccgactacttcgacttcaccgtccccaccggcatcgtcgtgcagccgtacgtcgagagggtggtgctcgtctaccacaatctcggcaattggtctgaccactactacccgctgcccgggtacacatacctctcgccggtgctcgggctgcttctctacgacgcggccaacttgtcggcggtggggttgcaggagctgagctttgtcgcctccgggagcccaatttctataaatttcagtgatgttagatcggtgccggcaggcggtccagctcctcggtgcgtgtggtttgatttggatggtgtgccacaattccgggacttagaggcaagcaatgtgtgctcgacgtaccgccgagggcatttctcgatagtggtgaactctagcgcgattcctcctggtccagtgccttcaggcaacattacaccgccaataccgactcctacaggtcgttctaagggcagctccaaggggtggaagattgctgttggcgtggttgggggcgtcatagcattggtcctgttggcgtcgcttgtggtttgtttggcaaggtacaaaagagataagaaattggaactgatggaacagaatgcagagactggggagacattgcgtatggcacaggttgggaggtcacaagcgcctgtagcactggggacaagaacacaaccggtgattgagagcg

SEQ ID NO: 11600 - DNA, 1373 bp, Oryza sativa
  ref <308>: DATABASE ACCESSION NUMBER: AK108948
  ref <309>: DATABASE ENTRY DATE: 2002-08-28
agcatgagctggcagtcttgcacagcaaagggcagctgtaccaccaagaacggcaagatcaccatcgatgccaactggcgctggctccacgtcaagggcggatacaccaactgctatactggtaacgaatggaacactactgcttgcaaagacaacaagtcatgcgcatccaactgcgctgttgacggagcagactacagtggcacttacggcatcactgctagcggcaactcgctcaagttgaagttcgtcaccaagggttcctactccactaacattggttcccgaacatacctcatggcgtctgacaccgcatacgagatgttcaagttcaccggcaaccacgagttcacgtttgatgttgatctatcgaacctgccctgtggcttcaacggcgcgctatacttcgtctccatggatgcagatggtggtatgaagaagtactcaaccaacaaggctggtgccaagtacggaactggctactgtgatgcccaatgtcccagagatctcaagttcatcaacggcgagggcaatgttgaaggctggcaaccctcttccaacgacgccaatgccggtgttggtggccacggctcttgctgcgccgagatggatatctgggaggccaactcagtcagcacggctgtgactccccacgcctgcagcaccatcgagcagtcccgctgcgacggtgacagctgtggtggaacatactccgcagaccgctatgctggcgtctgcgaccccgatggctgtgacttcaacagctaccgcatgggagtcccagacttctatggcaagggcaagaccgtagacacctcgaagaagttcaccgtcgtcactcaattcattggcaccggtgacgccatggagatcaagcgcttctacgtccagaacggcaagaccattgcgcagcccaactccgccatccccggcgtcgagggcaactccatcaccactaagttctgcgacgctcagaagaaggcgtttggcgacacctacacctacaaggacaagggtggaaccgccaacatggccaaggctctttcccagggtatggttctcgtcatgtcgctctgggatgaccactactccaacatgctctggctcgactcgacctaccccaccgacaaggaccccgcatccaacccaggaaccggtcgtggcgagtgtgagacctcttctggtgtccctgctgacctcgagagcaagaacggtgatgcttcggtcacgtactcgaacatcaagttcggtcccaccaactctacctttggctaaatctaaaatgagtatggtgttggggagacttgtatatagcttgagcggaagatgagtatgggtatataggcagtacagtagaagttgtcactcgtttg

SEQ ID NO: 11601 - DNA, 979 bp, Oryza sativa
  ref <308>: DATABASE ACCESSION NUMBER: AK108949
  ref <309>: DATABASE ENTRY DATE: 2002-08-28
gtgccccgcgcgcgggttctacacctacgaggccttcctcgccgccgccgccgcgttcccggcgttcggcggcaccggcaacaccgagacgcggaagcgggaggtcgccgcgttcctgggccagacctcccacgagaccaccggcgggtggccgaccgcgcccgacggccccttctcctggggctactgcttcaagcaggagcagaacccgccgtccgactactgccagccctcgccggagtggccgtgcgcccccggccgcaagtactacggccgcggccccatccaactctccttcaacttcaactacgggccggcggggagggcgatcggggtggacctgctgagcaacccggacctggtggcgacggacgcgacggtgtcgttcaagacggcgctgtggttctggatgacgccgcaggggaacaagccgtcgagccacgacgtgatcacggggcggtgggcgccctcgccggccgacgccgcggcggggcgggcgccggggtacggcgtgatcaccaacatcgtcaacggcgggctggagtgcgggcacggccccgacgaccgcgtggcgaaccggatcggcttctaccagcgctactgtggcgcgttcggcatcggcaccggcggcaacctcgactgctacaaccagaggccgttcaacagcggctcgtcggttgggttggcggagcagtgacgactgacgacgagaaaaataaaaaataaaatggaaacatttgcacggccgcatccgcatgtgccggtgaattgaacgagctccatcatgcatgatagttcagttcacgatgctaataataaagctgggctatgaataaattaatcgtagtatagtaaattggtataaattgtaggcggtgggatgtttggttacaagatcaacggaacaatcgcgtgaaaggaaacataaaaacccggatactgagacaattgcgaaaactattatagagaagatttaatc

SEQ ID NO: 11602 - DNA, 897 bp, Oryza sativa
  ref <308>: DATABASE ACCESSION NUMBER: AK108950
  ref <309>: DATABASE ENTRY DATE: 2002-08-28
tcttgaggcggcagcattccttcttctaaccgccgccgccgccgccggcggcgcgagcaccgtggtggagcctgtcgcgtcgtgctccgccacggacagcttcgccgccgacagctccttcgccggtaacctggggcgcctcgtctcgctcctggaggccaaggccccggccatcgggttcgacatcgccacggtcggggtcggcggcgatggggaggatcagcgcgtgcacggcctggcgctctgccgcggcgacgtcgcaagggcaacgtgcgccgagtgcatccgggcggcgggtgcgctggcgcggcgcgtgtgcccgtccaagaaggacgccgtcgtctggctcgacgcctgcatgctccgctactccggcgagccattcttcggcgaggtcgacgccgagcaccgcgccgtcgtcccgccggcccgcgtcctgcggggcgcggacaggtcggccgacctcgacagggaggtgtcccggctgatgaagcggctgacgaggacggcctacctgtcgccgctgctgttcgccgccggggaggccgtggcggtcggcggtgcgcagaggctgcacgggatggcacagtgcaccaaggacctctccggcggcgactgcaagatgtgcctggaatccgccattgatcaactgctggcgaggggttgcgccaaggagggaggcaaagtgttgggtggaagctgcagcttgagatacgacttctactccttgtctgattcctaggctaatttggattttgcaattttaaacttgtaattaaggtgaccacattgtgcatagagattcccatgtaatcacatactactactactactagtactcctacaagaaagagctctgctcataaatagagcagaatattgtctttcaattttgac

SEQ ID NO: 11603 - DNA, 979 bp, Oryza sativa
  ref <308>: DATABASE ACCESSION NUMBER: AK108951
  ref <309>: DATABASE ENTRY DATE: 2002-08-28
tcaaccatgaggctgttcgaggagccaccggcgaagctcacccactgggctcacccggagcacgagctgacgctggccgccaccgccggggcgccgttccggtgcgacgggtgccaggagcccggcggcgacgggccgaggtacaggtgcgcgccgtgcaacttcgacctccacaccgactgcgccctcccgccggccaccctgcagcacccgctcctcttcaagggcggcggctgcaccttcgtcttcctccgcgagccccccgcgcccgccgccgccagccggcagtgcgacgcgtgcggcgacgacgtgcgcgggttcgtcttccactgcgccgaccgcgacctcgacctccacccgtgctgcgcgagcttggaggaccgcatcgtcacgggcgggggcggcgacggcgacggccgcgtcttcgagctcaccaaggcggcgtcgtcgtcgtcgtcgcggcgccgctgcggcgtctgcggggacaagtcgcgcaggacgttctggttctaccgcggccgcttcgacggcgaggacgtgttcatccacgtggcgtgcgtgaaggagctcgccgtgcggaggtgggaggcgagctaccgccgccgcagcggcgccggccagatcgcgctcgccggcgcgccgctcatggagggcgccctgcagagcctgccaaggaggacgcggcggagcggcgggttcgagcggttcagcaagatcgtgggtgtcatcgtgagcgccataatcgccgtcatcttcgggaatccgatggggttgatcgccgcggtggccggccctgacggtcttctccgcgggtagaagacgagtggaaaacagtgtgctgctaattagcaacagtcaacgagtgcgtcacgtgtagagtgttcttctctatgatttttttttcttcgtataaacccgaatgttttatttttaatcttgtggtgggtttggaatattttgaacaaagattggttcgttc

SEQ ID NO: 11604 - DNA, 1861 bp, Oryza sativa
  ref <308>: DATABASE ACCESSION NUMBER: AK108952
  ref <309>: DATABASE ENTRY DATE: 2002-08-28
aagcattctcctcttgctcacctacacctttccttccacctcgtcattcactcgagcgtggtgaagtctccgcttgctgtcgctgctggagcttccttctgtgcaaacctgaagctgaccggagctcacttttttttgagcggctagtcacttcgcactctcactacctcttatcgccacctttcactcatcaaaatgccttctcaccagcctgtcgccggcatgcaggccattgaccccgactacgtcaagcagccgtcttccatggcgagcacctcggagccaaaccgcaatcccaaatacgaccctaagaagccacacatcaccgatctccccatcactcggtcaaactggtacaagcatgtcaattggctcaacgtcatcttcatcatcggtatgcctctcgctggctgcatcgccgccttctggacccctttgcagtggaagacggctgtttgggctgtcgtctactacttctggactggtctcggaatcaccgccggataccatcgtctctgggctcacaagtcatacaacgccagcctgcccctgcgaatcttcctcgccgcagttggtgccggtgctgttgaggactccatccgctggcggagccgtgaccaccgcgcccaccaccgctacaccgacaccaacaaggacccctacagcgtccgcaagggccttctctacagccatctcggctggatggtcatgaagcagaaccccaagcgtatcggccgcaccgacatcaccgacctcaacgaggaccccgtcgttgtctggcagcacaagaactacatcaagtctgtcgtcttcatgggcctggtctccccaactcttgtttctggtctcttctggggtgactggatgggtggatacatctacgccggtatcctccgcatcttcttcgtccaacaggctactttctgcgtcaactcgcttgcccactggctcggcgaacagccgtttgacgaccgcaacagccccagagaccacgtcatcaccgcacttgttacccttggcgagggttaccacaacttccatcacgagttcccctccgactaccgtaacgccatcgagtggcaccagtacgaccccaccaagtggtccatctggctctggagcaagctcggcctcgcctccaacctcaagcagttccgttccaacgaaatcgaaaagggtcgtgtccagcaactccagaagaagattgaccagaagcgcgccaagctcgactggggtgttcctcttgaccagcttcccgttatcgagtgggacgactatgttgagcaagctaagaacggacgtggtttgattgctgtcgctggtgttgtccacgacgtcaccgacttcattaatgagcaccccggtggcaagactctcatcaagagtggcattggcaaggacgctactgccatgttcaatggtggcgtctacttccactccaacgccggccacaacttgctctctaccatgagagttggtgttatccgtggtggatgtgaagtcgagatctggaagcgcgcccaacgggagaataaggatgttggtctggtcaaggacaaccaaggcaacccaatcatcagggcgggcaaccagattaccaaggttgcacaacccatcgagagtgctagtgcagcgtagatgggtattccctttttaatttttatgagcgatgcatggcgttagggatgttctcttcctaggcggacagagtaatttatcgatttcagagcgttcgtttgacgagcatcatgaggatgctcagtcacaattagacggcgtatgttcacagccttgctcgagcgagaggcttttgaaaagtagtcttatgacccaatcagaatgaaattgacattcgttcatg

SEQ ID NO: 11605 - DNA, 1643 bp, Oryza sativa
  ref <308>: DATABASE ACCESSION NUMBER: AK108953
  ref <309>: DATABASE ENTRY DATE: 2002-08-28
gaagagatacatctgctacccgtccgagtggtaaacgcggactcgttgaacggtcgtgcatcacaactgtacaggcccttgttgttcgctgccctacaaattactggctaaaccctttctgagtttctgagttcacgctgtggtcatgtacgattgatcacaccgcaccgggacccctcagctgtacatacatgcaagtgcatatagcacaggtggcagggcattcttggtgttgactactaggctatgtcagagactgatctagaagatgtagtcttcaccaaaggagaaccagtcagctatcagcggcccacttccattcatcattggcagctgcgggacctcatctcagcagctgacactgagcatgagttttattgtgtgcatgacacaaagatatactgctatgacacagacacaaagcagtccaagctggtcagcaacctgggcttcactcccaacagcatgacatgcaggggggactttgtggcagctggcggcctgcatggcgagcttgaggtgcggcagctggcgtgtggtgaggtgtgcttcaagggcgcagtcggcacgactgtgaacaacgcactgcacctggccaggatcagcggcggtgaggcccggctgtttgtgtgctgcaacgacaacaccatcaaggtgtacaagctgcccagcatggagagcgcaacagtcatcaggtgcccctgccccatcaactatgctgcattgagccctgatggccgccaccttgtggctgtgggggactgcaaccctacgctgctctaccaggcaacaccaacaggttttgtgcagctggcgtccttcaccgaggcatctgatgtggggatgtgctgcgcctggaacgcacacggcaccagcttctcgtcctgtgcgcaggatggtgcggtgggtgtgtgggatcagcgcagcggggcatgcattgctcgcctgagctgcagcaccgccacgcgctgtgtgaagttcagtgccgcgccgcttgacctgctggcagtgagtgagcatgaggagcgtgtgcacctgtttgatgcccggcgctgggccagcaggcagacgctggggctgctgggcggcggggcagcaggcgtaccaccaggggctgcgggcatcagcggcatcgccttcacacagggtggtcgtctgtgggtggggctggaggctggctgcgttggctatgacatggacagcctgcagcgacgcaccttcagctgtgcagacatactgtgatgcacgcggcatgtgtgggccctcgctggcgagtggtgcagtggtctggttgtttgccactggcagcctgctaccagctggcctcgcagaggagttgggctcttgtttgtggtgctgcctgttgtttcctggtatcgatggggcagcatgctctctgctggctggcactggcaggcctggccctggattatgcgaaagcctgcattgaacatacagttgttgtccaaacataccttctgaacacaatggttccataccgtcagttcaggttgtgacaacatcacaatgtgcattggacagtactggtcagcggctggtcgcggcaacctgtcacaagttggtgccgtcacacacggtgtgttatatgtccatggactgattcttgtaacaaagcaaactgc

SEQ ID NO: 11606 - DNA, 923 bp, Oryza sativa
  ref <308>: DATABASE ACCESSION NUMBER: AK108954
  ref <309>: DATABASE ENTRY DATE: 2002-08-28
caaaatcatcctcatccagtgccgaccgcaagtcccgccgtgtctcgaccgcttccatcccaaagggccgtggcctcagcccagagcgcatcgttgcccccaagccccagcgaccccacgagacccgccaagttatcaacacgcagtacgacaagaccactttggaggagctcaaccgccgctttgctacccaaaagattgaagaatcatccgacgactccgactacagctccgatgaggactcagacgtcccatcgctcaccagccgctcgacaaacagctctagcccgtccagtatcagctctggcagctcatgctgcacgtgcgaacgctacggcatcacccgcgctggtgaccgcgtcaagcttgactgcggtggtgcgcgatgcggatactctgatgactcttcagattgctcctccgaagacgagtacgtgtacgaggagaagaccacccgccgtcagggtgtcgtcattcgctcttaagagccttctcttcttaccacttcccgactggacagccatttgtccccagtcttttaccgtcactgcccttaagtgacgggaacgactacaataccttcttccttctttcatgtgcatattatgataacaacctttttcttcctttctttcacttcttcctattccacagccgtcgctagcctcgcaaatttgtatggctccggctttccactcacttattctaattggatccgcttgttcttctttttacgacgacatggctcatgcttttttttgctgctggttttccaacttggagacttggcggatgggacgaaacatggtcaagcgaacacaggcccatctttcctcgtctcttgtacgcttacgaactttaaacaccgggcggacaggcttatcttgtccgtcaacggaggaaacatacaacatatgtttgcc

SEQ ID NO: 11607 - DNA, 1001 bp, Oryza sativa
  ref <308>: DATABASE ACCESSION NUMBER: AK108955
  ref <309>: DATABASE ENTRY DATE: 2002-08-28
aaacttctagacaccagcttaccactattctgtcgtccattgtacatttcaacgagaatgggccgacgcgaacgcaccccatctcccccgcctcgcccacccatgggtcgacctccagctccagaaggcacctacagcttcgagaaatacgaaaacggcaagccaaaatgggctcctgccccagacaaccagcaagactaccgtgattatcgagacacccgacgagaccagcgccgcccacgacgtgctgaaacatacgatgatgcagcgcctcctccacctagggacacacctcgccaccgcccaagaagatactcatcgtcctccgactctgactctgccccaccaccaccccggcgctctaaacgccatgattccccacgccgcgaccgccgccgcgaaaaggactcctatgactcctacgacgagcactacccgccacgtcgccctcgccgcgaccgtgacggctacgtaagcgacaaccgctacaaccggccccgcaacgactctcgcgatcgctacaggcgcgacgaccgcgaccgacgtgatcgcgaccgccgcggcgatgatcgctatgacgacatgtttaacagtggctcgcggcgcgatacacggcggtacgacgaccgggatcgcagggaccgctacgatgacgaccgctatcgtgatcgacctaagagcagcggtgggcgcggtatgggaaaacccggccagcctgagtggcagcgtcaggcgatttctatgtccaaggattatgctatgccgattattaagaaggaggggcagaagtatattcagaagcagatgagtgggtttgggtccaagcggtgagcaattgaaagcttgagtgcaagaatgacatatgacatgatttgatatgatatgatcggaaacgatataatatgtgaatgggtatgttggcgttgaaggatctcgatttagcggctatggctagatatggtgtaccatttgattcgattcatactaccttttcttttcac

SEQ ID NO: 11608 - DNA, 2436 bp, Oryza sativa
  ref <308>: DATABASE ACCESSION NUMBER: AK108956
  ref <309>: DATABASE ENTRY DATE: 2002-08-28
acggctccttcccgctgcaggttgtctctcgaggttcgcctgaactcaggtctatcttaccctcaatcaagatgtcgtcagtcgagtcgtacgatatccatttgggcttttggaccaattggagtcatggtaaaattcagggcgggacaattaccatcacacggcaacatggtaatttcctcatcgccttcctggctatcttcatcggagctgctgggaaaagtttctggcgactaggatgcttcatgttgcatcgatacttgtcgaccagcgcaccagaagacggacttcatcaccaacgtcaagtcatcttgcgcaactccgataccgcccaggatggggcctggcgactgctcctatccatgctcgcatggcgatctggccgtcgagctcgacgacctgtatggcggctgcttcctataatcatagttgcctttgccgtctccgccgctttcggcgttgcatccatcttctcgtctaatgtcaccagcgaaaccttgaatcaagtcctgctcaaaggcacgcgctgcggatctatcaatgcaggcaaagagaaagatcctgacaaacaactcgcgttgttgatgccttactgggcaagccaaacgaccaagtttctcaactatggcatgcagtgttatacgaatcagaccagtacggatggctgcaacttatacatcaagcctcgacttccactagaatccaaacgcgggatcccgtgcccgttcggtgataatatctgcaagtccgataatgacaacttactgatggacacggggtttctggacagtcgtgaagatctcgggatcaacagtgcaaccgaagatcggtttcagatgcggattgtccaaaagtgtgcacctcttaaaacacagccatatgtggctgatcacaacgacaccgaatatggcgtactcaggagatataattatggaaagataaggaatgtgcgtggggtcctcaactttacttacgagttgccaatcagtttcgctttccttccggatgataacagcacaagcgcgaacattcctcgtctcgattacgatcttggagtggagagacattgggcgactgataacgagactaaaatggccgatatgaatcgatggtatcccatacgccccctctacttggatgatgcggatgttcaacttgcgttccttgccgcacctgagattcgatacagtgcgccaatcaatgacccttggttctcggcccgtagaaaggcttctgagatacacgatcagcgatcaggtaaagaattcgcctcgtacaaacaagatgaatccctcggcgtcatgggatgctcgcaacagtttcagtattgcaatcccaacttgccagaaggccaacgatgtgagcccttgagaggcatgatagaccctcgagcatcagctgccgtcaagaaaatcttcacatctgaatcccaatttgacgtagtccgctgggctgatagtctctggactggcagtataagtactatcagctctacgttgagctacgcaggtgctgctgctcttcgggccaggtacagcttgtcgtatggatactcgggcccgctacccgataatcagtggcagttagaagctgaacattggtcttatgctatgctagcatccctccaacatacgttcgtaagagcgtccaatggacctccagaaacgctggaagtcttccgtgagcctccagcagccgacgagcaggttgcacagaagatgtgtacgaatcaaaagatcgtcagtaacaagtactcgtccttcaatgttctcggagtgtcgctcatcctagtctttggtattatcatcattgtactcgatatggggctggagcctcttattgcaaagatgcagcaaggcaaatactccaaggctaagcaggatgacgaatcgatcgactacagcgagaagggcgaacatccgctctacagcgtggttgaatggtcgcagaacaacatgctgcaattacagcgtctgggtcaagaagaagcacactttggggagtggtcaaagtgcgaccaagatgtacctgtcacagagccaggacagcttttggcaccactcgacttgcgcaaaatcacgcacccacgcctacagcaacccaagggtacaccaaactcttctgagtgggacggcattgtacctcccaagccatggggcatgcggagaagtgacacaggtatggataccttgatcgaggaagctcaagccgagaaaagtggaaagaagcttgagtcggaagacaagatccaggttgtagttcgtgctgtcagcgagcgaaatggaacggaggggcttggtttacatgtggatgagcaatccaggactcatgcacaggagggccaaaactggcgagcacttcgataagctcgagggtacagcctaatatttacgacttaacgaccaacccagcagtaccttcttgtaccatattccg

SEQ ID NO: 11609 - DNA, 878 bp, Oryza sativa
  ref <308>: DATABASE ACCESSION NUMBER: AK108957
  ref <309>: DATABASE ENTRY DATE: 2002-08-28
actcactttcatccgcgcctaccgtcgttctaccaagctttgtctcgatcgcatcaacctcaagaccattttggaaaaaattgcatctcaaaacaccaagacaccgtcacaccgttcacaatgtcttcgcaagaaactgggttgccccaaggctgggaggtccgccgctccaacacgaagaacctcccgtactactttcatgccgacaccaaggactcacgatgggagccaccggcgggtaccaatcccgagcagctcaaacagtacatggcgcagcatcacagctccaagggcgtcgcgccggccaacttcgcacattccggggacaagatccgggtcgcgcatctgctcgtgaagcaccgcgagagccggcgaccagctagctggcgggagcccaacatcacgcgcacaaaggatcgggccaatgaaatgatcaaagaatatcaggcacagatccaagatttcgaagagggcaaaggtggcaagtcgctatctgaactggctactacggaatccgactgcagcagcgcacgcaagggcggcgatttgggcttctttggacggggtgacatgcaaaaggagttcgaaaatgccgcctttgcgcttcagaaaggcgaaatcagccagccagtgcacacggcgtctggggtacacttgattcagaggttagaatagcgttgttgcccaacgggcgtggtggtcgaaggcacaaaaagagcgatatacgataagatgtagcagatgagatatgtaggaatacgatgcgttggaagcgtggttgggctgcagttgggaagtgctcaacgtcttgattaggacgagtcaaaagcgaccgcagctcccgtagcaagctgcaggaaaatccaaacaagtagccc

SEQ ID NO: 11610 - DNA, 925 bp, Oryza sativa
  ref <308>: DATABASE ACCESSION NUMBER: AK108958
  ref <309>: DATABASE ENTRY DATE: 2002-08-28
atcgcagatcaacacaagcattcacttccaatcaccactcactcggtcttctacaaccactctcactcaaacacaatcagtctttcaagatgcactccaagttcgctgctctactcctcccagctcttgctgcggcctacccccagtctggcagtgcccccaacccagacgacatcaccatcactagcaccacttactctggtaacggatgtccccagggctccgtctctacctccagctccgacgacaagactgtcattacttatggcttcgatcaattccagacgtacattggccccggcgtcgcctcgtccgagaagtccaagaactgccagctccacttgaacctcaagtaccccggcggcttccagtacgccgttgtcgacgccacctaccacggctgggctcgtctggacgatggtgtgaccgggagcttcatcacgacctactacttctcccaggacgccggcaagacccaaaccacccgctcctccttcaccggcggcggcgccctcaaggacggccaggtctacaccaagcaggacagcgtcgagaccaccgccaccatctggtccccctgcggcagcaacggcatcctcaacatcaacaaccgcatctcgctcacgtccaaggactcaaaggcgagcggtgagctctccaacgacgatgcgaccgtcgccttcacccagcagctccacgttgcgtggaagaagtgcacgcctggatcgggtagcggatctggcagcgacaacacgattggcattggcatgcctagctcggatgtcataatcaactagagtgtgaggaaggagtgagtgagtggttggaagcagacgggatgcggaaaaggtgtatataggtgatgagaaagggtttcttttgtttgaggtagtttggacttgtgaattcattcattgcatctgct

SEQ ID NO: 11611 - DNA, 666 bp, Oryza sativa
  ref <308>: DATABASE ACCESSION NUMBER: AK108959
  ref <309>: DATABASE ENTRY DATE: 2002-08-28
acatcaagctgggctgggccgaagatcggtagcctaccatgccctcgcggtcgcggacacgcggcggcgacggcgacggcgacggcgacggtttgccggcgggagatttgaagccgggtgtcatccggaacctgcccaccttttcccgcctgctaatcaacaaatggcctcctgtgttccgccaacgattttcttatccattcaggtaatcatcagttcatcatcctattcgcattccttctctcctttgttttctgtatcgacatttttttcccgcttcctcgtatgcaactagaaatctctgtaattaatccattaagtagaagttcgccaataccaaacctgcgatcgtacaagtgaatgtaatgcagtctgcgccactgatctatttcgcccgccaactgttcgacgaaatggcaaagccaaagagctgaaaagttcgacaatatgtctgaaaagttgatgtcagttgtttcttccctgagacggccaagatctggcgtaggataactgaaggctgttccctgaagttttctatggatgtttgttttctaccaagagatgttctttgagctgcttttagaggtgcttttgcttagtttcgttttgtctcctgttgtctgtaatcttttggggtctcaaaccttgtgttagtctgtttcgttc

SEQ ID NO: 11612 - DNA, 1102 bp, Oryza sativa
  ref <308>: DATABASE ACCESSION NUMBER: AK108960
  ref <309>: DATABASE ENTRY DATE: 2002-08-28
ctgtactgtatccgaggtccccttccgccgccgccggatcctaccatccgccgtggccagctccatacgctgcggccggcgctcctcctcctcactccggattactgccgccacgcatcctcctctctccggattactgccgccgcatcctcgccggagccgcttcttctccgtccgccgccggagcaggtcccattccgccgccgttggatcctaccatccgtcgcggccggccccatccctcatgtgcgacgagccgtaatccgccgccgccttctccctcttctccaccgcttgccctaccccgccgctgccgcctcctcacgcgctcgcctcccctgtactcgcaccgcgggcgtgagaggccggagagacgaggtcgccgtcggccacctctaccgctgtcgccgccttctccctctctaccgctcgccctacctcgcctcctcgcgtactcgcgccgcgggtgtgagaggcagatcgccgtcggatgcctccaccgccgccttctccctataccccgtgctcctcaatcctctatagcaagtcctcgatccgcgcctcctcggatcctccgcggcaagccggcaatccccacacccctgccacttttgtcgccgtcgtcaacatcctctctgcccgagcccgaagcctcagatctacgctcatgccgccgccgtcattgtgtgactccctgccatggaattgtggccacgccacctcggcgctgttgtccataccctctccgcctgagcccgaagcccgggatacacgacctgaggtcagcgtgcacttctgcctctgtagccgagcctggcgtggtgctgactctgggagaagacatctagtgtagatggctcgacctcttgctgcggcctctgtccagtgcccgatgccagttgcaggctggaatgtggatcgaccacatcgtgatgattgggagcattcccaaggacagattggtattggtttcgaactccttggggttcaaatcatgttggtgatattccacgttgttattttgctttgtaatatagtatccagctggacatgttttggccagctatggaagaatacatcaaataaatatcaaatgctctct

SEQ ID NO: 11613 - DNA, 1196 bp, Oryza sativa
  ref <308>: DATABASE ACCESSION NUMBER: AK108961
  ref <309>: DATABASE ENTRY DATE: 2002-08-28
aaaccctcccccgccgaccaaaatcatcctcgtcgccgccgccgccgccaccgccgccggaagcagttcgtctcccccgttggtgttcgaccggtggttagatccatggaccgccgcccgccgctcgccgtctccccgcgcaggctccgtccgcgcccgcaccgcgctgccgccgccggcgccgccccgcgcccgcccgtggcttgctccgtccagaccccgccaggatcgatcaagaaagcaactaccccgatgcgctcctccttctgcgcgctcccgacgtcccgccttgagccgacgccgcgggcgaagctggacttcgccgcggcgccctcgccggcgagagcggcggtggcggcggggaaggagaaccgccacgtcgacgacgaggtgtccctggacctcaccgccatggccatgcccacgcccatgcccacctggacggcatctccgctgccgccgccgaccagcccgctgttcgagaggggcaggctctacgacctctactccgcgcggcgcaacgagcggctcaagcgcaagcacggcttccccgccggcgaggaggaagcggaggcgatggccgccgacccctgcgtcgccgtcgagctctccaagcgccgcggcgccaagaagatgaccggtgccgagtccgtgaggcggtccgtgccggcggcggcggacttctccgccgccggccgtgccgccacatctactctgggtctcaggtcctccctgcgcagcagcaaggagatgaagaaaacctccgccgcgtcctcctccttcgccggcgccaagtcgccggcggccaaggagaggagagccagcactcgctcgtcggctcggaggttctgatctcatctgatggaattgatagaaacaaaaaaaacagtttgatctggtttgataggtggaatgttgatattctgaaactatctgcttcaatgtcagtatgaaaaatggctaggtattggtaatattgatactgttggtactgagtttggaggttggttttgggggagggaatatggcttcatatcttggattcttgatatagaattgctgaataagttggaccatatttgtagcaattttttgttgctttggggtgtgcacatccattttgtgatgctatttttttgaggattgtgatcatattcatcctgagtgctgatgaaaccgcagtgcttgatgttttc

SEQ ID NO: 11614 - DNA, 1065 bp, Oryza sativa
  ref <308>: DATABASE ACCESSION NUMBER: AK108962
  ref <309>: DATABASE ENTRY DATE: 2002-08-28
taatggatgtttccacgacatgccctggggactgcaaactcacacatatgcgcccgccggagtcgacctgcgcaacaaatggcaaatatgcggcaaccagcctggcgaaccagtggagccacgggagcttggactcggagcgccaccagacggcctctacctgcgcgaggacattgaaatcaagtgcaacgtgaccatgatcagcttcgtcaagaaagaaatgcaagccgcctcgaaaaagatggtggagcgcatgatcaagaaagccgagctcctcgacgcaggcgtcatccaaggcatgatggagaacgggaagcttaaaacacacaacccgcaagaccgccgagccgcagaccacaaatcgccgcagccgtcgcctaccctgccgtatcaaatgcccatgtcgcccacgcgccagtccacgttccccaaccagatgcaaatgggccagcctgctggtggggatagtaaatacgtgcccccgcaacacctcctcggccaaaacaacatcgtcatggaacttcccggcgactattaccacccgcaacaatcccccaatcttctccaccccaaccgcgcctccaccgcctccgacagcaccgcaggcggtgcgcactcgcccgcccctccctccgacgcgcgctggtcccaagtatcctccacctcgtctcgcccctcctcatacgcgccctccgagggcatgcgctcgccaggtctcgagcaaaaggccttcgcagccgagttaccgacgatggaggagacgagagaggaacatgaggcgaggagggagagggataataatgcgcctggaggaggacacaagtatgtgtataatccggcggattatcagaatttgcaggcgcagtatcagcctgcgccgccgtatgtgccgcatgcgaatgtgacgggtcaacagggggggtatgggcagggggcatatcaagggtatcagcgatgaagggatggggatgagagataggcgcttcggcgtgatgtataatgatttgttatgaggtgtttggagtttgagttggatttgcgagggggaatatttcgtatgtgttt

SEQ ID NO: 11615 - DNA, 2117 bp, Oryza sativa
  ref <308>: DATABASE ACCESSION NUMBER: AK108963
  ref <309>: DATABASE ENTRY DATE: 2002-08-28
attccaacatagggaggtagatcacatttggccagaagcctttgtcacgttcctctctttggaaactagctttggtagcttgctttactcttcctaggaatatatctttgtgtccagaaaataattgccacagaaacgaaagcaacgagagcagaggtcaacccagtcgtacttaccaaaggcgagcgaattgaagcaaatttaggccgcattttcgttgcgtacatagagaatcgaggcttacaatagggacccatctggtgtgtgcagcggcgctcgtgtaccggtcgccatcagcatggacgccgccgcgagggaagcgcaggtgcagggcagtctggaatggcgggtgacggtgccggagggctcgtcggtgacggtggagcacgaggccggcgtcgccgagagggcgtgggcgtgggtggtgaggatgctggtcgcggtcagggcggcggtggccggcttcgccaggaaggtgtggaagatcggcgccgacgatccccggagagcggtgcacagcctcaaagtcggcctggctctcaccctcgtctccatcgtctactacaccaggcccgtgtacgacggcgtcggcggcaatgccatgtgggccgtcatgacggttgtcgtggtcttcgagtacaccgtcggtggatgcatgtacaagggattcaacagagccgtcgcgacggcgagcgccgggctgctcgcgctaggcgtgaactgggtggcggacaaatccggcgacaagctcgagccgttcatcctcagcggctccctgtttttactggctgcggcggccaccttctcgcggttcataccaacggtgaaggcgcggttcgactacggcgtgaccatcttcatcctgacgttcagcctcgtcgccgtgtcggggtaccgcgtcgaccagctgctggacctggcgcagcagcggatgtccaccatcggcatcggcatcgtcatctgcctcgccgtctgcgtcgtcatctggccggtgtgggccggccaggagctgcacctcctcacggtgcgcaacatggagaagctcgccggcgccgtcgagggctgcgtcgaggactacttcgcggcgaagcccgccgcggccaagtcggaggggtacaagtgcgtgctcaactccaaggcgtcggaggactcgcaggccaacctggcgcggtgggagccgccgcacgggcggttcggcttccgccacccgtacgcgcagtacaccaaggtgggcgccgcgatgcgccactgcgcgtactgcgtcgaggcgctcaacagctgcgtccgcgccgaggtccaggcgcccgagcacgtcaagcggctgctcggcgacgtgtgcacgcggctggcctcgcagtgcgcgcgggttctcagggaggcgtccacctcggtcgccgccatgaccagccccaagacgctggacttcgccgtggcggacatgaacacggccgtgcacgagcttcagggcgacctgcgcgcgctcccgcccgtcctggccttggaaccggcggcggagatgtcgctgatggacgcgatgccgctcttcaccgtggcgtcgctgctgatagagatatcggcgaggatcgagggcgtcgtcgacgccgtcgagacgctggccagcctcgccagcttcaagcaggtggaggatgatgacgacaagaagggacaaaccgagatgaaagtgcacccgctgaacgtgccggatgatcacgacgcgtcgacacatgaaagccagactacaacgaagcaccctgaacaggtctaaactttaaaaacgtccatcaaatcaaaccgcacaaaatcaaccagcgggacgagtcagaccggaagaacacacgaatacatgattgaatctaaactggctgagccaccgctctttgctagcttcttctggtgattaacagaataactctatcgatttacagtggagagaatcttggcaacttcataccacggcttacacgacgaataaaaccggcttaccactgtcataaaagtcggcatgtatcgtcgcattcatgatgtactactaccttgtacatatattaacagaacattatttgatatttttacaggaacactgcaaggcatatgagctcagatgttcccctctcctt

SEQ ID NO: 11616 - DNA, 946 bp, Oryza sativa
  ref <308>: DATABASE ACCESSION NUMBER: AK108964
  ref <309>: DATABASE ENTRY DATE: 2002-08-28
aaaaacaccaagcggcccaagccagaactcctattcacgatgggtagagtcattcgcaaccagcgtaagggtcgtggatccatcttcacggccaacacgcgcctgaacaaggcccctgctaagttcagaaacctcgattatgccgagcgccacggctaccttcgaggtgtcgtccgcgagatcgtccacgatgctggtcgcggtgcccccctcgccaaggtcgtcttccgtcacccctaccgattcaagcaggtcaccgagactttcatcgccaacgaaggcatgtacaccggccaattcatctacgccggaaagaaggctgccctgactgtcggcaacgtcctccctctcggtgagatgcccgagggtaccgtcgtctccaacgttgaggagaagatcggtgaccgtggttctctcggccgaacctccggcaactacatcaccattgtcggccacaaccctgatgagggcaagacccgcatcaagcttccctctggtgccaggaaggtcgtccactccggtgcccgaggaatgatcggtatcgtcgctggcggtggccgaactgacaagcctctcctgaaggcttctcgtgccaagcacaagttcgctgtcaagcgtaacagctggcccaagactcgtggtgttgccatgaaccccgtcgaccatccccacggtggtggtaaccaccaacatattggtaaggcttctaccatctcccgatacgccgtccagggtcaaaaggccggtcttatcgccgcccgcagaacgggtcttctccgtggtacccagaagacaaaggagtaaagtggtggctgggttcatggtctcattgggatggtgtttactggcttgcttgcatctattgaaggtactgccaagagcagatggctggtagctccgagggcaagtactatggcatttggcgcaaaaaaaattctgaaggccg

SEQ ID NO: 11617 - DNA, 1953 bp, Oryza sativa
  ref <308>: DATABASE ACCESSION NUMBER: AK108965
  ref <309>: DATABASE ENTRY DATE: 2002-08-28
ctattgcctcagcgccagttctgccttcaatagctacaccttcagtcgctctgccgtcgattgctctgcctttggtctctacaccttcagtggctctgccttccatcgctctaccttcgattgctacacctttggtcgctgtgccttcgattgctacaccttcggtcgctgtgccttcggtcgctgtaccttcggttgctctgccatcgcttgctgtgccgtccattgcggtttcgtcgctgctctcgtctcctgcactgaactcccagctgccagtgtctagtgctttaatccccgcgatattgccatcgctacttgctccggcttcgtcttctttggcagcaccatctacaagtattgttccagtcccatcggcgcctgttgtttcttcggtcaaccctgtaccatcggtgccgtcaagctccgccaatgctcctctaccaagctcaccaccactggccgtggggtcttcgatcctgccagaggcctcatccttggttccatcacctccgagtgttttgcccagcttgatccctcagatttcctcaatagcgattgtgtcgcctgcgatccttgcttcaagcctgcttgcgccgtcggtaccgagcttatcactgccgtctgtgagtgtgccaagccagattcttccaacaagtgccttagtcaacccttcgtcggttgtcccttcggtccttcagccattgatcccgtcccttcctctggccgctccatctagctcgcttcctgtcccagtctcggtgtctgtcccgtcattgcctgctgtgtccagcgtcaatgtcccaagcgtaacgccaagcgtgccaggaatacctctgctattgatcgtcgtttctgcaatctcctcggttgcggtcccagcagcatcttcactgacttcgcaattgccagtaccgccagtggcatcaataagctctgtggtgccagtcatatcttcagtcatacctcctctgaatctgcccacatcttccttggtacccatcctaccagtgagctctgtgctgccggctgtctcctcggtcgtacctccattggccctcccggtatcttctctggcatcagtctcgcgagtaaactctgtggtaccggtcatttcttcagtcgtacctccgctagctctgcctacgtcttcactggtaccactcacgccagtgagctcgatacagcccgtcgtttccacagtcatacctcccctagccttgccaacatctctggcctcaatcgtgctgcccacgtcatcagtagccgtggtcagttcgataccagcacttgcaaaccctctcctcccagtgatttcaagtgttctggctccgtcggctgtgccaacctcgacttctttgccagccgtctcgctcccaagttcttcggtgcccagatccagctcagttatagccccagcaagctctctactgccagtatcatcctctgcgttacctcctgtggctctcccaacaaccacttcgctagcaccagtgttgcccagtacctctatagtacccattgtaccgacctcgaccgcagccctcgcaaatcctctgctaccagtcgtctctatcgtcaacccactcctaccgatcgtttccgccgtggtccccagcgcctctgtcgccgttgccccggcggccacgacctccgccgcgcccgtcgtcattcaatctggcattgtttctggtacgacgcaagcgttccagttctataactcgggcgccgtcaaggtgggcactacgacgctgtcacctgcaaccggcgtcttcttccgcgtcatgcctgacggcactacgctcgcgctctactcggatggactgcacgtgggcaagacagtcgtgccgttgagccctgagtatcttgcagtcttggctagtaagaatattaggttgcctgcggcgccgttgatttagagggatgcgcatgatgattaaaagacgaatattgaag

SEQ ID NO: 11618 - DNA, 1790 bp, Oryza sativa
  ref <308>: DATABASE ACCESSION NUMBER: AK108966
  ref <309>: DATABASE ENTRY DATE: 2002-08-28
acctctcaggccaattgctcatcagtcagtttgcaagatgaagctggtttcggttcttgggtcctttttgtgtgcttccacagcacttgctgccaacacccctcacaagttgggtgctttcagcaaggtcaagagaatcgacgacatcaacagggtcccaaagaccgttccggtcgtcgagagacgtattgctggtcggggtttccgcaatgccgagatccagaagagggccgagagttttttcgctactgagaagaccaagccctttgccgtcaatggcaccggtatcccggaggtcaactttgatgtaggcgagagctatgctggcttgttgcccatctcggacgacccccatgagacgcgaaagcttttcttctggttcttcccagcaaccctggacaagaggccagaggagattgttatctggctcaacggcggacctggttgcagttcgcttagtggattactcacagagaatggtccattcacgtggatggagggcacgctcgcccccacccagaacccatactcttggagcaaccttaccaacatgctttgggttgagcagcctgttggcgtcggctattctgagggtgtacccaacattaccaacgaaatcgaactcggcaacgagttccgcggcttctacaagagctttgtcgacaccttcaacacccacagctggaagacgtacatcacgggagagtcttacgccggaatgtatgtcccttacattgccaacagcttcatcaacgccaaggacaagaagtactggaaccttgctggtatctccatcaacgaccccatcatcggcgatgagaccgttcagcagcaggttgtcatgcagccatatgttgagttctggcagaagctcctcttcctgaacgacacttatatggagaggtccagaaagcacaacaaggaatgcggttacactcagtacatggacaagtacttcagattccctccgccaaaggggcctttccccgtgctccctcccccatcaaacgcaaacaactacagctgtgatcagtttgataacttctacggagccattcaggaggtgaacccctgcttcaacatctaccacattaccgacatgtgcccgttccggtactcccagctcggcatagtcaaccaaggagactacagcccaccaggcgctgaaatctacttcaaccgaaccgatgtcaagctggctcttcacgcaagccccaacagcaactggcagcaatgcacaaacgtcaatgtctttggcaacggaaccgacaacggctccgatacgtccatgggccccgcaaacaacggagtccttcaaaatgtcattgagaagaccaacaacgccatcatcggttccggagacctcgacatgctcctcagcactaatggcaccctcttcgccatccagaatatgacctggcacggcgaacagggtttctctcagtacccctccaagaacctctacgtgccctaccaccccgagtacaacggcggtgctctcgccggcgccggataccagggctactggaccaaggagcgcggtctcaccttttacaccgcccgtcttgctggccacgagctgccgggctacacggcgggtgtcggctaccgcatgttggagattctgctcggtcgcgtcaaggatttcagcagcactgacaatttctccggtcagtctggtaactttacgggcgagacgccgctgtacaagcgggagttgtagtttgggggcgggtatatatagagatgtagactatggcatagtcatgataatagatgtatattgatgg

SEQ ID NO: 11619 - DNA, 1470 bp, Oryza sativa
  ref <308>: DATABASE ACCESSION NUMBER: AK108967
  ref <309>: DATABASE ENTRY DATE: 2002-08-28
atggggatagatcattgcaattgttggtcttcaacgaggaatgcctagtaagcgcgagtcatcagctcgcgttgactacgtccctgccctttgtacacaccgcccgtcgctcctaccgattgaatggtccggtgaagtgttcggatcgcggcgacgggggcggttcgccgcccccgacgtcgcgagaagtccattgaaccttatcatttagaggaaggagaagtcgtaacaaggtttccgtaggtgaacctgcggaaggatcattgatagtattgatagtgcaccgtggcactcagctttcactatggcgaacgataacgtcgacaaggttgtggagggaggcatcctgggagctgcaatcggtgcaggatttgaagctatccgcacaggcaagaggggcctcgccgatgggatcctgtccggcgttgtgctcggcgccgcttggcgcggtgtgaccattgtcagcgacaggtctggcctaaccaaccagctcaacaaggccaaggacaagatcctgaggcgctaagcgccgaccaccttgatgggtgctcccaccagcatagtggctgaggaaagacgtgatatgcacccagttgtgtagtgtgtgcgtgcgcatgcgaacgcatgtgtgttgtgtgtgtgtgtgtgtgtgtgtgtgcgtgtgcgcgcgtgcacgtgcgcgtgcgtgtgcatgagcatgctcccgatgtgtggtaaggtggaccaaccttcagaggaccaagcttcagatgccattgctgttttgtggtggtgacttgttgactttagactgttgcgcatgcatggcaactttgtgcaccatgtactatgcacgaagaagacacaacctgattggtgtggtaactacgtgtggtgttgttatggctggcgctggtttttctctgtcaacagcaagacggtgcaccagcgtgtatacacttcttttcagcctgctgatggggcatgttggttctgccctgctcttcttctgctgtaacacaattttgcattgtttggttctagaccgcatcatcttcttagaccacatcatcttcagaacgagtatagaagcagtgtacaaaactgttgatggtggtggtgtgttgagaagggctttgtggctagtgctctatatattaatcatacgggctgtcagtctaaggtctgtcactatcgactgctgactcctggctatgccctgttgacaatggactgctctcaagcaatcacagcacagcagtggtgctgcaatcttctggtctctggggtgtgtgcgtgtgtgtttctgtgtgtgtcgggtgtgtgctgcaagcacaggctgtgcctggcctgcatgcatgtcgtgcaggggccgtgctgcggctcatctttatgataacggtgtcagcttaccgcggttgttatcagctggtgggttgactccatttcaattgtgttcaggtcttgcaagttgcaacaattctgactcac

SEQ ID NO: 11620 - DNA, 1085 bp, Oryza sativa
  ref <308>: DATABASE ACCESSION NUMBER: AK108968
  ref <309>: DATABASE ENTRY DATE: 2002-08-28
atacgccgaccacctccgcaccaatacccaaaattacggcgacactctcctctattacgctcgcgcccacgacacccccaagatccaagaagtgctacgcgttcttgtcgcccactgtctcatcaagtcaatagcatacccaccactctccgaactcgacgatgccctcaattcactcatcacctcgcctaagcaaactctcaccaagctcgcaagtgtcgactccgagacggcaaccatgctttccaaccaccttagcggctacgccacaatccgcaaattctacgacctccgcgacgaagaagtcctcgccaccaatggctccaagcccgcacaccgccccatggcccgcaagcgcgcggcagcacatgccctcagcgtcatcatcgccagcgccgcctcaagcatccgcggcggcctgtatgatcccgacatcgagaccgtcgtacaagtcgatgtcttgcttcccttactcggcgaagccctcgtcttcgtcaaccaacccaaacgaacgctcacgctccgccacttatacgacctcctcgccgccgtcgaagacatcgataccgccccgagcatgatccgcacccagtgcgaggaagtgctcgctactactctatccgctgcacacgattccgccgcgacgtcgcagcggaacctgcaaaagtcgatctcaaatctcacgaccacgtcttcgcagttctcgctcatcgagttcggatccacagctgatggtgggagtgcagagaattctgccatgcttgtgcaaggcggtggtgtagacgatgctcagcgaggctgggattggagaaggggattcaagaagggagcgagtgggcaggatattatcagtatcttgagactggggattgcgagggagattgggcgcgcgtttgcggagggggaggtgagggcttgaggaggagaaggtggtgtggaaagacaggaaagggacacgaggtgttttgataccatggatcttgtataagtaggaagaaaaagtgcgtggggggagtataatagactaagcaggaaggaatcattggttcatcgtgctggttggcagatcatagacgcgattttgc

SEQ ID NO: 11621 - DNA, 1347 bp, Oryza sativa
  ref <308>: DATABASE ACCESSION NUMBER: AK108969
  ref <309>: DATABASE ENTRY DATE: 2002-08-28
cttttttccctttgattcctccgttgctctctctactacgcgtgggacatgagggagacgggcgcgacggatgaggggcacgcgtgcgaagttgtagtagccggaggtgacggcaaggccgcggcggcacgccggcgccgacgtctcgagctccggcggctcgggctggcggcggaggatgatgcggcggcgaagagaatccggtcggtgaaggacgggtcgtcgtctgatgactcgtcgacggaggttgttccccggagctggccggcgtgcgtgtcgcacggctcggtgtcggtgatcgggcggcggagggagatggaggacgcggtggccatcgagcggacgttcatggcttcgacgggggatggtgcgggcgctatcaggggcggcggggagggcgaggaggacttcttcgcggtgtacgacggccacggcgggtcgcgggtggcggaggcgtgcaggaagcggatgcacgttgtgctcgcggaggaggtgagcctgcggcggctgcgggggcagagcgcgtcgggcggcgacgtgcgctggaaggaggcgatgttggccagcttcgcgaggatggacggcgaggtcgtcgggagcgtcgccgccgccgccccccgcgtcgacggcaccgagccgtcggggttcaggacggtgggctccaccgccgtggtcgccgtcgtgggacgccgccgcatcgtcgttgccaactgcggcgactcgcgcgccgtgctctcccgcggtggcgtcgcgctgccactctccactgaccacaagccagatcggcctgacgagttggaacgagtggaagcagctggaggcagagtcatcaactggaacggttaccgtgtccttggtgttttagccacttctagatccataggcgactactacctgaagccgttcgtgagcgcagagccggaggtgagggtggtggagaggacggacaaggacgagttcctgatcctggcgagcgacgggctgtgggacgtggtgtccaacgaggtggcgtgcaagatcgccaggaactgcctcaacggccgcgcggcctccatgttcccggagtccgtctccggcagctcggccgccgacgccgcggcgctcctcgccgagctcgccgtctcgcgcggcagcagggacaacatcagcgtcgtcgtcgtcgagctcaggcggctcaagagcagggcagcttgagcttcgacatcatccgcgatggaggcggcacgtcgctactaattaataagctactagtagctccctgtacattacgtcgatgatactattaatttgggcatcgcgcggcgagacgccggaattaaacggttccggcgatgaaggtttcgattg

SEQ ID NO: 11622 - DNA, 1039 bp, Oryza sativa
  ref <308>: DATABASE ACCESSION NUMBER: AK108970
  ref <309>: DATABASE ENTRY DATE: 2002-08-28
atccacatatcaggcatcacaattcacaaactaactcgtagcgatcgatctctattttgttggagtttttgctgcttccactcaaattgttcagagacgtttcgatcgatcaagatcaacttgatcgggatcgcggcagctcgatcagctaactagagaacgtcttggactcttggatttctccgcgctctcgcagtattctaggagacatttcttgatcgatatcactagctatatatcggtcgtttgatcatgtcgtccaccgggctttcccgcggccgccggtgcaccatcgcgtcgcggctaaacgcgtcggctgaggcggcggttgcggccaccagcagcagcaggggggagaagcagaaggcggcggtggcgagacgggtggagtactacgacgaggaggatgcgcggggggaggcgcgctacgacgttttcatcaaccacaggggcgtggacaccaagaggacggtggcgcggcttttctacgaccgcctcgtcgccgcgggcgtccgcgccttcctggacaaccagtcaatgcgccccggcgatcgcctcgacgagcggatcagcgaggccatcagccagtgcggcgtcgcggtggccatcttctcgccgcactactgcgactccgagtattgcctccgcgagctcgccctcctcgtcgagtcacggaaaaagatcatcccggtgttttacaacatcaaaccctcggatctcgtcctcccgcaggccgtcgtcgagtccgtcgctcaccatccccgcgacattgaacgcttcaaattcgcgctacgcgaggtcaagaacacagtcggcctcacctacgacacagccacagggtaggtttaaaatgctgcagccatttggcgccattatattctcatacttagtagctaagctcggttagcttctcgtttgatcgcaactgacgcatttgtaatggtgatctgcctctacagagatcttgcagagctcgtaacatcggcggctaccgcagttttggagaacatagacaagcatgaggtcacgcaaggaagac

SEQ ID NO: 11623 - DNA, 1411 bp, Oryza sativa
  ref <308>: DATABASE ACCESSION NUMBER: AK108971
  ref <309>: DATABASE ENTRY DATE: 2002-08-28
aagcgaaaaaccgagtttgtatactcgataaattaagccgcaaagcagcaatgcgtgccgctgtgatctgtgtgttggcgctggcgttcgtggcgttcgccgctgcatcggtgcgcgctgccgacgtggagatggttgaggccgagctcgtggccccggaccacccggcgctgatggaggtgcagcgcaagcgcgtgcgcgtgggcgaccgcggcatcgacggtgtcgcgaagaagctcaagaacgcggccggtaaggcgggcaaaccgaagggtgcgaagggtaagggcaagaccaaagtcgcgcccaaaaacaaggccaagccgctgacgggtaagccgccgaaattcaatggtaacaccggcattgcgggcggcatccccggcgcgagcaaagtgcccggtcagccgtccggctctaagggcaaacccgaggccaagaacaaacgccgcttcggtttgggcgccaaaggcggtcagaagtcggacaaatggaatccgtacgccaaacacaagcccaccccgaagccgaaggacaacaaacactacccgaagccgggcgatggcccgtctaagaccatcggcggccacggcaccggcgcgttcggcggtcaggcggctgaccattgggacccgaacgcgcaggacgcggaggcggtcaacaaagacgcgaccaaaggcggacccatcggcggtgcgtacgagaagctgttcggacatgcgatgggcgcgaagaagccgccggtgccatcgggtccgctcacgggtaagccgccgcaattccgcaaaccctaagcgccggctcaacagccactgcgcgtgacccgcgtgagcgccgtcgatggggctgataacagcccacacaccgcacggcgcataccgcaaacccgcgccaacgcgtgcattgcgcgttcgcgcgtgtgccggtggtcccctgagggcgagctgccgcactgccaccgcccgctgcggggtgtgaccccgaagtcgcaccgcagcggctgcgtgtgaacccgcgcggcactggcgcccgccgatcactgcaccgcaccactttccatcctcccgcaaacgcccgtccgacgtgcccgccatcgcctgtccttctgttcgccgttcgctctatcgctcctttcatcccgcaccaaagcggccactgtactgcactgcatctttcccccctttcgtgcggccacaacagccgtttgtgtcagagaaatccaatgcccgtcacgcgttaggagttatccgcatttgcatccgcatttgtgctgccgcttgtgttgctcccatgcgatgccgacacggcgcacctcttttacgcgtcctgtgttttgcctttctcttactccgctgtcgcgatgcccgtctcgtggtcaacactcaaccaaaactgcaaaacaactaattgc

SEQ ID NO: 11624 - DNA, 1199 bp, Oryza sativa
  ref <308>: DATABASE ACCESSION NUMBER: AK108972
  ref <309>: DATABASE ENTRY DATE: 2002-08-28
catataaataagcggaggagaagaaacttacgaggattcccctagtaacggcgagcgaaccgggagatgcccagcttgagaatcgggcggccgcgccgtccgaattgtagtctggagaggcgtcctcagcgacggaccgggcccaagtcccctggaaaggggcgcctgggagggtgagagccccgtccggcccggaccctgtcgccccacgaggcgccgtcaacgagtcgggttgtttgggaatgcagcccaaatcgggcggtaaactccgtccaaggctaaatacaggcgagagaccgatagcgaacaagtaccgcgagggaaagatgaaaaggactttgaaaagagagtcaaagagtgcttgaaattgccgggagggaagcggatgggggccggcgatgcgccccggccgtatgcggaacggcttcggctggtccgccgatcggctcggggcgtggactgttgtcggccgcgccggcggccaaagcccgggggctccgcgcccccggcagccgtcgtcggcgcagccggtcaccgcgcgcctctggcgcgcccctcggggcgctgcgccgcaacggcctgcgggctccccatccgacccgtcttgtaacacggaccaaggagtctgacatgcgtgcgagtcgacgggttctgaaacctgggatgcgcaaggaagctgacgagcgggaggccctcacgggccgcaccgctggccgaccctgatcgcaaaagccaatgtacaatgctgttcgtcgggcagcagaagttcatagacaggtccggaagtatatgagaagcattttgaagcccgggatgctaatgattgatctatgtgaaactttggaaaacatggtcaggaaacttatcaactttcttctctattgatctaattgttcttagattgagagtgaagttgtgagagagctggacaccatttctctcatcaatatcccttagccaaaccttgagaaaagcctgtgaagcatgtaagaacacaccagtttgttccatccaaacccaacccaaaaaagcaccaaaaaaaaggtcatcagttccaagtcccaaaagcattgttctttcataactaggcatctcggttaattagggtggatattcctccactaatcccttagcgaaaaatctacaaaaaccactagatcatgtaattttcggcgaaatcattccacccccagctgaag

SEQ ID NO: 11625 - DNA, 2057 bp, Oryza sativa
  ref <308>: DATABASE ACCESSION NUMBER: AK108973
  ref <309>: DATABASE ENTRY DATE: 2002-08-28
gcatattacagtacatcagctgccgtctgcaaccatggcgtgcactatagaggacatcacagacaacttcgacccgcttgactacgataaagcacttggagacctgctggttggccatgaaggcaatgtacagcagtatcttgtcactgtgtttgatttcgtcaagcgaaagacaaactttttcaaggagcctgatgccaagcgtcgcatactggatgcatacaagcaggtcacaggcgagacggatgggttcaaagctggtttctttggatccgcaaagccagcagcgccaaagccagcggataaaccggtcccaaaggcgtcaccttcagcaggagctacactcagcagcagtgaaccagaagctgcttctgccagctcgtcagagccaccagcagcagcggcagcagcagcagtagacaacgcagcagccgcacctgaagcagagccgcagcagcagccagaggcaggcagctcacaggatactgagcttgcagctgagaaaccggaccaaaacaaaggcttgaagccaaacgccggtcgtggtgctgaccttgaggcctacagctggagccagacgctgcaggaggtcagcgtgtcggtgcctgtggggcgcgggctgaaggccaagcagctggacgtggccatcagcaagcagcacctgcgcgtgggagtcaagggccagccacccatactggacggtgccctggctgagcccatcaaggcagatgaggcaatgtggaacctggtggacggtgttgttgagctgacgctgagcaaggccgagggcatgcactggtggagtgcggtgatggcgggcgggccggccattgacgtgcaggcggtggagccggagaacagcaagctcactgacctggacccagagacacgccagacggtggagaagatgatgtttgaccagcgccagaaggccctggggctgcccaccagcgaggagacgcagaaacaggagatgctgaagcgcttcatggctgcacacccggagatggacttctcaaatgcaaagattatgtgagcagcacgccaacagcagcagcaggctggccagcagcagcagcagagcagcctggcctgtcggtagctgcgtggcagggcagcagcagggatgcaagggctggcagcagcaggcagcagctccttgtcccggcttggccaacattgcagcagtgcagcagcagccaggcgctgcagcagcagcagcagtgccacctgcacagtacgctgtcagtcatgagcctctgcatgcgcgtgtcagcatgctgcatttgctgctgttccttccctgagttggtgtatccgctctgcgcgccagtggtgcttcctgggctgtgctgcctggcagtgtgtgtgcagtgtaggcgcggcatgtcgcaactgaccacaccagccctgacagctcgtcaatatgtgttggtgtgctttgctctttgcccaaacaatgtcaccagcagcaaacgtttgcatcaacaccggtggtaacaggactgttgacagaacagacagcagcagcatgtggaacgctgtgcaggctgggtcccgtgccaaagctgcatggagcacagcactttatctacatgtgaacaggtgctcggcagatttgagagttggctgcaccttgtttgtgttggggcagatggcatggagtgtacaggggtttgttgttgaggtgcagtagcctgctgcctacagggcctggttggtgtttagatcaaactttttgactcagatttagactttttgactcagcagtgaacatgctcctccccaactcactgctgcactgcccccctacttagcagcagtagcagctcagccatgcattgttgcatcttatgttgcattatcccttgtgttttcaactgtggtggtggggtgccgctcaggttgcttcaggtcagctcatggtcgctgcctttacgctctgcatgctgccatactggctccgtgcatggagccatagggctctggctgagccacccatcgacccaacagctgcagagtgcagcccagcatgcatgtaatgggacttcacactg

SEQ ID NO: 11626 - DNA, 1253 bp, Oryza sativa
  ref <308>: DATABASE ACCESSION NUMBER: AK108974
  ref <309>: DATABASE ENTRY DATE: 2002-08-28
aacatcactcacattcgcttcctcctcttctctccccgaggcatcgtctcggacttccatcatgccttcgcttactacgacctttttgaccacggcggtgactctcaccagcttcgtcaccgtaactgctgctcagcctccatcgggcggcaagtatcagcctccggagatcatcagccccattgagactcttcctcagtgtgtgcaaaccatcgtcttcgaatgcctccagaacagcccatgtgcccctggtgattactcttgcatctgcaaggacctgaagactcttggattcggtgaccgtgtcaaagcctactgccccaaggaagactatcctgcgtacgagaagttcgagtattgggtgtgcaaccccaagccaccgaagtcttcgtccagcagcagcagctacaagtcttcctctaccatctcaattccaccatgcacactcgagagatgcaaaactcctacgccaacacccactcctattcctcctaagtacaacaccaccactatcgtcattcccaccccggtcggatacaacaccaccaagctcattactcagaccacgactatcaatggcattccaactgttattgttgttcctggaggagcaggcggcggtggcggcggtggcggaggtggcggcggaggtggaggtggaggtgctggcggtgctggaggcaatgccaatgtcaacgtttccaacaacaacagccagagccagagccagaaccagaatgtcaacccagcccctgcgcctgctcctgctccagctccagctccagctccagcgccagctccagcgccagctccagcgccagctccagcgccagctccagcgccagctcctgcccctgctccagctccagctccagctccagctccagctccagcgccagcgccagctcctgctcctgctcctgctcctgctcccgcgccagctccaggaactcctgttgctcccgaggtgcccgcattcactggtggcgctgctcaattcagcagtgttcgcgccgttgcccttgctggagccatgggtctcatgggactcgtcttcgccgagttgtaaatggcctagcaccaactatcaacaaattttcatatccgaatcttgattcgttcattacaatatacaccggggtatcaaggcacggtgaagggtgctccgaagctgtgcacgaaggggaaaaggagagcttagtcatgtagtaatgtctaatcgtggaggcaaaaataaaaccacatcaaaactc

SEQ ID NO: 11627 - DNA, 689 bp, Oryza sativa
  ref <308>: DATABASE ACCESSION NUMBER: AK108975
  ref <309>: DATABASE ENTRY DATE: 2002-08-28
atcagtcatcacacattggcagctaatagtaacaattaatcagtaacgatctcagatcaaaaaatggcgcgcaaggctatcatcgtgttcgctcttgtcgtcgttgctgctttgtgcctcgtcgcctccgcccaagaccctcaggctaacaagcagggtggtggcggaccaccaggctacgggcactacccgccgtggaacggcggttacccagggcgtcccgaccggccgtgggaccgccctgaccggccatgggaccaccgccctcaccctggtcccggtggccactgccgttgggggtgctgcggccaccgcaaccactggggggagtgcctccgctgctgctaagctatatagctccaccactccacagctcaagatcaaccatgtcgatcggtgacacaattacatactatctactatgattaataagtagtaaataataaaggaataaatacacgtacacatacgtgcggctgatctagaaacacacagttatagtactgtgtgcactcctgcaaggctatgtacgtacgtgcgcgtgcgtgtgtgacagtcgtgtcttgttgtatttttcttttttttccttgtatgtgtcgatgtctcgtcagtgtgtggctttgtgatgtaataatatatactccctccgttttgttagttgatgctctagttcattctgaaattgttat

SEQ ID NO: 11628 - DNA, 801 bp, Oryza sativa
  ref <308>: DATABASE ACCESSION NUMBER: AK108976
  ref <309>: DATABASE ENTRY DATE: 2002-08-28
cacacaaacccatcatcaccttcaacctaacgatcgacctgtacgtagaactagctttgtcccaaacccaagtctcgagccccagctagctagaatccatcagctttaatttcctcccaaaaagaggccatctcagcaggcgacatggcggcacgtacgtacctggccgtgttcgctttctgcgccatcttgatgctttctgccgtggcgcgctcggcctcggccagggctttgagagaacgggcgccggaggaggcggccgttgtcgccggccgcgcaggcgtggccggcatgatgaaggtgcccgccgcggcggccggcgaggctgcagggcggaggagcggcggcggcgcggtcgtcgtcgtcggcggcgcggcggcgcacgagtccaagcggcttagccccggagggccggatccccagcaccattgatctctctcagtcgtaggtagtcgtcgcctcgtctgcatcaacacaaattaaggaggtttttttttgtatggtcgtcgatcgcccagtgctgcatgtttcagtgttcgatcttgcggttaattttgtttaccacttctgtttcttcgtcttgatttgtttctgtttttcgctttgtacggcgtgtgttcttgtccatgatcagaccatgtgtagtgtagaactgtagaactcgactaattaatcgttctgcactgtatgttgtcagatagatggacaatatagacgagttcatttcgatgcatatgcatgcatacctgtgaaacaccaccggaagggaataattaatatagtgatttcactttgattttc

SEQ ID NO: 11629 - DNA, 1601 bp, Oryza sativa
  ref <308>: DATABASE ACCESSION NUMBER: AK108977
  ref <309>: DATABASE ENTRY DATE: 2002-08-28
agcgtctctcttcatcctaatcacctcgatcattcgctacgtttttgcttgttcagagcaacgcatcgcatcatgcctcgtccacctgaacctgtgcacgtgctgcttcttgctgccatcgcagtgcaagtgttcgtccggtgcacagcacaagctgcgagtgatcagaagccactagtctccaggctcgccaaggattacaacacctcactctacaccatctccgtcaagaacggcgcgccgccgctcgtcgtcgacctcgccggcgcgctcgtctggtcgacgtgcccgtccacgcactccacggtgccatgccagtccgccgcgtgcgacgcggtcaaccggcagcagcctcgccgctgccggtacgtcgacggcggctggttctgggccggccgcgaaccggggtcgcgctgcgcctgcaccgcccacccgttcaatccggtcaccggcgagtgctccaccggcgatctgacgacattcaccatgtcggcgaacacgaccaacggcaccgacctgctgtacccggagtcgttcaccgccgtcggcgcgtgcgcgccggagcggctgctggcgtcgccgtcgctgccgcaggcggccgccggcgtcgcggggttctccgggacgacgccgctctcgctgccgtcgcagctcgccgcgcagcgccggttcggcagcacgttcgccctgtgcctgccggtgttcgcgacgttcggcgacacgccggtgtacctgcccaactacaacccgtacgggcccttcgactacaccaagatgctccggcgaaccccgttcctgacgaacccgaggaggaacggcggttactacctccccgtaaaacgcatctccgtgtcgtggcgcgggcccggcgacgtcccggtgtccctgcccgccggcgcgctcgacctcaacgcccgcacgggccgcggcggcgtcgtgctcagcaccacgacgccgtacgcgatcatgcgcaccgacgtgttccgcgccttcggcaaggcgttcgacacagtcgtgaccagaggaacggaaagcagaatggcgagggtggccaggcagaagcagttcgagctttgttacggcggcgcaggcgacaccatgttgtcattccctatgatgaagcggacgggcttcgacgcgccggcgatcaccctggagttggacgccggagccacgggtaactggacgatactgaacggcaactacctggtacgcgagacgtgcgttggggtcgtggagatggggccggaaggcatgccggtggacggcgagccggcggtggtgctcggcgggatgcagttggagaacatcctgatggtgttcgatctggacaaacgcacgctcggcttcagcaggctattggaatgggacctgacgaattgttacagcgcaagctttttgtgaggaaataactttatcgtgtctcaggcgttttccaatttccagtgcttgtagtcattgtactcaaacttgagtagtatacattggaacagaataagctgtcacgtaccagccttgatgaatcctgcagggatgaaacttttgttgctgaagctcaaaattcaaaagtaatcgatctaaacttgttcaaaaaaaaaaat

SEQ ID NO: 11630 - DNA, 1042 bp, Oryza sativa
  ref <308>: DATABASE ACCESSION NUMBER: AK108978
  ref <309>: DATABASE ENTRY DATE: 2002-08-28
gaacgaggccttggtggagatgagtgactgcagcggctgcgtgtaccgagcgctcaagaaggtggacccggagatgggcatctccgcgaaggggatggccgtcgtcaactccctcgtccacgacgtgctcgcccgtctcgccgtcgaagcgggcaggctggcgcgctacaacgcccggaagaccgtgacggcgcgccacatccagaccgccgtgcgactgctcctgccgctcgggttggataagggcgcggtggtggctggaacggaggcggtcgaggcgcacaggagcaagaaggtgggtaaggcagctgctactgccgctgctgatgctgaagaagacgaagaagaagccgaagaggaggaggcaggcggagctgaggccggagttgaagccgaggaaccgacggcgcaggccagcctggcgttccccctcgcgcgaatgaagcgcgccatcaaggacaagacgaaaatgctcgtaggggcagaggccatggtgtacctcgccgccgtgatggagtactgcgtcgggctcgtcctgcgtccggcgtgtgagtgcgcgcgcgcgcagtccatgctgcgcatcacgccgcgccacgtgcagctgtccatccgcaacgacaagtctcttggccgctttttcgccgacgccgtcgcgccgcccaccctgccaacgggcctcgcgggcgccggtgcattgcccggcttgccatcgctgctgcccagtttccatgtcccgcccgccgcggcagcggtgcccaccgaagcccaggcgcccgtcgcggaggcggtgccgggcctgcgcagggcgctggcagctgcgggcatggagcggtgcgacgagagcagcgcgttctttgccaacccgtcgcaggctgcgctgccggcgctggccgccgccgtggctgcgttcgagatcagccaagacatcgacgaactcaaagacaccctcacccacaccctccgccacttctcgacgtcgtagcactgtggaacacttggccagagaggtgaaaaaacgcgaacatggcggcttttttatgat

SEQ ID NO: 11631 - DNA, 1318 bp, Oryza sativa
  ref <308>: DATABASE ACCESSION NUMBER: AK108979
  ref <309>: DATABASE ENTRY DATE: 2002-08-28
ggtgttgcgtctctaccactcattctttgtttcgtcttcgaatccaaccacttccatcgttaccgactgatataacaacgacttgctcgttgagtcacaatgcagtgggctactcttatcgccgctgcggcgttcgcgcagaatgctgctgctcagaacatgttgcgatttgcttgctcgcagctcgtcgttgagcgaacggatccccttgtcaatcctggcatgaagtacacacctcatctccaccagattgttggaggagatgccttcaatgtcaccatggacccggccacggatttggcgcagacttcgaaatgcactagttgcagtttcgtccaagacaagtccaactattggacagcagtgatgttcttcaaggcgaagaacggcacttacatccgcgttcctcagatcggcaacggaggcccacaaggcaagctcatcaacgacggcggtctcgacgtctactacatccctagcggcaagacgaccgccttcaagaagggattccgcatgctcgtcggctcagccaccaacaccgacaacagcaaggtcaagctcgccaacatctgccatcgatgctggacctctccttctgagagcactttcgtcggcggcgcaccctgcactggcagtgacactgtagccatccccaaggaccccaagtgcaagctcattcgtcagactttgatcttccccacatgttggaacggcaaagacctcgactcccccgaccaccaatcccacgtcgcctacggccaaggctctggcgcaaacggcggcggcgcctgtccgtccacacaccccgtcaagcttccccaaaccatgtacgagctcatgtgggacgtgtccaagttcgccgacaaatcgctctggcccaccgacggctccgaccccttcgtttacagcatgaacattggcggctccgcggcccatggcgactacgtctttggctgggagggcgacagtctgcaaaaggccatggacaaccagtgcaatctgaataatgcgtgccccaaggccgggttgaccacccagcagcctgcgcagtacaatgcgtgtaagaagaagcagcaggcgccggaggaggttgatggatggctcaaggagatgccggtcgggaacatggctatcaaggcataagctccttcgtcaattcttccgcttcgagcttaatgggatctatcctctattgtggcagtctcaagttttagggcatgcaaagctgtcattcgttgtttgagcattctgtggtgattgtttatctagatagtgagcgcgccgtatatgcaaattgtattatcgaaaattgagacac

SEQ ID NO: 11632 - DNA, 963 bp, Oryza sativa
  ref <308>: DATABASE ACCESSION NUMBER: AK108980
  ref <309>: DATABASE ENTRY DATE: 2002-08-28
atcacagtgcaagacacttgattcgttctttcaaatcatttcacttccattcgcttcgcttctttaggttcttcatcatggtcaaggccgtcgcacttctcgccttgctggcgcctcttggtgcgaacgcacactacatcttcaaccgcctcatcgtcaacggacagtccgtcggtggcgaatatgcctacactcgcaagaacagcaactcgtacaacccagccttcacgaacgacatcgtgaacagcaacgaccttcgctgcaacaagggcgctcagccaggcaataccccaacttacactgtcaaggctggtgacacaatcggcttcaagctcttcaacaacgaattcatcgagcaccccggcccaggtttcgtatacgtctccaaggcgcccggcgacgtcaagtcctacgacggatccggagactggaccaaggtcatgcagagcggtctcaacaaccccagcacgccaggcgtcgacacagcctgggccagctggcagaaggacaggctcgagtggaagatccagcagagcatccccgctggcgagtacctcgtccgcgttgagcacattggtctccacgagggccacgtcggcaaggcacagttctacatcgagtgcttccagctcaagatcgagtccagcggaactggaaagcttagccccaccgtcaagttccccggtgcttacaagaccaacgaccccggcattgcattcaacaagtggaacaaccctaaaagctacaccttccccggtcccgctgtctggagcggttaattgttccgattcttgtggtgtggtggcgtcatggcggtggtggcggcagtggtggtgatggtgcggtgaagggcgcggagcttttccaccctcaacattctcgcagtgcctctttggcaggcacgcaacaacttctcttcgtagtatctattccaaatacaactagcattggcctgggcccaag

SEQ ID NO: 11633 - DNA, 884 bp, Oryza sativa
  ref <308>: DATABASE ACCESSION NUMBER: AK108981
  ref <309>: DATABASE ENTRY DATE: 2002-08-28
attggagagtcatacatctcaagcttgcttcagatttcgatcagcttcagtcttcagacaacagagaggttggttcacaaagtttctgtaagtaaagcattcattcagatcatgaagaggtttgcattcgaggacagcgatatggcgcgcgtgctgatgctcatgtcgtcgcacgggcagcaggagcaggcgctggctctgccggtgccggtgcagctgccgctcgccgccgcgcgcggcgaccgcgccccggagcgcgcgttcgtctgcaagacgtgcaaccgcgtgttcccgtcgttccaggcgctcggcggccaccgtgccagccacaagaagccgaggctcgacggcgacggcgacctctccctgtccaagcccaagctccacggctgctccatctgcggcctcgagttcgccattggccaggctctcggcggccacatgaggcgccaccgcgccatgaccggcggcatgccgcgggcgatcgtcgtcgacaagaagcccgacgtcgtcgacgtccacgtccacggccacgacgacgacggcggcatcaagcgcggcggcctgtggctcgacctgaaccatccaccctgcgacgacgccggcgacgacgacgccgagtgcggccacaatgccgccggcgccggcatcacgttccaccagttcttggataccggagccatggccgttgactgcgtcggctactagctctctttgccggatttttgccggatactacaatacttatatgcaccgattaatcttggtgcaatttctcttttaccttttctttttcttttcatttcttcttcttcttgttgagaaatccacattttgtagcggtagaatatattagttcctaatacaacagagcatggcacacg

SEQ ID NO: 11634 - DNA, 1052 bp, Oryza sativa
  ref <308>: DATABASE ACCESSION NUMBER: AK108982
  ref <309>: DATABASE ENTRY DATE: 2002-08-28
ccatttcgcctgccctctcccccgtcgccgacgacgccgagcccgcatcgccggtcccggaagccgctgtcgagacctccacagctgtgtgcacctccaccgacgtgacacaacatccagcagtgtccgtcggtgctggtaccgcagacgtggacgatgtctcgacagatgttgcctcccgcactggccctgtacctgcagttgagtctgcttttggcggcctcttcgacaatgctctcgacctgccgtcgacctttgacgctgatagctggggcgctgaagcacaatttagcccttcgtccgaccccctcaattttgagtaccatcatatggatgatcacgctcccgccgggctttcggacttcgacttttcacaattccttagtgacgatgtcagcggccctcaaggcgcaacggccggccaccactcgagcatccaagaccccgaatcctctttcgtcctcgccgaccctgagaatcaagtctcttcagaaacttttaaccagcagccccatcttggcgcgtcctcttttggatgcgacgatggagttattgcggttggtaactgagggacacgatgaccgggtcgaggggctggcagacggatccccgggtatcaagggtgatcgaggccgtggcccgctattgtggccagacggcgccagcttaccgtcacgcgaggttttgctcacactcatgtgggccatccgagtcgaagaacggaacatgaaggctaggagggaggcgaaaatatccccccagccggcccccacgaggaggcccgtgtcaaacgtcccccaggacaacaagtcaaccaaccagaactatatactgtcggtggcgagcaaaaagaggaagagagataccaacaccactagtaataagcgcctacggcccggctactaggtgtgttgctgatttggggatgagaagggccatgatttagcgggcgtcgggttactccagtatcatcacacagcctgggctggtgtggtatggctttgtataactaccacaacttgatgtgtcacgaatacaacgttttgaacaac

SEQ ID NO: 11635 - DNA, 1040 bp, Oryza sativa
  ref <308>: DATABASE ACCESSION NUMBER: AK108983
  ref <309>: DATABASE ENTRY DATE: 2002-08-28
atcacagctgcagcaacgtacgcgtactgtctagttagctagcttcttagcttcgaaccttcgatctctcgatcacaggctaatcaagcttagcttgatggcaacttggtccaatgcgtcgtctctgatcgtcgccgccgtaattctgcttggcctcagctcggcaagcgtcgcgcatggccgccgcggcaggaggagcttcgtctccagctacgacgagccgtgcatggagatgaggctgtacctccacgacatcatctacgactacagtaacagcacctccaactccacgtcggcggcggccaccaagccgacgccgctgagcaccgccgtgtccaaccccggctacttcttcggcgagatggtggtgttcaacgaccccatgacggaggggagggcgctgccgccgtcgccggcgatggaggaggagacggcagtgcgcgcgcagggggtctacctctacgacaagaaggaggcgcccaacgcgtggttcgccttctccgtggtgttcaactccacggggcgccgcggcacgctcaacctgatgggcgccgacctcatgtcggagaagacgagggacctctccgtcgtgggtggcaccggcgacttcttcatgtcccgcggcgtcgccacgctcagcaccgacgaggcctcggcggacttgtcatacttccgggtgaaggtggacatcaagctctacgaatgctacgtctgatcccatgcatacgtacgcttgctctttcatggccgtggatcggatcatcgcgtgtcctaaatatgcgcttgtatttgtgtgattgtgtgtgttgaatttccttcttgacattcatcatctttgcgtgacgagtcatatgcacggagaaatgtgcaaaatgtgttttttttttcgtgttttggatttgcatctcatgtattgtttgagtgacgagtcagcgatcggcttggcgtggtggtttgttttgtctttctttttcctggttataatcttcatagttataatcttataattttttttctacatcaatataaaatcttgtatt

SEQ ID NO: 11636 - DNA, 913 bp, Oryza sativa
  ref <308>: DATABASE ACCESSION NUMBER: AK108984
  ref <309>: DATABASE ENTRY DATE: 2002-08-28
atccacgcactctgacggcacgccgttgacgaccagtgcaccgtccacgtccctcctccaggcggagatcctcagcccagacacggactccaggacaggcgccaccgccaccatctgctgccggtggcgcggcggtgccacgtccgcggcgcgcaggcggcgagggacggcggagaagccgagcacacgggagacgacggcgtaggtggcgtcatcatcggcgccattcccgttggtagcgctgtcgttggggcgttgcagcttgaggacgcggcgaaacgactccggcgagggcacgaagacggtgaaggcgaggttcttggggagcatggacaccatcatgtcgccgaactcccccaggctcgccgtcatgtcgtcgcagttgacagatggtggtggcgaggaagacgaggatcttcgtcctgatgacacgacgctgctgtcccgcaacgacggtggcgacgaggagggagctgaggtggagaggagaacgaggacgaggaagaggagcgtcgctgcgaaggcgccaccggcgacgccggcatggaggtgtcgttgccatagcagccgtggcctgaccaagaaaagtctcttccttctcttcggcagcatattcatcagtgtgtgtcctcgctacctgttgatttgctggtcaggttattggcacgaggagatcacgggaggggtcgaggcagccgcccggcgatgtgggcgcaggagcacagccgcacatgacggatccggctaccttgcctccaggggcggcccaggtttttcaacttggctattcgaaattgtaaaagatagaaaaatttttccaacccaagatctaatagttgtataatatgtaacggtataaacatgatttcataaagtcataaatggatagaattgaccataaattgaatgcgtt

SEQ ID NO: 11637 - DNA, 1199 bp, Oryza sativa
  ref <308>: DATABASE ACCESSION NUMBER: AK108985
  ref <309>: DATABASE ENTRY DATE: 2002-08-28
aagacagtgcagacgccgaccacctcctcctctctagcttctccgacgacgcactccggcgatcgagcggccggcaaggaagaagaagaagagagagcaggttggagaggtcgtccatggcgtggaaggacagctacttggacctcgtgctgatcccggcggggatcgtgttcccgatcgtctaccacgtctggctgtggcacgtcgtccgccgccgcccgctctcctcccccgtcggcattaacaccgccacccgccgcctctgggtcttgggcatgatgaaggacaacgagaagaaggcggtgctggtggtgcagtcgatgaggaacgtgataatggggtcgacgctgatggcgacgacggccatcctcttctgcaccggcgtcgccgccatcctcagcagcacgtacaccgtcaagaagccgctcagcgacgccgtgttcggcgcccacggcgagtacatgatggcgctcaagtacgtcaccctcctcctcgccttcctcctctccttcctctcccacaccaccgccatctgcaccctcaaccaggccaccttcctcctcaacaccctctcttcctcctcctccttcgccgccgacatcgccgggctgccggtgaccaaggactacgtcgccgacgtgctcgagagaggattcctcctcaacctcgtcggaaaccggctgttctacgccggcgtgccgcttctcctgtggatcttcggcccggtcttggcttgcctctgctccgtcgtcatgatcccgatactgcacagcatcgacgtggtttacgtcgatgggagcagcaagggcgaggccaacgccagagtggagatggtgtacgagagcgatgagagcgtcatgcaagtttgaccaatttcggacacgagtcggactctataacctgcctaccctcacggagaatatgtggtggtgctctcgtctcgtccttcaaactcgatcttgaagaaaaatgcgggcaattcttgatccaacagtgactgcacctgtgttgtgtgtgtcatgtttgtggcttggattgttttgagtattcttattcaagacatgtttagcatggcacggccgggagagtacttggtgctgtaacagagactcactgatcggtcaactgttaacgcacagcaatgtactggttacaactgctgtaatctgtcagaataagatgttctcccccattgattc

SEQ ID NO: 11638 - DNA, 853 bp, Oryza sativa
  ref <308>: DATABASE ACCESSION NUMBER: AK108986
  ref <309>: DATABASE ENTRY DATE: 2002-08-28
catttttggtaagcagaactggcgatgcgggatgaaccggaagcctggttacggtgccgaactgcgcgctaacctagaacccacaaagggtgttggtcgattaagacagcaggacggtggtcatggaagtcgaaatccgctaaggagtgtgtaacaactcacctgccgaatcaactagccccgaaaatggatggcgctgaagcgcgcgacccacaccaggccatctgggcgagcgccatgccccgatgagtaggagggcgcggcggccgccgcaaaacccggggcgcgagcccgggcggagcggccgtcggtgcagatcttggtggtagtagcaaatattcaaaccatcgaaatgcatcacgaacaaatgcaagaagctgtccctggagacaacattggtttcaactgcaagaacatctccgtcaaggacgtcagaagaggtttcgtttgcggtgacgcaaagaacgatccaccaaagggatgcgctgacttcaatgcacaagtcatcgtccttaaccaccctggtcaaatcgcacaaggatactgcccagtcttggattgccacacctcccacattgcatgcaagttctccgaactcgtctccttgatcgacaagagaactggtaaggcaactgaagaaaacccaaaggctatcaagaacggtcaagcagctattgtcaagctcgttccatccaagccactgtgtgttgaaaccttcactgactacccacctcttggcagattcgcagtccgcgacatgagacaaactgttgcagttggtgtcatcaaatcagtcaccaagaaggaaaagtaagctcctgaacgcttataaaattttgtgttttacttccag

SEQ ID NO: 11639 - DNA, 1026 bp, Oryza sativa
  ref <308>: DATABASE ACCESSION NUMBER: AK108987
  ref <309>: DATABASE ENTRY DATE: 2002-08-28
ttgcggctgcctccacctcgatcgatccatcgcacactaactaacagagctaagatacgacgatgatgatgagtagccgcagcagcgtcagcctcggcgtgctgctcctgctggccgtgatcctctccgccggcgccgccgacccggacatcctcaccgacttcgtcgtgcccagcgacaccgacccatccgggatcgacggcgccttcttcacctacaagaacctcgtcaccggcaactccggcgacccggccaagctcaccgtcaccaaggccactcacgccgagttcccggcgctgcttggccagtccgtgtcctacgccgccctcgtcttcggcgccggcaccgtcaacccgccgcacatccaccccagggcgtcggagctgctggtggtcgtgcagggcccgctgctggtggggctcgtcgacgccgcccgcaacggcaccgtgtacacgcagacgctgcagaccggcgacatgttcgtgttccccaagggcatggtgcacttccagttcaacaatggcaccgacgtcgtcgcccgcgccttctccgccttcggcagcgccacccccggcaccatctccctccccgccgcgctcttcggcagcggcatcgacgacaccatcctcgacaagtccatgcacaccgaccaggccaccgtcgaccagctcaagcaagaccaggcgccgccttcgccgaggccctcgccggggtcctcctcctccgccgccgcggctttgctgccgtcgcgctgggccatcaccctgctgctttgcttcgcagcctcctactacttttacttctagtgagttgtgagcgaacctgaacctggagctcatggctgttgtgtgttttcatcaaaccatcgtcaccttcgatctgttggttgcaaataaaatgaaatgaatgtttaattttggcatgttttctgaaatccgaatcatgccttaattcctgctgtaatgtttatgcaatattgtaatgtaagtgctctccaaaataaacgatcgagtactgcttaatttc

SEQ ID NO: 11640 - DNA, 1312 bp, Oryza sativa
  ref <308>: DATABASE ACCESSION NUMBER: AK108988
  ref <309>: DATABASE ENTRY DATE: 2002-08-28
gctgaacagtagtactacagagtctcactcacggcgttggacatggagactggagcggcgggacaggccggcggcggaggaccggcggcggcggcggcggcgggggagtactggagcgaggcgctcaagtcgttcctggaccatatccccgtctcgtccgtcaacggcgcgatccagccctctccctccccagcgctggagatcaggctcgatggctccgtgccggacgccatcgactccatgtaccgcagcgatgtcgccggcgcggtgatcgtcgacgatgtgcggactagtttcggcaagttcgtcgatcgcgacataggattcgtcgagttcccaagcctcgtcttgtgggcgattgaggaatttgacaaactgggaagtggagcaggtgacaaaaactccgacttcctgacaagtctaaaacagcatcctcagattgcagaaacaaagattgcctggttagcaaagtcgttcctatgggagccattcttccccgttcgatcccatgatacactcttccatgcaatgcttctcttctcaaagcaccgcaggatcaatgtggtacctgttgttgagttgatgaactccagtgttattggatttgtaacgcagaatgcagtaatggaattgcttctcagttcaagtggtcttgagtggctcgataaaattgcagacaaacaactttctgaatttaggttcgcaaatacgaccaagcctgtttcagtctactcggatcagactctcgctgatgcattgcatattctttcaaaggagaaaataggagttgcagttgttgacaggaaaaccagttgtctgattggatcaatacagtgcagcgatctttatcagcttctggacgatagctccctatttaggaacaggaagacattaagtgcggaagaattcgtcaaactgaagagcaaggatgaggacatcagcacagaaaattcatcagcttctggtggccaaaatgtcctcagcctcagaacagggcagaggataacagcaggcctgcctgttaccaaccgcaagtctgacaccctgaagcaagcaatggagaagctgacagcgtcaagaagcagctgcagcttcatcgtcgacgagcacgggcgagtcgaaggagtagtcacggcaagggacatcatctccgtcttctccccgccatgcatggactcgaggatcgacggaggcaccttcttctcggctgcgcttgcgcagaccggctgccgcgttgagcatgggcagatgattcagaactcatagtttctacctcatcatctaaaacaatgtttacagttttgttgcctgc

SEQ ID NO: 11641 - DNA, 1351 bp, Oryza sativa
  ref <308>: DATABASE ACCESSION NUMBER: AK108989
  ref <309>: DATABASE ENTRY DATE: 2002-08-28
agccacaagtatagctaatcaagctagctaagctaagctaagttagtatagcgtgatacctcttgtgaaggtagagagatcaatggcggcgacattgcgttggggcggcggcgggctcgcggtggcggcgtttgcggcggtggtcgcgttgtccggcctcctcggcgtcgcggcgaactacggcggcggcggcgggttcttgttcccgcagttctatcagcacacgtgcccgcagatggaggcggtggtgggcggcatcgtggcgagggcgcacgccgaggacccgcgcatggcggcgtcgctgctgcggatgcacttccacgactgcttcgtgcaggggtgcgacgcgtcggtgctgctcgacgccgacggcagcgggcggttcgccacggagaagcggtccaaccccaaccgcgactcgctgcgcgggtacgaggtgatcgacgagatcaaggccgccctggagcacgcgtgcccgcgcaccgtctcctgcgccgacatcgtcgccgtcgccgccagggactccaccgcgctcaccggcgggccgtggtgggaggtgcccctcggcaggcgggactcgctgacggccagcctgagcggctccaacaacctcatcccggcgcccaacgacacgctccccaccatcgtcggcaagttccgcaaccagggcctcgacgtcgtcgacctcgtcgcgctctccggcggccacaccatcggcaactcccggtgcgtcagcttccgccagaggctgtacggccagctgaacagcgacgggaagccggacttcaccctgaacccggcgtacgcggcggagctccgggagcggtgcccgagctccggcggcgaccagaacctgttcgcgctggacccggccagccagttccggttcgacaatcagtactaccgcaacatcctcgccatgaacggcctcctcagctccgacgaggtgctcctcaccaagagccgggagacgatggagctcgtccaccgctacgccgccagcaacgagctcttcttcgcgcagttcgccaagtccatggtcaagatgggcagcatctccccgctcaccggccacaacggcgagatcaggatgaactgcaggagggtcaaccacttctagaacccttccacgtacgtacggcgcccacggccgatcgatgtgatgtgatgtgatcctatttgcttctttgtgttttgcatgttgattttatgatttgtgttttgtattttgctttgctttgctgctcgcttaattgtttatattagttttttcatgtgtgtaattcctcctgcaaatgtatcaaggaatggtctaataaaagtccatataccaatttgtttcaaaaaaaag

SEQ ID NO: 11642 - DNA, 1068 bp, Oryza sativa
  ref <308>: DATABASE ACCESSION NUMBER: AK108990
  ref <309>: DATABASE ENTRY DATE: 2002-08-28
caagatcggtactttcggctatggacccctcaatggacctttcaactgggccactcttgctgctgagaacgaggcatgcaaagctggtgcaaaccagtcgcccatcaacattgacgactccgtaaccattatgaccgagaaacccaagatcaatatccccgagcaagaagtcgagttcgagaacctgggcaccacaatcgaagtgatcgtcaacggcaccaccaccgtggctggctcagatttccaactcgtccagttccacatgcacactccctctgagcaccacatcaacggtgaataccaccctctcgaagtccacatggtccaccagggcgtcgccgaccccacccagatcgccgtcgtagccctcatgttccaagtcgcctcaggcgaatcctcttccataatcaaatcgctcgcctcctccgtctccaccatctccacgcctggcaccaaagtcgccatccccggcggtatcgacttcaccgacgtcctcgccaaagtcgaatccagccaaatgctccaatactccggctcgctcactactcccccctgcgccgagggcgtgaccttcatgatcgtaaaggacccgctcgacatctccgtcgcggactttaatgccatcaagagcgtcgtcaagtttaatagtcggtatatccagaacagcttggggcaagtcaatatgctcgaggtgggcaacagggcgggcacggcggaggcgttccctgcgcccccggttgtgcagccgggtgaggcggtggcgaatggcacggagccggttagggccatgactgtgggccagaggtttacggttactgagttacatgggcagccgacggcgattgcggcggttgttgttgctaggaaaaggaagtactaggtgtgttaagggtgtgtggtggggtgaggtgagtgctggcttcgatgttgatattgtactattgtgattgacatagagaggtggtggatgcagagttgggatggagatgattgatgtgcgaggagataccatagacggcgtgtgacgaatgcagtatacatctagaatttacccgttacctttttgtt

SEQ ID NO: 11643 - DNA, 1593 bp, Oryza sativa
  ref <308>: DATABASE ACCESSION NUMBER: AK108991
  ref <309>: DATABASE ENTRY DATE: 2002-08-28
acgtagcagtagctactactcgatcgatctatcgatccgattaatagtgccatgaaatatctctccatttgtggcagtaaattaagtactagctaagttagctaatgacactgttggtacttaaaggcttaaaagctagcagctgttgagctagctgtctcatgaagctagcttaattaagtctgatttatatatatatatatatgtagacatccagagagagagagagagagagagagagagagccagagacaagcttagcaacaacaaccaaaagcaaggagcactaactgcagctgttggcgatcgaattaaggatcctgcagctacaagcaagaaggtgcaggtgcagggtgcggccatggcgaactaccaccaccaggagtactaccagatggcggcggcggcagcggtggcgtggccgagggagccggacagcccgcagctgagcatcatgagcggctgcagctccctcttctccatctccaccctgagggacgacgacgacggcggcggcgtccgcctcgccggcgccgcgctgcccgccacgccggtgtcgctcgccgggatcgccggcggcgccagtacccccggcggcgacggggtggacatggaggtgcggcagcagagcggcggcagcggcgacgaccggaggaccatccggatgatgaggaaccgggagtccgcgcttcgctccagggcgcgcaagagggcgtacgttgaagagctagagaaagaggttcgccggctggtggatgacaacttgaatctcaagaagcagtgcaaagagctgaaacaagaggttgctgcactggtgatgcctacaaagagctcactgcgacgaacttcatcaactcaattctgaaggtcgaccaaaacaagcaagattatctgacgatacaaaatcattagaaagatctaaattatgtgtatttgcaatccggtgtgcgtttgtgcaggggtcaggcatgagagaggatattgtgtgtaggtgatcgatggatgctatgaactacctctgcagttagaaatgtgttagatcttgtctctgcaaagatgaacaccttttcttacttgttcaactcgatcagcatgcagtatcctgttcaatttttttccccttcagccattcagaaattcagaagtggctatcatgctttaattttgtttcaatcagtagtagtatttgttatctttgagggacagatgggcttgtctcttgtcagcattcaccttagctttacctcttactagtatattttatcactgagtgcgtttatgctcatagggcatatatatcttatgttggatataagtttttttttttttgtcttgtttagttaaactgaagatgcatggccgactgaacatgagaaaaatatcatttcgtttggaatgtcatggaaagcactttctgaatggctaacaggatataataaatatcagctctcacctttgtccactattgatagaaaaggaaaggcaagaagattgccttaattaacctaattgtcatcaaatcaaagtggccggcttatcgagaacctagctttgtctagaaactttgccttgaaatgaattgaaaaatcatgc

SEQ ID NO: 11644 - DNA, 1458 bp, Oryza sativa
  ref <308>: DATABASE ACCESSION NUMBER: AK108992
  ref <309>: DATABASE ENTRY DATE: 2002-08-28
atcgacaacaccagacacactcattcacctcacagtcgtcgtcgacatgaagggtcttttcgctaccgcctttttggccactggcgctttcgcgctcccatctcctgtggagaatggtcccatcactgcccgcgcggcagctgcttgcgctactcccgtcaccatctctggcaaccccttcgcttcccgctccatctaccctaacaagttctactcttctgaggttgtttcggctgctgctgccatgaccgatactgcccttgctgccaaggccaagaaggtcgctgacattggtactttcctgtggatcgatactcgatccaagatcgacgttgttgaggatggtatcaaggacgttgcttgcgatcagatcgccgcccttgtcatctacgatcttcccggtcgtgactgcgccgccaaagcctccaacggtgagcttgccgttggtgagatcaacgtctacaagaccgagtacattgaccccatcgttgccatcttcaagaagtaccccaacgtggccattgctctggtcatcgagcccgattcgctccctaacttggtcaccaacatcgacctccagacctgcaaggactctgccgatggttacaaggagggtgtcgcctatgccctcaagtcgctcaacttgcccaacatcgccatgtacatcgatgctggtcacggtggatggctcggctggaacgacaacctgaagcccggtgccaagggtcttgctgatgtctacaagctcgctggcagcccctcaggtgtccacggtgttgccaccaacgttgctggctggaactcctacgacctctcccctggagagttctccaaggccaccgatgctcagtggaacaaggcccagaacgagaaggagtacgtcgccctcttctctcccgagctcaagtctgctggtatgcccggccaggccatcatcgacactgcccgtaacggtgtcactggtctccgccaggagtggggcaactggtgcaacatcaacggtgctggtttcggtgtccgcccaactggctccactggcaactcgctcgtcgatgccttcgtctgggtcaagcccggtggtgagtctgacggtacctccgacacctctgccaagcgctacgactccttctgcggaaagagcgagtccttcaagccctcgcccgaggccggtcagtggaaccaggcttacttcgagatgctcgtcaagaacgccaacccccctctataaattcttcaatagagcggctaggcgtgtagtgtcttggggccacagacatgtacagacttcccaagtcgcacacacatttcttgtatatagatcaatgacttgatggagtgtctgtaagaggacgacgacgtggaatgaggcgaatgagaggtgttcgatcaggcaaaattctcgcttcacttcgctgtctatagtatataactcaagaatggcatctctcgtttgtcttt

SEQ ID NO: 11645 - DNA, 1531 bp, Oryza sativa
  ref <308>: DATABASE ACCESSION NUMBER: AK108993
  ref <309>: DATABASE ENTRY DATE: 2002-08-28
acagcggtcaacacctccaccaccactaccacaacaacactgccatgagataatacgacaaaccatgagcttcaactacgaccgctacgaccgccgcaacaactcgtccagccgcagcaggaacacgctcggatactgggtacctcttaccctgactgttgttgttgcgacagctgggcttgcagcttgggtgtggtcgccgcgtgaagaccacgaagatgcctcgtccgacgacgacctgagctatggcgaggacagcagcagagagaaaacgcatgggaaggcgcctattgggccccagggcacgggttcgcgcgatgctatgtcgacaggcgttgtgagggaaaacgagcaggactttgtgtcgcgcgctcagggcatcatccgccgaacacccagtcctcagcagctgttcgataccgtcagcaagaagacggctgcaggttgggccgctgccggagctgctgcgggcgcggcgctggcgagcattcgcgaggaagacaaagacgactacggcgaccacaacagatggagcgaggaggccaccatacggcgcaacgtcgaggcccagtcctcgcagagtgcagctgccgttgcgacacagtccaagtcgttcgcggcgtcgatcaagaaccctcccacaggcggcaagcggaagacggttgttttggttgtctcagccgagtcgctcatggacagcccgcacgacgacgatgcctcctaccgctcagaaaatgccaccatcctgtcgcacctccctgataccgacttcaacaacaccaagctctttgtcctcatctactctccaaatcaacgctcgcgcccacagtcacgcgccggcacctcttccctcggcgactcgtactcggccatctcaacgccagcacgcacaccaggcgaggagctccaatccatcgacccccagcccgaagagcgcaccgtctacacacccgctctctccgctcgcagctcagacaacgtcctctggaacaccctccacgcccaggctctgcgcctcgtcgagaacccatccatggtcatgcccttcagccaagcaagcggcttcgtccacatgctgcgacacatcggccccgacctcgtctacgtcgtcgatgccctcagcggcatgagcggcagcaacattgaggatatcaagcgctgggtcggccagaccatcgttgtggttggtagcgacggcaccggcctgggcggtctcgtcgacacagacgacgagggccacagcggcaagggcaagtcgactgaacactctgacaccaagtggtgggagaaggcggatatggttggactcggtaagggtgttgaggtcgttgacgcgtcgagactcacagatgactatgagaggcgagttggtggccgggagtaaggagctgatgtgaggggaatggaattacagagctgcggatgacatgatttacctcttacccttgtctattcttctcgcagtacactatgtatgtaacgattgctttaagatacctgttcaaactcaatgtcacctgcaattgtgtcc

SEQ ID NO: 11646 - DNA, 1364 bp, Oryza sativa
  ref <308>: DATABASE ACCESSION NUMBER: AK108994
  ref <309>: DATABASE ENTRY DATE: 2002-08-28
gcattgcagagttcagtgtaacaaagacactgaagctacagcctacagagagagagtgtctggatacttaattgtgtgcttagcttgcggttaagcaatggcttattccaggcaaatcttcgtctgctctgccatggctgcgttgctcttctctgctgttgtttcggcgcagctctccactgatttctacgacgagacatgccccgacgcgctcgacatcatcgaatctgccgtcagagacgccgtttccaaggagtctcgcatgggagcttcgctgctgcgcctccatttccacgactgctttgtcaatgggtgtgacgggtcagtgctgctcgacgacacggcggccatcaccggcgagaagaacgcgaagccgaacaagaactccctccgcggcttcgaggtcgtcgacgacatcaagtcgcagctcgaggacgcctgcgagcaggtcgtctcctgcgccgacatcctcgccgtcgccgcccgcgactccgtcgtcgccctgggcgggccgacgtgggacgtcgagctgggccggcgagacgggacgacggcgagcctggacgcggcgaacaacgacctcccgccgccgacgtccgacctcgccgacctgatcaagtccttctccgacaagggcctgacggcgagcgacatgatcgcgctgtcgggcgcgcacaccatcgggcaagccaggtgcaccaactttcgcggccgcctctacaacgagaccaacctcgacgccaccctcgccacctcgctgaagccgagttgccccaaccccaccggcggcgacgacaacacggcgccgctcgacccggccacctcctacgtgttcgacaacttctactacaggaacctcctgaggaacaagggccttctgcactcggaccagcagctgttcagcggcggttccgccgacgcgcagaccaccgcctacgccaccgacatggccggcttcttcgacgacttccgtggcgccatggtgaagatgggcggcatcggcgtcgtcaccggctccggtggccaggtcagggttaactgcaggaaggtcaattaaagtggttgataccgtgatcagtgttaatgtggttggttagtgtcaggtttcttaataccgtgatcagtgttaatgtggtttgtacaagtgttcttctttccttcagcgatgtagtctgcttcgaacggttgtagcactactatacgcaaaaataatctgatgaaggaacaaagactggttcctactgaaaaatcgtgttgcacaagaccttgttttactggaattattatgtttgtaatcaaatagagataactagaaatgagatgacacagttgcatgggaatgggaatcactaattagtactgtc

SEQ ID NO: 11647 - DNA, 1772 bp, Oryza sativa
  ref <308>: DATABASE ACCESSION NUMBER: AK108995
  ref <309>: DATABASE ENTRY DATE: 2002-08-28
ctccttcatcacccaacccaacccatatcatctcccaccatgctcaagagcggtctccagcgctctctgcgcgcctccgtccgccgaccggcgctccgcaaccagttccagcccgtcaggagtcaattcgctcccgcgctcactgctcgctatgcatcgaccgggtctcagaaggaaggctccattgcgagtgtcatcggtgccgttgtagacgtcaagtttgagggcgagcagctccctgctattctcaatgccatcacaactcagaacggcgacaacaagctggttctcgaggtcgcacaacatttgggtgagaacgtcgtccgctgcattgctatggacggtaccgagggtctcgtccgtggcgctaaggccgtcggcactggtgcacccatcaccatccccgtcggacacggtactcttggtcgtatcatgaacgtcactggtgaccccattgacgagcgcggtcccatcaagaccgacaagttcgctcccattcacgccgatcccccggagttcaccgagcagtccacctccgctgaggtgctcgtcactggtatcaaggtcgtcgatcttttggctccctacgcccgtggtggaaagattggtctcttcggaggtgccggtgtcggaaagactgtgttcattcaggagttgatcaacaacatcgccaaggctcacggtggtttctccgtcttcactggtgtcggtgagcgtacccgtgagggtaatgatctgtaccacgaaatgcaggagacttccgtcatccagcttgagggagagtctaaggtcgcccttgtcttcggtcagatgaacgagcccccaggtgcccgtgcccgtgtcgccctcactggtttgaccgtggcagaatacttccgtgaccaggagggacaggatgtcttgctcttcattgacaacattttccgtttcacccaggccggttccgaggtgtctgctcttctcggtcgtatcccttctgccgtcggttaccagcccactttggccgtcgacatgggtgtcatgcaggagcgtatcaccaccacctccaaaggatctattacttccgtccaggccgtatacgtgcccgctgacgatttgactgatcccgctcccgccaccaccttcgcccatttggacgccaccactgtcttgtcccgtggtatctccgagttgggtatctaccctgctgtcgatcctctcgactccaagtcccgtatccttgatccccgtatcattggtcaggaccactacgacaccgccaccaaggtccagcagatcctccaggagtacaagtcgctccaggatatcattgctattttgggtatggacgaattgtcggaagctgataagcttaccgtcgagagggcccgcaagattcagcgtttcctttcccagcctttcgccgtcgcccaggtcttcactggtatcgagggcaagcttgtcgacctcaaggacaccatccgctctttcaaggctatcttgaatggtgagggtgatgacctccccgagggtgccttctacatggtcggtgatatggagtctgctcgcgccaagggtgagaagattcttgctgagctcgagaagtcatagacgccgcgtagagtggtgggtgagatatgaaagatccggccaatgtgtctacggcattttgctggtagttccgctttgtacaaaagatatacctcaaaaccgtggaacttcaggcgggtgcgtggtaggacgtggtatcctgtgtaatctatcttgcatgcaaagagacattttccttgttc

SEQ ID NO: 11648 - DNA, 1074 bp, Oryza sativa
  ref <308>: DATABASE ACCESSION NUMBER: AK108996
  ref <309>: DATABASE ENTRY DATE: 2002-08-28
atcagctcaccagttcttctcatcagacctccttcacctcctcttcacttcctcgcaaaatttcaagttcacctccatcaacttcttttcaaaatgaaggtcagcttcttcactgctctcactgccttcgcggcctctgccatcgccagtcccgtccccgttcccgccaacaatggccccaaggtcatgaacatggcccgctccgccttcgagcgatccagcctggccaagtacgaccgtatggttcgtgatgctgaggtcaagcgtggcaatgccatcaccgactcagtcaactacatcctcgtcctccaaaaggacccatccaacggtgccgatgcctaccaggatgagattgactccgccaacgccaaagaaatccttggaaagcgcggcaacgccatcactgacagcgtcaactacattctcgtccttcagaaggattcttctcagggtgccgacgcctaccaggacgaaattgacgctgccaaccccaaggacgttctcggcaagcgtgccgtcaaccctattaccgactcggtcaactacatccttgtccttcaaaaggactcttccaacggtgccgacgcttaccaagatgagattgatgctgctaacgccaaggagattcttggaaagcgtgccgtcaaccctattaccgattccgtcaactacattcttgttctccagaaggactcatccaacggtgctgatgcctaccaggatgagattgatgccgccaatgctaaggaagttcttggcaagcgcgctgtcaaccccatcactgacagcgtcaactacattcttgtccttcagaaggactcctccaatggcgccgacgcttaccaggacgagattgatgccgccaacgccaaggaaatcctcggttagattaaccctgacatggtgtcactggtcgaactcagactgagaatgatgctagacgcacttggaagtggaggtggggggccagcaaggatgatgagactcagggtatcgcaatagagactggattctttatatgcttggtatacgcagagtgtataacgaaagttacgaaaatctatctcttccacg

SEQ ID NO: 11649 - DNA, 811 bp, Oryza sativa
  ref <308>: DATABASE ACCESSION NUMBER: AK108997
  ref <309>: DATABASE ENTRY DATE: 2002-08-28
ttggccatatatatgttcgatcactcccacacaattctccaaaccaagagcacataacgtatccagggcagagcagcatatcgatcttagaattagctttcagttcacgcgcatcatacaaaaatggtgaccaacatgacccacgatgactacgtctccctctgcctcatggcgctcgcccaggcgggcgtcgggggtcagtggccggcgcagaaacagcagatcgacatggcaccgccggcaccggaacgcgagcttcttcggttccggtgctccgtctgcggcaaggccttcccgtcgcaccaagcgctcggcgggcacaaggccagccaccgcaagccgccgacggccgcgttgcccatgcacgtaatcgacgcgccgccgccgccgtcggccgaggacacagcctcgtcgtcgacgacgacaacaacgtcgggcggcggcaggcacaggtgctcggtttgccaccgtaccttcgcgacggggcaggcgctcggagggcacaagaggtgccattactgggacgggctgtcggtggtgtcggtcacggcttcggcgtcaggttccgggtcgtcgagcgtgaggaactttgacctcaacctgaaaccggtgccggagacggtggccgctggcgtcagaaggtggggagaggaggaggaggtgcagagccctttgccgttcaagaagcgccggctgtcaagcccatcattggagcttaatttatagtagcatcttaattcatcctaattccttactgtccagaaattcattcgtttacttttttttcttgttaaagctatcctttgtgatt

SEQ ID NO: 11650 - DNA, 1245 bp, Oryza sativa
  ref <308>: DATABASE ACCESSION NUMBER: AK108998
  ref <309>: DATABASE ENTRY DATE: 2002-08-28
atcagctccagtacttcagcattgtacagcaacatacttacacaattgtatcgactgcattgacatacagcatcttgaagagtcttagaacagcaacatgggttccattcctaccgagcagtgggcgcaggtcattgagaagactggtggacccgtcgagtacaagaagattccagttcagaagccaggtcctgatgaggttctcgtcaacatcaagtactctggtgtctgtcacactgatttgcatgccgtcaacggcgactggcctctgcccaccaaactacccctcgttggcggccacgaaggcgcaggcgtcgtcatcgcaaaaggcgacctcgtcaccgacgtcgaaatcggcgaccacgccggcgtaaaatggctcaacggctcatgtctcgcctgcgacttctgccaacaagccgacgagcccctgtgccctaagccccagctctccggctacaccgtcgacggcaccttccagcaatactgcatcgccaaagccgcgcacgtcgcccgcatccccaaggagtgtgccttggacgctattgccccgatcctctgcgccggcatcaccgtctacaagggcctgaaggagtccggcgcgaagccaggccaattcgtcgccattgtcggtgcaggcggcggtctcggatcccttgcatgccagtacgccaaagccatgggcctacgcgccatcgccatcgacacgggcgacgagaagaagaagatgtgcaccgagcagctcggcgccgaggcctttgtcgacctctcgacttcaaagaatgtcgtcgccgatgtgcagaaggccacgcctgatggcctgggtccccacgctgtcatcctcgtcgcggtcaacgagaagccgttccagcaggccgcagagtacgtcaggccgaggggaacggtcatttgtattggtcttcccgctggagcatacctcaaggctccggtgtttgagagtgttatcaagatgatccgtattcagggctcgtatgtgggtaaccgcaaggacagctccgaggcgattgacttcttcgcacgggggttgatcaaggcgccgtacaaggtcgttgggttgagcgagttgcagatggtgtatgataagatgcaaaagggagcgattgcgggacgatatgtgttggatatgtcgaagtaaaggatgatacatttcggagggctgggaaggaaatcgttcatggattcatttgactgtacatactgaatgagaatgaaaataaacttctg

SEQ ID NO: 11651 - DNA, 1206 bp, Oryza sativa
  ref <308>: DATABASE ACCESSION NUMBER: AK108999
  ref <309>: DATABASE ENTRY DATE: 2002-08-28
acgccagttagctatctgctcgtccagcacattcaacacgacgttcctttcttttctcactgcggagccggccttccactcttttttactcttcatccttcgatcttatttctgtgctatcctcttcgttggaaacttcctccaccatgaaactcaccctcacgctcctcgctacctcaaccctcgcccagggcttcgccatcggcttcaaactccccaaagatgacgtccccaagcgcgaactctccttcgtgatggccacccccacggacgccgcagccggtctcccgacgccagccacaggcgtgaccgccgctccagcggctccgaccgcgcccccggccgcccctccagcagatggctccgcagcactgcctccagctcccccagcgggttccgtggctcctccatctgcgtgtgcggcacctccgcctccgccgacgggatcgggggctccgctgccgccgtctccccccagtgatgcgccggctccgccctccggagccccacccgcacccacaggtaaatccaacgacgtcgctccgcctccacctccaggaaacgggacggcgacaccgccgcctcctcccgccggtgactgtgctcctcctcctccccctcccgccgcaaacggcaccgcacctcttgcccccgaggcgaagggcaaaggcaaaggaacgggcgtagcgtcggccgccgctgctgccgttaccggagcggcacctccagcgcctgaggctaaggggaaggggaagggaacggatgtagctgcggaggcgaccgctgcgcctgaggcgaagggcaagggtaagggaactggaactggtcttcccactccgcctgcggctactggtgctgctcctcctccaccggcggccagcggtgctgcacctcctgcgcccggtaatgccacggcggctgatgcgaagggcaagaagagcaatcaggctgcggctcagagcgcgggaaaagcgggggctgtgcggaggtcgagggttttgaagatgttctagggagagatggatggtcgtagggatggatagatactttaccaggacacattagattgttgctcttggatggggagaggaaagaggtggtgagtaacggatttcttttgttgattacaatggcagagccagatgcgcagttgatatgcagcacccagcacccctagaaagatagaaatagaaagattctagggac

SEQ ID NO: 11652 - DNA, 2504 bp, Oryza sativa
  ref <308>: DATABASE ACCESSION NUMBER: AK109000
  ref <309>: DATABASE ENTRY DATE: 2002-08-28
atatacttgtaccccgttgctcttgtatgctacgtgcaaggtatcagcagtgccaagacaaaaataaaagcaaaatgaacggagttcaccacaccaacagcaatgtgttccctgaggctcttaagagtctcaaggaggccgatcctgagatatatggcatcattcaggacgagaaagccaggcaatggaagggcattgagctcatcgcctcagaaaacttcacgtcccgccctgtgctggaggcccttggctcatgcatgaccaacaagtacagtgagggtcagccaggcgcgaggtactatggaggcaacgagcacattgacagggcagagctgctgtgcaagaagcgagccttggaggcattcagcctggatccagcagcatggggagtcaatgtgcagccctactctggcagtcctgcaaactttgcagcctacaccgccctgctgcagccgcatgaccgcatcatgggcctggagcggccaagcggtgggcacctgacacacggctactacacaggcaccaaaaagatcagcgccaccagcatcttctttgagagcctgccatacaagctgaacccacagaccggctttgttgactacgataagctggaggagaaggccctggagtacaggcccaagctgatcatctgtggaggcagcgcatacgcacgcgagtgggactacaagcgcttcaggcagattgcagacaaggttggcgcctacctgcttgttgacatggcacacatcagcggcctggtggcggccggagtggtggacagcccgttcgagtatgctgacatcgtgaccacgaccacacacaagagcctgcgaggcccacgcgctggcatgatcttcatgcgcaaggggcccaagcctgcagaccgcctggcaaagggtgagccagaaggcacggagtatgattacgagtccaagatcgactttgcagtgttcccatcgctgcagggcggcccccacaaccaccagatcgcagccctggccgtcgcacttaagcacgccgccagtgaggagttcaaggcctaccagcgccaggtcgtcgccaacagcagagccctcggggaggccctgaagaagcacggccacaagctggtcacagacggcacagacaaccacctgctgctgtgggacctgcggggagagggcatcacaggcgccaagatggagaaggcctgtgatgaggcgcacatcacgctcaacaagaacgcggtggtgggagacgtcagcgcaatgaacccaggcggcgtgcggataggcacacccgccatgacctcccgcggcttgactgaggcagactttgaaaaggtagcagagttcctgcacgaagtgttgcaggttgccaaggaggtgcaggccagccacggcaagctgctcaaggactggattgtgggcatcacaggcaatgccaagctggcagaaattcgcagccgagtggaggcttttgcgagcagcttctccatgccaggctacgcagtggatgacctgcaatgagcagcggcagcagcagcagtgccggtgacagcagcagcagcagctgtgtttggcaccagcctgcccacaccaagccaacatgccggagatggtgtggcagcagcagcagtagcagcaggagctacatcaagttggcagtgttaggctcctgtttgacactaactagaggctaaaacagtgatgctgactcaagcaggggttgtgtgtggcattgacaaacctgtcctgctgcaagttaagctgcagatggtgcaggccgcagcagcgttgggttcttggcagccctgcgcaccgccggctgtggcaaggtattgtaggtagatggctggttcttagtcttggggtgggggatagtctaggttggttgagcatacgggttcctggttgcagctgcagccaagaaccttcacattttgttcactcacaatacagtgggcactccttgcgcctgcagcagacatgccaacacgggttgccggctgtgtgcagcacaccttgcagagaccagcaagcagtgctgcagcatggcgcccggtccatagcatgctgcggggcgggactttcaggtcagtatgtgcgtttggcctttctggctgtccttgttgtgcatgcctctgtgtcctgaattcgccctcttgagtgtggatgtgttgattacagcatttgctgctgatatccgacatgtttctgtgcggccaggcggcttgtttagttctgaggcagttggcagcagcctgtcaacatacgtgaaacacgcacatgcactgcgtgacacacactgttggtgttgcgatcagcagcacattgtacatgtatagcagctgcaaatgctgcgattggtgtggtgccagtgtccataaagacctgcctatggcatgcatgtgcccgtgttgcccaatggtttgtacagctcgtgtacaggctgcagcctgtagtgtgccaacatttacacagtgccgccgtgtttgttcgactggcattgtaaccgtgttgctt

SEQ ID NO: 11653 - DNA, 1304 bp, Oryza sativa
  ref <308>: DATABASE ACCESSION NUMBER: AK109001
  ref <309>: DATABASE ENTRY DATE: 2002-08-28
tcatcgtgatggggatagatcattgcaattgttggtcttcaacgaggaatgcctagtaagcgcgagtcatcagctcgcgttgactacgtccctgccctttgtacacaccgcccgtcgctcctaccgattgaatggtccggtgaagtgttcggatcgcggcgacgggggcggttcgccgcccccgacgtcgcgagaagtccattgaaccttatcatttagaggaaggagaagtcgtaacaaggtttccgtaggtgaacctgcggaaggatcattgcacttgaaaaatccagtgcctccaggcactgagctcgatggcacctttttaagctgcgcgattgatcgtcatttcatccatactttggatgaagcttccaaacaagacatgaagcagatgatttggcatgtgggcagtgtgttgctcatcttgaataaggtcgcacatgtcgagcctgagtacaatcgagttggtcatttcttattccgaaatgccttcgaaaagctgcgctatttaaactcggagcttatcgcttctgtgatagatttcgacaatatcgctgcagcagaggcagagaggcgtattgatgctaaatctgccatcataaaaccgcagcaggctcaggactggactgatttaagccgaatttcatggagcgaggcaatcgtctctgtcttggctgacaacaaggatttcgcagagaaaacgaatggaactgacgaattagcactccatgaaatgattgagcagtacgttgcactaactgggcatgatttggcctttattaagcaatgtttaacttcgactaacatcaataccaagagtcatattcaaacgattgtcaagactttgctgaacggatcgtccttcgctctcttctttccgaactcagaggcgaaattttcagtgaagatcggcttgcttgtttggtattgcgtcattgcaaattctcaagcagctcgcagctttcatatttacttgcaggcattgtacgatcaacttgatgaggacgaagcagagcagttcgagaaagcgatgctagcgtgggaaacttcatccttggatcagtttaaaatttacatccccaattcctaccaaagctatcagctgacggcggaactcgcgatcaacgaacccattactccacaacagtggagcgaacttaaaacacgcagtcaacctttccttgaatttttgaagcaggaggaggaagaagaagaggaagaagaagacgaggaggaagatgaaaattaagagaagttttcttctgtttgttccatccatttaaaataatatcgaatctaatcgc

SEQ ID NO: 11654 - DNA, 1223 bp, Oryza sativa
  ref <308>: DATABASE ACCESSION NUMBER: AK109002
  ref <309>: DATABASE ENTRY DATE: 2002-08-28
ttgaaaagagagtcaaagagtgcttttagagtgctcaaagcaagccatcgctctggatacattagcatgggataacatcataggattccggtcctattgtgttggccttcgggatcggagtaatgattaatagggacagtcgggggcattcgtatttcatagtcagaggtgaaattcttggatttatgaaagacgaacaactgcgaaaagccttcaacaagtctttcattcacttcatacgactacaacttgcccaacaagcctctccagttccaaaccacagaaatgcactgcaacactctctccctcgccgctgtggctctcctcgccagctcggtcaacgcccacggccacgtcgctaaggtcattgccggtggcaaggagtacactggtggtattccccacggtgctccctccgatgctgttggctgggctgctggaaaccaggacaacggcttcgtcgagcccaactccttcggtactgccgatatcatttgccacaagagcgctcgtcccgtcagcaacgccgtcactgtcgctgctggtgatgttgtcaccctgaagtgggacacctggcccgagtctcaccacggtcccgttaccgagtaccttgcccccgtcagcggtgacttctccagcatcaacaagggaagcctccgatggaccaaggtcgccgagaagggcctcgtctctggcagcaaccccggccgctgggcctccggcgagctcatctctgacggtaactcctggaagttcaccgtccccaagaacctcaaggccggtaactacgttctccgacatgagatcatcggtcttcactccgctggccagaccaacggtgcccaggcctacccccagtgcatcaacctcaaggtcactggtagtggctcccaggctcttagcggcggtggtgacttcaccaagttctacacccctaatgacgccggtatcaagttcaacctctacggacagttcagctcttacgatatccccggccctgatgttcagcgcatctaagagcctttcacgacgattacgacaagtggtttctagtctcggactgagtttgggaccaaggagtagggcaatgggcagcccttcactctgatattctttagctgccgccagtcggttcaaattttacacgcagcagagctgtgtgcttcatgtatctacacttatacgaccgtacaaatttacgcatatgaatgcaattcacatat

SEQ ID NO: 11655 - DNA, 1188 bp, Oryza sativa
  ref <308>: DATABASE ACCESSION NUMBER: AK109003
  ref <309>: DATABASE ENTRY DATE: 2002-08-28
aaattattataatctatcaaacgtacaaatattagtactactctcactactactactcaaaacactcgaatcgaagaatgtcgtcgcaagtcgccactccagcaccagcttccgctgctccagctactccagctgcgccagccaagaaggccgccaaaccaaagaccgcgaagccaaaggctgccaagtcgagcgttgctgctgctcacccgaaattcattgagatgatcgtcgagggcatcaagaagttgaacgagagaggaggttcgtcccgacaggccatcctcaagttcatccaggccacgtacaaattggacgccaagcaagcgaacgttcacctcaagctcgcgttgaaacaaggcgtgaagagcggtgcgttgaagcaagcgaagggcaacggtgccagtggctcgttcaaggttggtgaggcgaagaaggccgcgaagccgaaggtcgccaagccaaagaaggccgctgctgctaagcccaagaaggctgctggcgagaagaaggccaagagcgcgaaaccaaagaaggctgcgggagagaagaagccaaagacggccaagccaaagaaggcgagcggagacgataagccaaagaagaacgtcaagaagatcgtgaagccaaaggtgccaaaggtctctgcctcgaagaaagcgatcactgaagctgctgccgcgaaaccagctgccccagccgctgccgctccagctgctgctgcccctgctgccgctgcgccaaagaaggtcaagaaagccgccgctgctaagccaaagaaggccgctggtgagaagaaggccaaggctgccaagccaaagaccgctaagccaaaggccgccaagaagccatcggctgccaagaaagccgctgctgccaagccaaaagccgccgccaagaaggccgttaagccagctgctaaataaatttctttctttttctcatttttttgtataacttgtttaaataattttcgatgtatatattgaattagttcgagaatattattattgaaaataaagttaagcgtttaagttaagattagatattgtattatattattatgtttagcctgacaaagatataccaaaaaattttgttttttgttattttttgatttaatcagtatattcgttttttttcttttatttttaattttgttaaaatgtaaataaagcgttaaaaaat

SEQ ID NO: 11656 - DNA, 1684 bp, Oryza sativa
  ref <308>: DATABASE ACCESSION NUMBER: AK109004
  ref <309>: DATABASE ENTRY DATE: 2002-08-28
aaagcaccacatcactcctgcaattcactcaaaaagaaaaaaaaaactctcctccacacttggtgcagcaagagatggccggcgttgaccgcagccgccggtcgtcgtcgtcgccgccgccgcttccgtggacggtgcgcgtgcagcttgctgcgctctcggccgcgcaccggtccgacggcagcgtgcggcgcctcctcttctacctcggcgacctccacgccgcggccagcccccgtcccgacgcggccggcgtccgctccgtcgacgtcaccatcgacgcctcccgcggcctctgggcgcgcgtgttctgcccgcccacgaacacggcggcggtgaagctcccggtcgtcgtctacttccacggcggcggcttcgtgctcttctccgcggcgtcgcgcccctacgacgcgctctgccgccgcatctcccgcggggtcggagccgtggtggtgtccgtgaactaccgcctcgcccccgagcaccgcttccccgccgcctacgacgacggcctcgccgcgctccgctacctcgacgccaacggcctcgcggaggccgccgccgagctcggcgccgccgtcgacctctcccgctgcttcctcgccggcgacagcgcgggcgggaacatcgtgcaccacgtggcccagcgctgggcggcgtccaccacctcgccgtcgtcgtcgctccggctcgccggcgccgtgctgatatcgcccttcttcggcggcgaggagcggacggaggaggaggtggggctcgacaaggcgagcctctcgctgtcgctggcgaggacggactacttctggcgggagttcctgccggagggcgccacccgggaccacgcggcggcgcgcgtgtgcggcggcgagcgcgtcgagctggcggaggcgttcccgccggcgatggtggtgatcggcgggttcgacctgctcaagggatggcaggcgaggtacgtggcggcgctgcgcgagaaggggaaggcggtgcgggtggtggagtacccggacgccatccatggcttccacgcgttcccggagctcgccgactccggcaagctcgtggaggagatgaagcagttcgtccaggagcatagctccaaccgtatggcttaattatatttgttctttttttaagtgtccaattgatcgaatcacacgcagaattcgacgctatcatgctggcttctgcataatttaggagaaaattttaaatatttacagatacatacccctccgtcaaaaaaaaaaataatcaatcctacctataaacatggatacatgctttaggttcgtaggtaggattttttttcgacagagtagtatgcaatagacttaaataaactagctagtggggttgtatgatttctgtatgtatcaagtaatgaatcatgagagagatactactcctagggcctgtttgggatctttaaattataagaagcagctgtttggtagctagtttttgataatctagaaaagctctgaaacccagcttctccagcttctgattttttagttcatttttcagaatttgtaactacagattctcagaagttgtggactgtttgaggcaacttctagcagaatcagtttttaggaaaaactgcagctggaacaagctcccccaaaacaggccctagactttttccttgtgagttgtgagtttcgtattcgtttttgttttt

SEQ ID NO: 11657 - DNA, 1257 bp, Oryza sativa
  ref <308>: DATABASE ACCESSION NUMBER: AK109005
  ref <309>: DATABASE ENTRY DATE: 2002-08-28
cattcgataatagcgcaactcgcattcttcccgaatcaccactgcttcatcagcatcgcttcgtcttcccattagcttggccaggacgataattgaaagaacaccaccatcataatacaatttctcacggaagaataacccacaacactcgcaatggcgtcaatccagctcaacttcacgctccgcacttcggcaaactgcaaaaccgtccatctccttggttcatgggacggctaccagggacaactcccactctccaaggaccccaagaagtcaggaggctggacaggatgcttcaagttcaacggcgccacactccaacagggccagcgctactggtactactacatcatcgacggctaccacgtctcgcacgacccggcaaaggaccacacaactgagccaaccaccggccgcaagctcaacatcattgacatccccgccgccaagtcgtcgcacgcaaagacctcaagcagcgccgaccgcaaagcttcccgtcgcatctccaccgcgtccgccgcatccgtcgcaaagggccgcgcactcagcccagagcgcatcgtcgcgccagcaccacaacgacccggccagacacgacaagtcatcaacacccagtacgacaagaccacactcgaggagctcaaccgacgcttcgcccaacagaccgtcgaagactcctccgactccgagtacgactccgacgactctggctccgacgtcccatcgctcacgtcccgctccaccaactcaagctcgcccagcagcgtcagctctggcagcagctgctgcacatgcgagcgctttggcatcacgcgctccggcgaccgtgtcaagctcgactgcggaggagcgcgatgcggatactcggacgactctgagagctgctcgtcggaagacgagtacgtgtacgaggagaagacaacacgccgccagggcgtcgtcatccgcgcttaagtgtccggacaacatccatcggctcgaccctcgcgctttgcgaagtgttcgccaaccccattctttctgtgcatattatgattttgtagcgactctttccttttattgttcaatattgcttccgctccttggctagatggtgcgaagtgttgctgctggtatgaaggctgctgggaggaggattggattgcgagccactctttgcgctggctatggacatcacttacttgcccgatgtcagagacgcgacaatgcacgcttatgtagaaacctaatcgatgaattcgcatggctcgtgcgcgg

SEQ ID NO: 11658 - DNA, 1296 bp, Oryza sativa
  ref <308>: DATABASE ACCESSION NUMBER: AK109006
  ref <309>: DATABASE ENTRY DATE: 2002-08-28
tggccggctttttccagccctagtgcacacgcactttgaggcccgagctagcgcaagccgccaatagctgggtggctggtgaattgtctgcgtgtgttgcctgtaaacattcaagatggggtacgtcaaggttgtgaagactagtccatactactctcgctaccaggtcaagtacaggagaaggcgtcagggcaagaccgactaccgcgcccgcctccggctgaccacccaggacaagaacaagtacaacacccacaagtaccgcatggtggtgcgcttcagcaacaaggacatcacctgccaggtggtgtacgcagccattgcaggagacgtggtcgtggcagcagcatacgcacacgagctgtcaaactacggactcaaggttggcctgaacaactactctgccgcgtacgccactgggctgctgctggcgcgccgcgtgctgaccaagtttggccttgctgacacctacaagggctgcgaggagccagacggtgaggactacaacgtggaggcagcagaggaggggccccgccccttctactgcctgctggacgcaggactcaagcgcacaagcacaggcagcaagaccttcggagcactcaagggtgcacttgatggcggcctggacatcccccacaatgagaagcgctttgttggctggaccaaggaggacggcctggaggcggagaccctgaagaagtacatctacggcggccacgtggctgagtacatggaggagatggaggaggaggacccagagaagtacaacaggcactttgccaactaccttgaggaggacctgggcgctgatgacctggaggagctgtacacaaaggttcacgaggccatccgtgagaaccctgtgggcgagaagaagccgcgctccaagcccgctgacgccaagcgctggcagccggccaagctcacctacgaggagcgcaaggagcgcctcaaggcaaagcttgccacactcacggaggcagacgacgagtaaacgcaccagcagcagcaggatgtgtgcagcgggagggtggcggcgcagagctgggtggtgctgcagcgcagcatgcatacggctctgctgcagcagcagtggtgtggtggtggccagacacctgggctgtcttgttgtgtgcttgcacggtcttgggtggtggcagccctgcagccagctgccagcgccagtggtgctgcgtgcccggctgtgtgccaggcagcccttgtcaacttgagcttagcctcgtactggtcttttgcaggatttagtttcagggtctggtaacagccgctgct

SEQ ID NO: 11659 - DNA, 1527 bp, Oryza sativa
  ref <308>: DATABASE ACCESSION NUMBER: AK109007
  ref <309>: DATABASE ENTRY DATE: 2002-08-28
atcccttttgatcgatcggagccatgaggacaaagacgtttgtgttgttcccgtctcttggcgtcggccacctcaaccccatggtggagatggccaagcacctgcgccgccgcggcctcgccgtcgtcgtcgtggtgatcgacccgcccgacaacgacgccacctggccgacgcgacggcgcgcctcgccgcggccaacccgtccatcacgttccgcctcctgccggcgccgcccagcccggacgccgccgcgcacccggccaggcgcgccctcgacgcgctccgcctggccaaccccgtgctccgggagttcctccgctcgctgcccgacgccgccgacgccctcctgctcgacgcgttctgcgtcgacgcgctcgacgtcgcggccgagctcgccatccccgcctacttcttcttcccgacaagcccacgccgagggtctactgcatcgggccactggtcgacgccgccgccggcaagaacggcgagagacacccgtgcctcgcgtggctggacgcgcagccgcgccagagtgtcgtgttcctctgcttcggcagcaagggcgcgttcccggcggcgcagctgaaggacatagctcgtgggctggagaactccggccaccgtttcctgtgggcagtgaggagcccgccggaggagcagagcacatcgccggagcctgacctggagcggctgctgccggcggggttcttggagaggacgaagcatcgcggcatggtggtcaagaactgggcgccacaggcggaggtggtgcggcacgaggcggccggcgcgttcgtgacgcactgcgggtggaactcgacgctggaggcgatcatgtcggcgctgccgatgatttgctggccgctttacacggagcaggcgatgaacagggtgctcatggtggaggagatgaaggtcgccgtggcgctcgacggcggcgaggtgggtggcgcgttggtggcggtggcggcggaggaggtggaggcgaaggtgaggctggtgatggagaccgaggaagggaggaagctcagggagagggtggtggagacgagagacatggcgctggatgccatcaacggaggtgggtcttctgagattgcatttgatgagttcatgagggatttggagaagatgaacagcttggagaacggaggaggacgcagctgctgatcaagcaggatttcaccatgacacgagaactattattgatcatagaaaatattgatccattaaaaacagttgtggcatggtgttcttttacagtaaaagcagttgtctttcggagttaagcaggtgttttggcgaggcgtttgtaaaccccttgttggcctagtggcaattggtcacgcttagcggtggtcggcttggtaatagtgtcttctccagggtattgtgtgaggagttgccaactcgtggtgtcggtatgtttgtttttgtttctcctagttacaatctttccagggttgtgatattgtttttttttttctgctatcaatataaactccgtactgtcttatgcgagtcgtt

SEQ ID NO: 11660 - DNA, 967 bp, Oryza sativa
  ref <308>: DATABASE ACCESSION NUMBER: AK109008
  ref <309>: DATABASE ENTRY DATE: 2002-08-28
aacaagtgtagctaccggcgacgaacagacgcgcgccttcttaatgcaatcaccatcagcgcatgaagcctcttactacgtgctaattaggattattatttgcgactaatctctactcctccttgctaaccatcaatgaatcagtcagtgagtggaggaggtgttgtccggcgggcagaagacgaccttgagctcggctggctggatgcaccgctgcggcgtcacctccacgtccgtcggcgtcgtcctcgtgtccgggcacctcgccttgaacgcctccgcctgccccgccgccatgcacccccccctgcccccgtcgccggggcagtccgcggcgaggtccacggcgcacccgagcgacgggcacagccgcccctgctcgaacccgtgcggcgtcaccgccaccgccacgttgaacccgtccaccaggctcacgctgtactccgccagcccgcccgccccgtgcacgctcacctgcgccaccgtcaccggcggcgcgtcgcccgtgtcgcacctgctgctgccgttgcctctgcagccggtgcgcgccaccacgcgcccggaccacgcccccggcgggaacgcgagggtggcgaggccgtcgccgttgccgtcgaggcgggtggccgcgccggcggcgtcggcgatggcggggaggccggcgttggcggtgacgagcggccagacagggtgggtgcagaggttgtggagggtgaggttggtggtggtggtcggcgtcgccgccgcggcgaaggtggcgagcacggcgaaggccagagccatggctactacttggctagcttagctccttgatgtgatgaattcttactgactacgtatatttaagatagaaatgaaagaggtagttcaatagcagcaaaagcatgctctgaaatgcaacctgcctgacacatcatgtacaactgccttatacaattgaatcaagaaccacttggccgtttaaatt

SEQ ID NO: 11661 - DNA, 1033 bp, Oryza sativa
  ref <308>: DATABASE ACCESSION NUMBER: AK109009
  ref <309>: DATABASE ENTRY DATE: 2002-08-28
aaccacaacctcacaacaccaccacaatgtctacaataacccagcaagcttcgcaaagctcatatcccccaattctccccaaagacttcaacgcgaatcagcccaaaactatccgcctctatcccctcagcaactataccttcggcacaaaagatggccagccagaggaggatccctccgtcctcgcgcgcctaaagcgcctcgaggagcactatgcagagcatggcatgcgccggacatgtgaaggcattctcgtctgccacgagcacaaccacccacacatcctcatgctgcagattgccaatgcattcttcaagctgcccggcgactacctccgcgctgaagacgacgagatcgaaggcttcaaagcacggctgaactcgcgactcgcacctaccggcacacaattcacaggcgagggcgtcaacgatgagtgggaagtcggcgacacgctcgcacagtggtggcgccccaacttcgagacgttcatgtacccattcatccccgcgcacgttacacggcccaaggagtgcaagaagctgtactttattcagcttcccaggagtaaagtcctctccgtcccgaaaaacatgaaactcctcgccgtacctctcttcgaactctacgacaacaccgcgcgctacgggccccagctctccgcaattccgcacctgctatcgcgctacaacttcgagtttatagacgaggagggtaatgtggcggcctgcacgcctggtgttgggcccccaacggacggacatgtgccacagaccaaggtgcttgcgggcggtgaggatgtcaagatggatacgaatggggatggaactgggagcgacattacactttcatgagggacatccagaatgggcagtggaagattgagtgaaagtggttaggcaggcgaacgcatggctggtgtttggcgtttggcttttttgggtgtataccacggaggtctgggcaggttcgacctccaagtacgaagaatcacaataataccaaatttgaaattttcgcattgcgaatcgtcttg

SEQ ID NO: 11662 - DNA, 1035 bp, Oryza sativa
  ref <308>: DATABASE ACCESSION NUMBER: AK109010
  ref <309>: DATABASE ENTRY DATE: 2002-08-28
acaagcacaagtgcacaacccaagctgcttattagcaagatcatttagcctccaaagcttaatcaagattcaggccatctgacctgatacaataatggcatcctccatcttgctcctggtggtgcttgcagtagtgtcagctccagtggcgctggtcatggccggcgacccagacatcctgacggactacgtcatcccggccggcagcaacgccgagaacatcaccggcgacttcttcacgttcaccggcttccgcaacccgctgagcatgaacatgagcatgccgatgcccaacgccaacttcacggtgaccaaggccaccatggccgagttcccggcgctcaacggccagagcgtctcctacgccgtcctcatgtatcccccggccaccctcaacccgccgcacacccacccgcgctctgccgagctcctgctcctcgtcgacggcgcgctctccgtcggcttcgtcgacacgaccaacaagctctacacccaggaccttgccgccggcgacatgttcgtcttccccaaggggatggtgcacttccagttcaactccgggaaccagccggccatggcgctctcggcgttcggaagcgccgccgcggggctcgtgtcggtgccggtcaccgtgttcggcacaaacatcgacgacgccgtgctcgccaagtcgttcaagaccgacgtgcctacgatccagaagctcaaggcaggcctaactcctcccaagaaagcctaagccctccccgttggtgttaattattcttgtttttcatcctgctgctgctgctgcttgaaataagagaccttccaggctaccaactactgaagaaggtaaattatgatttgtgtggtgaataattctgaattgtggttgtattgtcttgtctgaagagctttgaaccatgtatctatcagtattaattaaggcgttgtgggaatatatatagaccagttcagttgtaagtgttgagagtttctctgctgtaacggctttccacaataatgatacatctcttaatactgtgtgtttcc

SEQ ID NO: 11663 - DNA, 1326 bp, Oryza sativa
  ref <308>: DATABASE ACCESSION NUMBER: AK109011
  ref <309>: DATABASE ENTRY DATE: 2002-08-28
gcagtcgcgtctcacccccatttgccgcacgttgcccaactcctcctcctcctcgtcatcgtctccgttccgatccgcgcccataaatacgcgccaccccgcccccaacctcgccgtccttgtcccccccaagaaccccccgtgcgccaccaccaccaccaccaccaccaccaccaccaccgaggaattctcgctgtcgccgccgccgacgacgacgaggagaaggagtatcgctcacaatcttccgggccgatggggagggcgccgtgctgcgagaaggaggggctgaggagaggggcgtggagccccgaggaggacgaccgcctcgtcgcctacatccgccgccacggccaccccaactggcgcgcgctccccaagcaagccgggcttctccgctgcgggaagagctgcaggctgcggtggatcaactacctccggccggacatcaagcgggggaacttcaccgccgacgaggaggacctcatcgtccgcctccacaactccctcggcaacaggtggtcagccatcgccgcccagatgccgggtcgcactgacaacgagatcaagaacgtgtggcacactcacctcaagaagaggctggacgacgaacggaagctcgccgccgccggcggtggcggtggccgccggccgcatacgcgcaagcagcccaaggcggcaaagagcgccgccgccgtcaagcgcgaggcgacgccgtccgtcagcgtcgacaccagtagcggcgtgacgtgctccacggtgaccgagtcgtcgccgtcgtcggccgacggcgaccaccggcggcagcagcagcaaacgcagcatgccgctgtcaaggaggagagcttcagctcgggcggcgagctgccggcggcggcggcggcgcccacggcagcggccgacatggacgagagcttctggtcgtcgacggaggtgaccgggatgatggccggcctcggcgacatggacgaggagctggccatcgccggcacgtcgtcggcggcggcggcgaggagcgacgacatggagttctggctcaagatgctcctcgagtccggcgacatgagggatttggccgtcttgtaatctatttaatttaatcatggcagaattaagcttgattaaattaattaactaccgggaagaattgatagtatctcttctctgttgtttttttttaccttcttttttcatcttttttttcccagtttccagtgagaaaacgatgggaaattcaggtgatattttcacctttgttagaaaaaggaatactgtagtagtagcaaaaatttctttggttcgttatcagctggcttcagaattagatgc

SEQ ID NO: 11664 - DNA, 1159 bp, Oryza sativa
  ref <308>: DATABASE ACCESSION NUMBER: AK109012
  ref <309>: DATABASE ENTRY DATE: 2002-08-28
acaatttgataattattatcataaaagaatatatttaaaaatcctagataattttttttgtataaatatcatcaattttaaatataaaaattaatccgaaaacctaacaaaaacaacaacaaaaaaacgagaaatgagtaataaatcggatcaggaacaagagtcgtcgtcatcgtcgtcgacaacatcaaaagatcaaaacagtaacgcgaaaacgaatgatcagcacgaaaagacgacgaaagagtcggtggagtctctagaagtgcaacttccggcgtccataaaccagatctcgaatagtcctctcgaatacgcatactcattctggttctcgaagcgtccgtcgaagaacgccgccgccgccgctgccgcctcgtcaacagccacgtcggcgcccggtcagaatctcaactacgacgcgaatcttcgccaggtcggcacgttcaacacggtcgagaacttttggtatttgtattcgcatatgacacgaccgcaggatttgcagggacatgccgatattcatatgttcaaggctggtattaggcctctttgggaggacgatgccaataagaatggcggcaagtggatcgttcgtttgaagaagggtcttgccaccagatgttgggagaacttgatattggcgatactgggcgagcagttcatggtaggcgaagagatatgcggcgcagtggtgagcgttcgcttccaagaagacctcatctcgatctggaacaagtcgtgcagcaaccaggcggtcaagtcgcgcatcaaggacactctcaagcgcattctcaacctcccgccgagcactattctcgagtacaagagccacaacgattcgctcaaggacaactcaagcttccgaaatactttctattgtgacaaataatcatcagaatttagtaatattcgtgatccgaatcgttaatctaacactaacaaacacacaaacaacaaaaaaacacaaacatattacatcataataaacatttaatttatcattccgctcaactgtttttataattattatataagaattcatacaaaaaaaaaattttcacgcacatttttcgttatatttgatttttttcctcctttttttttaatctgatatttgataaattacattagacaaaaataaaaataatttcatttt

SEQ ID NO: 11665 - DNA, 1388 bp, Oryza sativa
  ref <308>: DATABASE ACCESSION NUMBER: AK109013
  ref <309>: DATABASE ENTRY DATE: 2002-08-28
atcgctccctacctcgctcctcctcttcctcctccgcgctcgccggagacagccacatcacagcacagagatcgatcgatcgagagagccatcgccgacagctcgacgaacactactgtgtggcatggcggagaggttgctgtgggcgtcgacgatgagcggcggcgagaagaccaggggcatgggcgccatgggcacgctcgtggggcagctcggggagctgctgtccagggcggtgatgccgccgccgccgcgggtgtgcggcgcgccgggtggcccgccggtgacggcgccgcgggtgcggctgagcgacgggcggcacctggcgtacgaggagtccggcgtgcccaaggaggcggcgcgatacaagatcgtcttctcccacggcttcaccggctcccgcctcgacagcctccgcgcctcgccggaagtggctgaagagctgggcgtgtacatggtcgccttcgaccgcgccggctacggcgagagcgacccgaacccgaaccgcaccgtcaagagcgcggcgctggacatggcggagctcgccgacgcgctgggcctcggcgacaagttctacgtcgtcggcgtgtccctcggcggccacgccgtgtggggcgcgctcaggtacatcccggagaggatcgccggggcggcgatgatggcgcccgtggtgaactactggtggcccgggttcccggcggaggacgccgcggcggcgtacggcaggcagtcgtacggcgaccagtgggcgctccgcgtgtcgcaccacgccccggccatcctccactggtggatggaccagagctggctccccacctccaccgtcgtcgacaacaccaccttcctccccaacaagcgcgacgccgacatccgccgcaccctcaccgccgacggcaccctccaaaagaagaaggagatggcgacgcagcaagggatcaacgagtcgtactacagggacatgacggtgatgttcgggaagtgggagttcgacccgatggcgctgccggagccgccgtgcccggtgcacatctggcagggcgtcgaggacggcctcgtccccgtcgcgctgcagcggcacgtcgccgggaagctcggctgggtcagctaccacgagctccccggcaccggccacttcctctccgccgtccccggcctcggcgataccgttctccggacacttttcggctgatcagcaacgataaaatacagaagaagagtgatgcaaaaatacagtagagtagtactacagtgctcagttaatctcacatgactacatgaggcagcattcagatttttttttccttttattttgtagcagatttgtgctgccaagaaaccctgctaagtgataatgttaacaaatatatatactgatattagactgttct

SEQ ID NO: 11666 - DNA, 871 bp, Oryza sativa
  ref <308>: DATABASE ACCESSION NUMBER: AK109014
  ref <309>: DATABASE ENTRY DATE: 2002-08-28
cagaagcttctagaatattctagatcgtggttagtgcatccatgggcaacggcatgtctccgtgcctgtgctccccgcccgtgcacggcgaggaggcggcggcggaggcggcggcggcgaggctggtgttctggggcggggcggcgagccagctggtggcgtccgcggcgacgacggccggcgacgtcatggcggagctccccggccacctcgtctgcgccggcgactcgttcttcatcggcctcccgatcccggcgctgccggccggcgaggagctggcggcggggcggacgtacttcgtgctccccgccgcgcggttctcgtgccagcaggcgctcaccgccgcgtcgctcgcgtcgctgtcgccgtccccggccgcgaaggtgtccctcgccggcggcgcgtcgtcgccgttcgagtacgtgacgggcgacgacggcatggcgctcatcagggtcctcccggagttcatcgagagggcgatcacctgcgtggcccgcgtcgcgggcggcggcaaggcgggcggcgaggcggcggccgacgaccagctgtgcagcacgccggagctgaggaagcactacatgcagctggtgggcgcgcggcagcagcggccgtggtcgccggggctcgagacgatatcggaggccgagaagcggcggcggcggcggtcgccggtgaggctggtcgcgctggcgaaggcggcgtcaagatagcattggcggccgcgccaaaaaagagttcggatttgtgcatagatacggatggagacaagtatacggatttgatttagttctagctcattttgaagacagtcaaattagatgaaaatttgatgcaaaaattggcaaattgaagaattaattgaccgtcc

SEQ ID NO: 11667 - DNA, 956 bp, Oryza sativa
  ref <308>: DATABASE ACCESSION NUMBER: AK109015
  ref <309>: DATABASE ENTRY DATE: 2002-08-28
accccactctccccaatccccaaccccggcggcggttgcggcggcggcacgcggcggagatgctgcagttcccggcgctgatgcggcagtggccgtcgccgccgctgatcccggcgtccacgctgctccccgtccccgccaccacccaggaggacgagctcctcctcgccatggccgagtccgacctcgaggacaagctgaacgagatccgcaagaccaacagtaacctggtgatcataggcaagccaaccggcgacgtcaaggaggagtacgacgccgaggccgaggacgacgacgccgacaacgtcgaggagtccgacggagacgacttcgaccaggagaccggctgagccggcccccgactccgactcctcccttcgggtttgcaccgcctgccctggtgccattgccctttcttctctgctcccatatttattgcgtgcgtgctacagcttgctatccccaatctgatctatctctatgtgttcagtttacctagtagtttttttcttggaaaaatcttaatgcttcccttattgcttgaataacatgtatcggaatagcttgttggtgcatttgcgtgtctcaatttaagaatctagtattagtttcctaactgtgtgcaagtgcccgtagccttgtgtaagtgctctcctttttatactctttttttcccaaagagtaaatttcacaaaaccttgtattttggggcatccggaacgcaaaccccccaaaccggtggttttgtgttacggatcatccaaaacctgaggaccgagctgatcaagtatctatagaagttgcataatgatgctttaatcaatgcttgaattcatggatgatttgtaaaaaaggtactgtacactacattagagtcctgttaaaaggaaaaattattatgatcataggtctgtcctgctcatgcataaatggataaacctgttacttttagtgtt

SEQ ID NO: 11668 - DNA, 1712 bp, Oryza sativa
  ref <308>: DATABASE ACCESSION NUMBER: AK109016
  ref <309>: DATABASE ENTRY DATE: 2002-08-28
accttcaccatctgcttcaggagaggcaaaggtcgaccactcacaatggctgtctcacagcgcatccagcagtcttcctttgctggcagcaaggctggcctgaagaaggccgctgtcagggctgcacccgtgagggctgttggcagcagcatccgtgctgagaagaagatcaaggttgccatcaatggctttggccgcattggcaggaacttcatgcgctgcctggagacccgcaccgactccctcctggacgtggtggccatcaacgactccggtggtgtgaagcaggccagccacctgctcaagtacgactccaccctgggcaagtttgacgccgaggtcaaggttgtggatgacggacacatcagcgtcaacggcaaggtcatccgcgtggtgtccagccgcgacccaaccaagctgccatggggcgatctggacattgaccttgtcattgagggcacaggcgtcttcatcgacacaccaggcgcatcaaagcacattcaggctggcgccaagaaggtgctgatcactgcccccgccaagggcagcgacatccccacctacgtggtgggtgtcaacgcacacgactacaagcacagcgatgcgatcatctccaacgccagctgcacaaccaactgcctggctccattcgtgaaggtgctggatgagaagtttggcattgtcaagggcacaatgaccaccacccacagctacaccggtgaccagcgcctgctggatgccagccaccgcgacctgcgccgcgcccgtgcagctgccctgaacatcgtgcccaccaccaccggtgccgccaaggctgtggccctggtgctgccaaagctgaagggcaagctcaatggcattgcactgcgcgtgccaacaccaaatgtgtccgtggtggacctggtcgtgcaggtcgagaagaagaccttcgctgaggaggtgaacaacgccttcaaggaggccgccaacggcgccctgaacggcgtgctggcagtcggcgacgagcccctggtcagcgttgacttccgctgcactgacgtcagctccaccattgactccagcctgaccatggtgatgggtgacgacatggtcaaggtggtggcctggtatgacaacgagtggggctactcacagcgcgtcgtagatctggccgagctgactgcccagaagtgggaatgaaccacagggtctaggacccaggagccatttcacggctgacatcccaaagcaggtgcagcggagcttgcaggagagccatggtgccggcattgaggccccttccggccctgcctgactgggctactgagtcgctaggcagcagcacaggcgtgcaggtgcaacggtgcccatcgtcaactggcggtgtggactgcagcagctggcgcagctaggcgcgcgttcgtgtacataggtgtcgtgttcaggtcgatctccagatgctgctggtgtagagtgggtgtttcggttttgtgactttgttgcatggcatgctcgggaccaggccagcgcctgagtacaccaggtgtcttcaaatttttgcagtgtacgaccggctgaagcacagcgccacagcgtttttttgtcacacggcagcacttaagctggtctgttcatgacataaaacgttgacttcagctcagagcggcgagttgagagcatgagagtgtgtgaagtcctggtgcgcaagcaccaaccattgtaaacatatattc

SEQ ID NO: 11669 - DNA, 1708 bp, Oryza sativa
  ref <308>: DATABASE ACCESSION NUMBER: AK109017
  ref <309>: DATABASE ENTRY DATE: 2002-08-28
ctggcattgttcactgctgtagcaccttggtgattgtgtagctgcttggggccctgtctgctgcatcgcaaccccctgcttgaacgctttcacagcagccaagatgcagctcagcaggcccaacgtgcgggcgcagagtgcccctcgtagctctcgaacgtctttggcattcaagcccgttcgcagcgtgagtgtgcgtgctgcaactgaagaggttgagctcgcaacaagcaatggagctgtgtctgctgccggtgtgccagcaaacatgctggatttcgaggagctctctgacatagtcaggatggtgaatgacacagacatcgtggagttggagctgaagagcaagcgattcagcctatcattgaagaagaaggcagcactgcaggagccagtcgtgcaggtggtgcaggccgctgcacctgttgctgccccagcaccagctgctgcacccgcagcacccgcagcagccccagcagcagcgccagcagcagcccccaaggccccagcgcctgctgtggttgagggcattgaggtcaccagcccaatgtcaggaaccatgtacaggtcccctgctcctggcgagcctccctttgtgaaggaaggtgaccgtgtgaagaagggtcagaccgtgtgcatcattgaggccatgaagctcatgaacgagattgaggctgaggttgctggtgaggtggtcaaggtgtttgtggagaatggccagtcggttgccccaggccagcccattctgatcatcaagccatgagtgcagcttgcaggacagcacacagcggtgtgttggcagctgctgtgggcttgcttgcaggacaccggacaagtggcatgtgtgtttgtacagtgacaggctgtgtgggaggcctcttagctccaaaaatgttgtgctggacgtgtgggctatgaaacagtgcattcattccatcctggcccagccttgtacagatactgtagtctgcgctgcagcagtgcgggtgcatcagcagttgcaatgattgctgaagttggccgttgcaactgaatggcgttgttatggctgaggggatagctgggccggtgtttgctgcaatggcatcacaatcagcgtgtgcagctacacgtccactgggcagtgctgtgcacacatccagcagcaaggcagggtgttgcatgctggggcccgtgttgggtgggagagatggacattggctggtccgtgggctgcagcagtttggtgtctagcagctgcgcgtttagttagggcttagggtcccgcttaaaatggcggaagtgcaattttgatcctgtgtattggaatggaatcatctgctgcacgacagctggtgtgctgcagggggcacaggttgatggtgttgcagctgcaggttcctggctgctggctgctggctgactctgcagcggcacaaaatttgagatgcatttatgttcagataattctttctgatggcgcggtgtaaaggagatacaggcacgtgcaattgcaatgcggtgtatggcgacgacttgggctgtactgtgatgatgatggatgtcatcacagtgcagtttgttggcggggctgctggcactggtcctcaggtgtgcatgaaacaccgttgtgttgaacttggtatgcttgacttgtgtgtgccagaagtagcgtagctgaccatgtactgctgtaaggccgtcatgctgtgtaactggcatgcctctg

SEQ ID NO: 11670 - DNA, 998 bp, Oryza sativa
  ref <308>: DATABASE ACCESSION NUMBER: AK109018
  ref <309>: DATABASE ENTRY DATE: 2002-08-28
catgttctccaaggccaccatcgctaccctcttcgccagcctagctgctgctcagctccacgagcccgtcggcgagcccaatggcaaccccatcacccgtcccttgaacgaggtcgtccctgcctgcaagcagttcaccatcacctggcagccaactacccccaacaccgtctccgtcctcctcctctagggcccctccaccaacgtcgtcaagttcggccctgccctcgccgagggcatcgccaacagcggctccctcgcctggacccccgcctctgatctcgaggtcaccgctggccccaacggctacggcatccagatcattgacgacgttaccggccagtaccagtactccacccagttcggtatctccaagggcgagaactgcgctgttgtctcctcctcctccaccaaggacggctactccactggcaagcccactcccgctccttcctcgtccggataccccgcgcacaacagcaccagcgctccccccaagagcaccaccatcatctacagcactgcttcgcacaacggcaccatcgtccagcccaccaagagcatgtccgtcccctccaccctcaagcccaccagcagctccacccagacccctcctccccagcagaccgccaacgccggctctgctctccaggctggtctcggccttgccggtgccgttgccgctttcgcattcatgttgtaagcatcttgtccgtgggtttcttaggatgggtactctaatgtcatgaactgcactttgctggccgctgcgcgacggacgcaacgctcaattgtttataccaatttcgtttcttcttcttcgcttcaagtcggtgcttttgcatctggggaggaatgtacgtctgcctggtctgatcggcgtatttagaaatgcatgcttgtatgcgcgttggtccgcgcgtactggtacaaaagatttcaattccggtgtggctattatgtgtgtgtctagggatggatctaatggattatattat

SEQ ID NO: 11671 - DNA, 1650 bp, Oryza sativa
  ref <308>: DATABASE ACCESSION NUMBER: AK109019
  ref <309>: DATABASE ENTRY DATE: 2002-08-28
atcatctctttctgtcgccgttagaattatcgaaacctattaacaacacaggccaaccattcaacattcaacaaagaatggcttcgagctctagcagctctggaccaagcggtacgcgacgcgcgcctatcgtcgaagcgcgcactcaggagtgcctcgaagagataaggaacatgtcgccggatgaactcgcaaacgtgatcatgttaattggcagaaccggcgtgggtaaatctgcgcttctcgaatatctcaccaacgctcaaggccattcgggaaatagtccaattccagtgacgctcgacttccaattcgaacgcgttaagttctttcgcaagcgatactacatcatggacacacctggcttcgacacgaacaaggagcaagtagtcttccgcgagatcatccggggtatcaccgccgtccgcccctacgccaaaatcgttggcgtcatgctcgtcacccgcatcaacgataaccgcgccgaggatctcgataacaagctcgtcgccttcgtcgacaagctctgcggctcggagtacgcggcccagatcacagccgtcacaaacttttggaatgtgtctgagccagaggaaaaggtggagtttgagacgaggctgggggaacgcttgcagcgatggcgaggtgttctcggccaggagttgaagcagtaccagcacggacgccggtataattcattcggtgacgatgtaggacagtgtctcaagtggcgcgcggactccgacgatataaaggcgtatgccaaagcgatggtcgatcgccactacggtgacattaacccaagggatccacgcatcgtccaggagctgtcccgaaaccaaccgcttggaaaaactgctgccggagagttccttggaattccttctcccggcgagtcttcttcatctacctctgcatcctctccaggtcagcccgaggcgaccaccctgccaccaagcgcctccgaacctgaagcgggggaaattctcaggccgtcagccccgtcatctgagaacccgaaccatttccagttccaggcttccccagagtcacatggcccaagccccgtcggagtactcggtttccttcgcgataatctcctctttcccgcggtggagcggctcctggtcaatgtggcccttggcgcaacgtcaggaggagcggtgggaggattccctagccaccttgacccactttctccccgagaccacttcttagttcgtggcctccctagcgacttaggctttcgaacgcaatgggcccaggcgcgcggcataactttggagccgggttcgcaggcattcggtgacgctgttcgcaatgccatcacgcgcgaatggccattgtgagtgaactatatgtgttgctctacaatgcagatggaatctgggcttggtgccaagaatacgttacgatctgttgtagagcttcgccctcatcatgcctttgggcacgtcgtcatgtccgcaatcgctctttctgtattccttatgcctttttatgcctcacagtggctatgcttgccgtagattcgtctcatcagatgttggcctcggcctcaatctgggtggtctacagcgccacgtatctggtagcacagactgatcctatcacgtgtttacccacaactgtggcttattattacactgt

SEQ ID NO: 11672 - DNA, 1080 bp, Oryza sativa
  ref <308>: DATABASE ACCESSION NUMBER: AK109020
  ref <309>: DATABASE ENTRY DATE: 2002-08-28
aagcaccatcgcagccgcaacaggacccgtcggccgcctgcccatctccactccatctcaattcctcctccccgcgcccacgatgctttcacgagctgctcgtccggcgctgagggctggcctggccgccgccgcacggcctgctcccctcaatgcccccgccgccgccacctatgccaccctgcgcgagattgaggaccgcctcaagtcgatccgcaacatcgagaaaattaccaagacgatgaagatcgtcgcctccaccaagctcacccgcgcccagagggccatgaccgagtcccgcaactacggtcagacctccaacaccgtcttcgagcaggctgagacgaagcccaccgagggcgagggcaagaagacgctcgtcgtggtctgcagctccgacaagggtctctgcggtggtatccactccggtctctccagggcggtgcgcaagttcctcctcgagcaacccgaggccgaccttgccatcatcggcgagaagtgcaaggcccagctcagccgttccaacggcaagaacgtcgtcctcagcttcgccggtgtcggaaaggacgtccctaccttcgccgatgcttccgccatcgccgacatgatcaccaccctcccgaccgagtactcctccatcaagatcctctacaacaagttcctcaacgcccagagctacgaggccacccccatcgaggctttctccgaggaggccatccagcagtcgcccaacttctctgctttcgagatcgacgacgaggttcttggcaacctccgtgagtacgcgctcgccaactcgctctactgggctctggccgagggtcacgcatgcgagcagtctgcccgacgaaacgccatggacaacgcctccaagaacgccggcgacatgatcaacaagttccagattctcttcaaccgtacccgtcaagccgtcattactggcgaactcgttgaaatcattactggtgcggctgcttccgagagctagaggatgctgtgagatgttagactatttacccaaaacgtcggctcggctatccgccatgagttaggctgtgtagaataaagcttgtccatatg

SEQ ID NO: 11673 - DNA, 974 bp, Oryza sativa
  ref <308>: DATABASE ACCESSION NUMBER: AK109021
  ref <309>: DATABASE ENTRY DATE: 2002-08-28
atcccccctcccgccgccgccgccgccgctgcaaaccctggctcgcggctcggaccaacggcagccatgacgtggaagcggaggaatggcgggcgcaacaagcacggccgcggccgcggccacgtcaagtagatccgctgctccaaggtgttctcccagaatccattcctctgccacgaatctaatggacaaggctatcaaccgtttcttggtgaggaatattgttgagcaggctgcagtcttgagatatgcaagaggcttgtgtacatgatggtcacgttcttcctaagctgtatgcaaaggtgcatcactgcgtttcatggaatgcaattcatgctcacattgtcagtgttcgctcttgcgagaacaggaggaattgtgagcttccgcagcatttcagaccttcactgttattggacgaccacctaccgtttaaagagcttttctttcagcacacataatgcaattcttttgaaatgcatgcagaactgtacggatctgtcttttcgctgatcattgtggatgacatatttcagattgcactggaaaatatagttctgcaagctgtatctgagttgtccgagagctgaagcgttcatctgatgttgtatcttggaataacttgatgtctcctttggtggtatcaaagacaagccaagtatccaaaagcatgctgatttaacatctgaaacttgtgcagggaggtggtgctgcgcctcctgcaccagctgctgcccgtgccggagtttcagctctgcgcaccttgagcttctctccagttgttttttgtagctgagtttgggattttcttttttttttttgggggggggggggtcaatcgatccatgttggactgtttcggttcttttctgctgtaattagttgtatttaagttctcaaatacacgatttgttgttgtgtttattaacacaattgcattatccacaatgggaataggaaactgttgttttttt

SEQ ID NO: 11674 - DNA, 1344 bp, Oryza sativa
  ref <308>: DATABASE ACCESSION NUMBER: AK109022
  ref <309>: DATABASE ENTRY DATE: 2002-08-28
acaagctcattctcaaatcaatacacactcgaaagagttcacgtcatctacacccacaagagatagacgtgtctaagtaccttgtcggctacttgtatatattactctacggagcatcaagacttgttgcatcaattcttcagacacaatgggaaaagttcttctcgtcctctacgatggcggcatccacgctgagcaggagcccaagatgctcggtaccaccgagaacgagctaggcatccgcaagtggatcgaggagcagggccacgagctcgtcaccacttcaaacaaggagggcgagaactctgagttcgacaagcaccttgttgacgctgaggtcatcatcaccactcccttccaccccggttacctcaccgcagagcgtcttgctaaggccaagaacctcaagattgccgttactgctggtatcggatccgaccacgttgacctcgatgcggccaacaagaccaacggcggtatcaccgtcgccgaggtcactggctctaatgtcgtctccgtcgctgagcacgtcgtcatgaccatcctcgccctcgtccgcaacttcgttcccgcccacgagcagatcgccaagggggagtggaacgtcgctgaggtcgccaagaacgagtacgacctcgagggcaaggtcgtcggtaccgttgccgtcggccgtatcggtgagcgtgtgctccgccgtctcaagcccttcgattgcaaggagcttctgtacttcgactaccagcccctgtctcccgaggtcgagaaggagattggctgccgccgcgtcgagaacctcgaggagatgctggcacagtgcgatgttgtcactatcaactgcccactccacgagaagacccgcggtctcttcaacaaggagctcctctccaagatgaagaagggctcatggctcgttaacactgcccgtggcgccattgtcgtcaaggaggatgttgctgaggccctcaagtctggccacctccgtggatacggtggtgacgtctggttcccccagcccgcgcccaaggaccacccactccgctacgcccagaacccatggggcggaggcaacgccatggttccccacatgtccggtacctcaatcgacgcacaacagcgatacgccgctggcaccaaggctattctcgactcatacctctctggtcgacatgattaccgtccccaggatttaattgtacacaatggagactacgcgaccaaagcttatggtcagcgtaagtgagcgttgtttctttagcatttccggacaaattttcttagcaggttcttgggagtcggatgggtagtgtctggctatatacgaagcaatatatccatgtgaactcc

SEQ ID NO: 11675 - DNA, 1140 bp, Oryza sativa
  ref <308>: DATABASE ACCESSION NUMBER: AK109023
  ref <309>: DATABASE ENTRY DATE: 2002-08-28
gcgtcgcgttgcacggattattgcaatcgatccaaacaatcacgtcggtcgacgagaagaagtgagtgatggcgtcgccgacccggccggggccgtacatgccgcgcccaccggcggtgccggagtggctgaacaccggggacaacgggtggcagctcgcggcggcgacgttcgtcgggctccagtcgatgcctgggctggtggtgctgtacggcagcatcgtgaagaagaagtgggccgtcaactcggccttcatggcgctgtacgcgtacgcgtccacgctcatcgtgtgggtgctggtcggcttccgcatggcgttcggcgaccggctgctcccgttctgggggaaggccggcgcggcgctgacggaggggttcctcgtggcgcgcgcgtcggtcccggccacggcgcactacgggaaggacggcgccctggagtcgccgcgcaccgagccgttctacccggaggcgtccatggtgctgttccagttcgagctcgccgccatcacgctggtgctgctcgccgggtcgctcctcgggaggatgaacatcaaggcgtggatggcgttcactccgctctggctcctcttctcctacaccgtctgcgccttcagcctctggggcggcggcttcctctaccagtggggcgtcatcgactactccggcggatacgtcatccacctctcctccggcatcgccggcttcaccgccgcctactgggtaagataagctctcgcttcctctaccatttgcaacgtacggtcggttggttaattctggtcattgcctggtcggattttcttcacaacttttggttgttcggtttgtcacgacccgccggggtttacttttccggtgcgcgctcacgggtcaggacttacacgagtacttgcacccgtacattagcagtacatgtgacgtgtggactttgtggtgaaacgttcggggcacgcggtcgcgggagcacggagtcgtcagcgcccggggtagactagtcacttgcgtgtattgatcgagtgagacgtgttttggacatggacgatggtgaactagtactatggaaagaaacgattcgatgtagcttaggctcgagcctaatttcctcgtacctgcaaaagtacatatatagacgagttgctag

SEQ ID NO: 11676 - DNA, 1099 bp, Oryza sativa
  ref <308>: DATABASE ACCESSION NUMBER: AK109024
  ref <309>: DATABASE ENTRY DATE: 2002-08-28
aattggactcagctgcatcatatatatcgttctagctagctaggttagctaggttcattccatttccatttcaatattgttagcaacaatggctgcaggcagcggcagcggcagcaatcctaaggactaccaggatcctcctcccgcgccgctagtggacaccggcgagctaggtaagtggtcactgtatcgcgccgccattgcggagttcacagccacgctgctgttggtgtgcatcagtgtgagcaccgtgatcggtgagaagcggcagtcgggcgagggcggcgccggcgtgcttggcattgcctgggcctttggtggcctcatcttcgtgctggtgtactgcaccgctggcatctccggggggcacatgaacccagccgtgaccttcgccatggtgctcgcgcgaagggtgtcgctgccgcgagcggcgctgtacacgatggcgcagtgcgtgggcgccgtgtgcggcgcagggctcgccagggcgatgcacggtggcgggcagtacgcgcggcacggcggaggtgccaacgagctggcggcgggctactcggcgggggcaggggtcgtggcggagatggtgggcacgttcgtgctggtgtacacggtgttctcggcgacggacccgaagcggaaggccagggactctcacgtgccggtgctggcgccgcttcccatcgggttggcggtgctggttgtgcaccttgccaccatccccatcaccggcactggcatcaaccccgcccgcagccttggccccgccctcgtcctcggcctcggcaccaccaaggcctggtcccacctctggatcttctgggtgggccccttcgccggcgccgccgccgcaatgatctaccatcactacatcctcaggggcgctgccgccaaggccttcgcctcctcctcctaccgatcaccccatttttaatcccatgcacccttgcaatatattttattattcttcgatctactgttttaatttgttttttataattatatccgtaattcatctgtactgtctgtacgtaatctagctacatacatatatgtatggttgatttttcatatttgcaattcaattattctatattttcct

SEQ ID NO: 11677 - DNA, 1415 bp, Oryza sativa
  ref <308>: DATABASE ACCESSION NUMBER: AK109025
  ref <309>: DATABASE ENTRY DATE: 2002-08-28
aactaacgctaaaaaagtaacagtttctgtactttattggtccacgacgcagtactccactacactctccaccacaactcctttctccgaaatgatgatgctcccctcgatcatggacgtggccgccctcgccgtgtgcgccttctcccccagcaggacttgccgcgtccgcgtctcgagcacccgctaccgcaacgacccctacaaggcccgcgtcatgcagccgcgtacgcccgttgttgccgcgcccgtcgccgccgcctgcctccccgtcaacgtgtgcgttcccgtcgtcacccccgccgtgttcgctcccctaacggtccaagctgtcgtccctgccacccccgctcccgttgctgaagttgcgcccgctcgtgccgcgcccgcgaccgcgtccgcggcgcctaagcaacactttgcgctggttggcttcaagcacgaagcgatgatgtatcaggcccctttccgtgtctcggccggagatgtggtcatcgtcgaagctgaccgcggggaacacattggcgtggtgcaggaggtcaccaccgtcgcccccaagtacaacgtcccgtgccgcgtgcttcgtcgcgcgacgcacgctgagttggtcgccttcgaggcgaccaaggccaaggagaccacgacgaccaaggccatccagaagctctccgagagcctcggcctcgggatcaagatcgtcgacaccgaattccagatggacagcaacaagcttactgtcttcttctcgtcgaagatcttcgtcgacttccgcaagctgcagcgcagcctcttccgtgactaccgctgccgcatctggctcgtcaactgggcggaggtgcgcccgtacacccccgtccccgtgaaccgcgtgtaaggttcaaaggcgacgttcatttctcccgttccttggcgctgcttccgttggaaagtgtgtctgtgaggttttgcaccgataaccgtgaccgttctcccttttggcgtttgtctgcacttgagccgactcgccgctccccctttctctccattcttttcttcgcagccaatatgtgcccttcacgcttcgcggcgctgagggttggcatgttcttgaccaccgtgttcttttccgtcgccgtgggctgcgatcaacccgtgggcgtccttcgcacagcgcatgtgaattagctgcgaaaaatggctggcgcgacacgctttgcggatttgagcgcggtatcccaaaccacgatgacacctcgattgtttcgctttcactggaggctgaggtctgtacgcggaccctgcccccactttgattttggactgccggcaccccactctcccttacccccaaacatgtgttgtaaaatttgcgacaatatcaccccaggggctgctttgcgtgcgtccatcatcatcgcgaaagagtgcaaacatgg

SEQ ID NO: 11678 - DNA, 1394 bp, Oryza sativa
  ref <308>: DATABASE ACCESSION NUMBER: AK109026
  ref <309>: DATABASE ENTRY DATE: 2002-08-28
aagcgaaaaaccgagtttgtatactcgataaattaagatggcggtgctgcgtgtgttggcggtggcactggcgctgctgctggcttgcgctgcagtcgcttcggccgagcgctcgtacgctgtggacgaagtcgcagacgagacggaggctgacgttgaggagggctttgacgtcgaagacgaggccgatgtcgatgcggaggatgaggacgccgctttcctgcagatggaggacgacgcggaggctgaggccgacgccgagtggccggacctgaaggggttggccgccaaagcgcagggcgctgcaggcaaagtggtgaaaggcgctaaaggtctggcggccaaaggcctgcagggcgtgagcaaagtggccggccaagtggccaccgctgcgggtgaggccgctgagtcgctgggcgacgaggagggcggcgatgaggagggcgctgccgagggcgaggccggtgccgctgagggtgaggcgccggctggcggtgaggccgctggcggtgccccggcccctggcggcggtgctccgggtggtggcgaggccgcgggtggtgaggcgccggcgccggagggtgacgctgctggcggtgaggctgccggtggtgaggcgccggaggcgggcggtgagggtggcgcaccggagggcaaaggcgctggcgccccgggcggtggcgctccggagccggccggtggtgccccggagggtgccccggagggtgccccggagggcggtgcgccggagggtggcgatgcgggtggtgcgccgcagggtggtgccccggagggtggcgccccggagggcggcgatgcgggtggtgccccgggcggtggtggtggcggtgagccgccggcggacccgccgggcggtgacgagggtggtgccccggagggcggcgaccgcggcggtcgcggcggtggtcgtggcggtcgcggtgatcgcggtggccgtcgtggcgaccgcaagggcgaccgtcgcggcgggcgcggtgatcgcggcgaccgcggcggccgctaaacggcacgctctgcgggtcgcgcggcgcgttgcagtggccgcttgcgctgtgcgctgcgcctttcgcttcgcgtcatatgtccgcttccgctttccgctttccgattctgatccaaatccgaatcctatcactttcacttcatctcaattttgcacctcccaactcgtcaggccgttgccgctgcggctgtgacacgcgcatgcccgatcggcagattccgccgattccgctgattcgtgtgtttcgtcgctctctgttgtatcgcattcgcgcgctgcggctgcccgctcgtgcgtgtgtgtagtgccttccacttctacttcacactctgcactttgactttaccgcgctcctccggacgcggcgttg

SEQ ID NO: 11679 - DNA, 754 bp, Oryza sativa
  ref <308>: DATABASE ACCESSION NUMBER: AK109027
  ref <309>: DATABASE ENTRY DATE: 2002-08-28
gcacacaacggttggggagaggggagagagagtgtggaccgcgtcgagcgtcaccttgccccgcccacacaggccgctaaggagccgagcgccggcgagttgaggagattcggcgagccgccaccgccacccagaaccgcgagcaccagcgggctgaggagagaggggtgatgcggcgagccacagccgccgcccgaggcttagatcttgcaagcgccgggctaggccgccccgccgtcgccatcctccttttctgctgccgagcttgtcgtcgatcttctcctctccacatcgaccgtcaagctcatcggtctcctcctctccgcaccatcaagctcgtcctcctcctcttcgcgccgccgagctcgtcggcccgtctcctagatctacattgaagagggaaaggccgccgccggcgtggggaggaaaaaggggaaggccaccgtggggagagggagaggcgtcgtggtcctccttctcttcgctgccactcttcttcgcccccggagaggagcgtcggacaccgcctcggcttcccgctcgccgtcctcaccgcttgggctaccccgccgctgctccggtcgccgccttgcttcctccgccgctgcctcgcttccttttactggtggggaatggatagaggagagatgaaaactgagggtagaaaaaaaggcgggtgggacccattcaaaagaatatgcactgcgcagtatgtactacgtatctaacaatgtttctaggtatttttaagctg

SEQ ID NO: 11680 - DNA, 1584 bp, Oryza sativa
  ref <308>: DATABASE ACCESSION NUMBER: AK109028
  ref <309>: DATABASE ENTRY DATE: 2002-08-28
actttgagtgaattgcagtacctttcaaatcctctagggcccgcatttgcttgcactgccgttcatttgactgagtagggcagcaatggtgaggaacgcagcacagcgcgtgctagctcagtcatggaaggccatgcagagtagtgcagcagagttctccacccgcgcagccaaggagcgcaaggttgccgtcctcggagctgctggtggcatcggccagcctttatccctgctgatgaagatgaacccccaagtgtcccagctgtcactatatgatgtggcaggcaccaggggcgtgggcgcagacgtcagccacatcaacagccgggcccaggtcaagggctatgagggcgatgctcagctggcagaggcgctgaagggctgcgacctggtcatcattcctgctggtgtgccccgcaagcctggcatgacccgtgacgacttgttcaagatcaatgcgggcattgtcaagggcctggtggaggcatgcggcaagcactgccctggggccatcctcaacatcatctcaaaccccgtcaactccacagtgccgattgctgctgaggccctgaagaagatgggcgtgtacgacaagcgcaaggtcatgggcgtcacaacactggacgtggtgcgcgccaagaccttctatgctgagaagcttggccttgatgttggccaggttgacgtgccagtggtgggcggccacgcaggcatcaccatcctgccactcttctcacaggccacccccacaatgccgtccaacacctctgctgaggtgattgaggccctcaccaagcgcacacaggacggcggcacagaggtagtggaggcaaaggcaggcaagggctcagccaccctgtcaatggcctatgcagcagccctgtttgctgacgcatgcctgcgcggcatgaatggcgccacagcaacagagtgcacattcgtggagagtgacgtcacggacctgccatactttgcaaccaaggtcaagctcggcaccgagggtgttgagaccatccagccggtgggcagcatgagcgcctatgagcaggaggcatacaacgcattgacgccagagctgcaggcgtccattgagaagggcatcaagtttgtgagggagagctaagcgccttcagtagctatagcaaatgaatggtttgggtaggtgtgcatgccgctagtgctgccactgtcgtgtgagtggtgcgacttgttttgcaagatagtcgctgacagcggctgccctgttttggcaggtgtgctgctgacctggcttgataatctgacccggactatgtcaccgacttgcagcagtgcgtgcttgaggttgactccagagggcacggggttcatgcgctctgcatgctttgattgcttggttgtcctgttggcttacagtattgtgtgtcctattggctgcatggcgaatggccatcagccgccacaatgttgaatgttgtctgttgacaagtgctgaagggtttcaaatgctctaaacgttcacttctgtgcccccttgcaattggtgttcatggtgttcatagccagtggcaacattgctatggcatgggtaacaatcaatcattc

SEQ ID NO: 11681 - DNA, 1394 bp, Oryza sativa
  ref <308>: DATABASE ACCESSION NUMBER: AK109029
  ref <309>: DATABASE ENTRY DATE: 2002-08-28
aagcgaaaaaccgagtttgtatactcgataaattaagatgcgtgcgattgtgatcgctgctgtcgtggcggcggcggccgctgcagtgctggtcagcggtcagagcgtcaaatacgagtcgaacattgcgccggtcaaatatgagtcgaacctccctccggtcaagtacgagtcgaatatcgcgccggtcaagtacgagtcgaacctcccgccggtcaaatacgagtcgaacattccgccggtcaagtacgagtcgaacattgcgccggtcaagtacgagtcgaatatcgctccggtcaattacgagtcgaacgttgcgccgccgccgtcatacgcgcaggccacggcgccgccgtcgtacgcgcaggccactgcgggtgcgcccgccaaaccggcgccgcagatcggagcccaccgccccggcccgccgtcgtacgcgcaggccacggcgccgccgtcgtacgcgcaggccactgcgggtgcgcccgccaaaccggcgccgcagatcggagcccaccgccccggcccgccgtcgtacgcgcaggccaccgcaccgccgtcgtacgcgcaggccactgcgggtgcgcccgccaaaccggcgccgcagatcggagcccaccgccccggcccgccgtcgtacgcgcaggccactgccggacgcggcggccccaaagccaacgccaagggcaaaggtccggcaaaaggaaaggccaaagtctcgcccgcgaaacccaccaaatccgcgtcaccggccaaacccaaacccaacggcaaaggcggaaagggaaaagccaaatccaaatccccgcccgcaagcgccaagcgctctgccgcacgtccgaccaaacgccccacaaagcgtccggccaaacccgcagcgcgcaaacgcaagtaaacgtgtaaacacgtcaacgcgtcggcgtgtcagcgcgcagtccgtagaacccggtccatgcgctccgccgcgtgatatcgtgagtcttcgaatcgtcgcgtgtgcagtagctcctgtgctccgcattccgcctccctttcgtctccgtcacccgtcgcctgctctccggtcggacgggcggtgtgtgtctgtgcgcccaattgctttcgtgcgattgcggttgcacctgaccccaccgcccgttccatccgatgcgttccgatgccaccaccatacccccataccgccaccaccacaccaccagccgtcatgccgtggggttactcttcgactgccgttcgattcgattcccttcgcacactctcgtcctctcctccccgtagcgatgccactaattgacttcaccgattcacacacataacataacatcacatcacatcacagcacctcccatcccatcaccgcacagctcagcacaggaaatcgcacaattacttgc

SEQ ID NO: 11682 - DNA, 1184 bp, Oryza sativa
  ref <308>: DATABASE ACCESSION NUMBER: AK109030
  ref <309>: DATABASE ENTRY DATE: 2002-08-28
acatcaagaagctaattaactaatccaatatggcatcaagaacaacaacttctactcgtgtagaagttgccatcaagatgtcgtacctcgtcgtggtcctcgccatcgcgtcgctctcggcatgccgcgtcgacgccacgtcgcgctcgctcctggtcaccggcggccaagccgcggcgccggcgccggtgtggtcgttcggcgcgttgccgccattgatcgagccggcggtggtcgagccgcctactgcggttgcgccggtgcacgccgtcgccgtcggcgaggcgccgccgccgttgaaggaggagagcggcagcggccatgtcaagaagagcaagcacaaggacgaggagagggcgccaccgcccaagaagcaccacgagaaggcgccgccgaagtccaagcaccacggccgccacgctccaccggatcagccggagctttcgccgccggcgccgccgcccgagtcgtacacccctgatgcgccgccggcgccggaggcggcgagcccccaccacggcggcggcgagaacccggcgtggccgcgtcctggaaacaaccagtggccacctctgccgccgttcaaccagccgccgacgccggaatggccgcacccggggaacaaatggccgccgctaccgccgttccacccgcctccgacgccggcatggccgcatcctggtggcaacaagtggccgccgctgccgccgttcccgtctcacccgccgccgacgccggcatggccgcaaccaggcaacaagtggccgccgctgccgccgttcccgtcccacccgccgccgacgccggcatggccgcacccgggaaaccagtggccgccactgccgccgttcccgttccaccctccgccgatgccggcatggccgcaccccggcaaccagtggccgccactgccgccgttccacggcagcgatgtgccaccggcgacgaagaagatcaccaaggaagaagtgcacgagtgattcatgcaaaaatgcttggtgatcaactgaaggaaattaagtagtatcaaattaagcctcgtaagatttaatcatttagataacacaaaaaattagtacgaataaattttgaatttggacggcatttgtccaagatgattgatatttgaacttttccccatgagggcaaggtgatatgaataaagcaaccttaccgttgagttt

SEQ ID NO: 11683 - DNA, 985 bp, Oryza sativa
  ref <308>: DATABASE ACCESSION NUMBER: AK109031
  ref <309>: DATABASE ENTRY DATE: 2002-08-28
aagcgaaaaaccgagtttgtatactcgataaattaagatgcgtgcggtactggtcgtgttggtggccggtttggcactggcgtctgcggcgacgtcgcgtggtcagccgttcgtgtacggcgccaaacgcgatgacgcgcctaaaccggagccgcctgtggtggaccacgccggtgtggcggacacgcgcgccggtggtgctgacgcggggtggaaggcatcggcgtcgccccgtgtggtggcgaacttggcggacccgaagccggtgaaggacaagcacttgtcggcgtaccaccagcccgggcagtgggccatcgcgcacgtgcgcgagcccaagcccgtgctcaagcgcgtgcgcgccgatgagggcgtgcgcgcgcacgtgctcgtccgcgagccgcgtcgcccggcaccggaggagcgccatacgtacgtgcgcgctcacagcgccgacgtcgacccccaccgcgcgcacgtcatcgcccccaaacgcgacgttgtgacggccaatgcgcacatcgacgccgatgtggcgccgaagccgcgcgcgcgccgcccgcgcgagctggtggtggcgaatgcgcacatcacgcgcgacgcgccgcgccgccgcgcccgcatggccgacccgcagttggaggtggccgatgcgcacatcacggcggacgcgccgcgccgcccgcgcgccgcgcgcaccgaacgcgagttcgagtctgcggacgtgtcgatgcgcggccgcggctatgaggcgtcgaaaccggcgccgaacgaacccaaaccggagcgcgagatcgtgtcggcggacgtcaaagttgtcttctaactgcgctgcactgcaccgcggtgttgcgctgcgggtggatgcctgcgtcagctgcggctgcgtgaaggcatgaacactgcgtcgcgtcgtattgggcgcgggctgcctggctgctgtctgctgtttcttgcgtttcgtgcaactgaataagcaatttcttcc

SEQ ID NO: 11684 - DNA, 1167 bp, Oryza sativa
  ref <308>: DATABASE ACCESSION NUMBER: AK109032
  ref <309>: DATABASE ENTRY DATE: 2002-08-28
atcacacaaggatctgctagacagaaccaaccaccttcttcttcttcttcttcttcttcttctccacccggaatcaccaagaacaggctcggtccttttgttcacaatgaagtctcttctcaccctcaccctcgccctcttcgcctcagctgggctcggcgacgctgcctcagctggctgtggcaagcagcctccctccagcggcgtcaagaccatgcaggtcaacggcaagaatcgcgagtacaccctccagctgcccaacaactaccagaacaacaagccccaccgtctcgtcttcggctaccactggctcagcggaaacatgggcaacgttgtccagggcggttactatggtcttcgcaacttggctggcgactctaccatcttcatcgcccccaacggtctcaacgctggctgggctaaccagggtggtgaggatatcaccttcactgatcagatgcttgcttttgccaagcagaacctctgcattgatgagaagcaagttttcgctaccggattcagctatggtggtgccatgagccacagtgtcgcctgctcacgacccaacgacttcgctgctgtcgccgtcatctctggtgctctcctctccggctgcaacggtggcaacactcccgtctcttacctccacatccacggatccgccgacaacgttctcagcattcagcagggccgccagctccgcgacaagtggatcggcaccaatggctgccagcagaagcaggtcaacgatccctcccccggggcccagaactacgtcaaaacctcttacacctgcagccgcaagcccgttacctggattggacacggtggtggccacgttggtgaccctactgccaacggtcagaagttcgcccctggtgagacctggagcttcttcaacgccgctgctggtactagcgctaagctccgctgctaaataacctaaggggttgcagactttgaggacagccaatgctttgactacctccaagtcttgcatttgagaagtggggagggagatcttacattccttgtatattgcaatctggtggaagtattattatatacaaatggtctagtcctaccgagggatccagcacatccttcactgtacatagttaaatcctcggtggactcggatgacaatacatcacagtatatattcgc

SEQ ID NO: 11685 - DNA, 851 bp, Oryza sativa
  ref <308>: DATABASE ACCESSION NUMBER: AK109033
  ref <309>: DATABASE ENTRY DATE: 2002-08-28
accaagaatcaatcaatcgagcagaaatttgatctgtacatctccagtcaccatggctgccgccggcagcagcaaaaccgcgagcttgttgctatgcctggcgatgatctccttcgtgcagctggcacagtcctcaccgagcggcgacaaaggcatcaaagggtttcacggcaagaagctcagcttcaccctgtaccagcaggagaccatcaacaagaccagctacatggtcgtcgccggcgtcgccggcgccggcgtcagcgagaccaccacgcccttcggcaccgtctacgtcttccgcgacgacctgacggtgcgccccgagaggtcgtcccgggtggccggcgtggtggaggggacctccgtgacgaccagcttcgacgggctgaggagcctgtcgctgggcaagatcacgctcgaccaccgcggccgccggggatccatgtccgtcctcgggggcacgcacaacacccggccgtccgactgcccggtggtcggcggcacaggtgacttcgcgtacgccgtcggctacgtccggacgtcgccggtgaacctgcggggatcgtcggtcacgttcaaggtggagtttcacctgtactggccaccgtatgctcattacgctccaacttcaaagcactagacaagtcgctgtcttccaccttgatgagcgcgtctgcgtgtgtactcgtttctggcagtccgatattatatcatgcatctgcctattttttttcagtctctcgctgagtagttaatatagagtttgaattacctctgggaggtatttccgtatttggtgtaataaaattcaagattgataatctgaggaattttcatgaaaaaattaaact

SEQ ID NO: 11686 - DNA, 1564 bp, Oryza sativa
  ref <308>: DATABASE ACCESSION NUMBER: AK109034
  ref <309>: DATABASE ENTRY DATE: 2002-08-28
actaattaatatttttaataatatacgaaaagtcgaacagatatatatagatagagagaaagaaaaaagcgaagctccacagcatacactacaatgatattagctcaaattacaagtatatcgtttgttctggttgcactcagtctagttgactactcgtcggcgcagttctggaaaaacgacaagatcgtgaaacaatggcagcaagcgaacagcaacagcaacgatgacaagtcgtcgtcgtcgagcagcggcaacaacatggcctcgtcctacatgaatgcattcgtaccatcggcgatgaacagcggtttgggaagcttgatcggctcgtaccaagacacgtccaaagactcgtcggctgccgcttcgtcggccgcgtcggttaaggacgactacgccaagagctacgtgccagcgtcagtgccgagctcagccgccgccacatacgagcacgccccagctctaaagcagccgcaaccgcagcccaactacgcgccagcttacccgtcatacgagtacaagtacccgtcgtacagctcatcgcacgagtacaaggccccatcttacggatcccacgaatacaaagccccgtcttacggttcccatgagtacaaggctccatcgtacggttcgcacgagtacaaggcgccatcgtatggttcgcacgaatacaaggccccgtcgtatggttcccacgagtacaaggcgccgtcgtacggtgagtcttacccagccgtccttccaccgagcattctcccgcaaggtgcctacccaattcatcagcccaccatcaccaacaccggcgagaccatcattgagaatctagtcggcggtattccattcgattgccgtggtcgatcgactggtcactggagagacaacaagtattgcgatatcttccacgcctgtgtctatggtattcagcgaaagacctatgtttgcccgtatgtcggcgagcgcacctatttcgatgagaccactcgacgatgcgaatttgtatatagaaacccacatggatgtggctccaactcgtactaccattaaactctctaatctttcaaactctcttttatatctatatatttctcctactttattcctttatgccaaatacaaatgagcggcgtccatatatcggagttttgttcgacattattattatataattttttattctgcctattaaaccattatattattattacatttttcacaaaaattaataataataatagagacttttagatgttttttttttagatgatgtactctaactctctctttctcggtcgcccgcgcacacttatagcaaaataacaatttttctcattttaatatatatctattaaagatttatttcttttcgttaatatttcaaaatgattaattaaatttattaaaagagcttaaaaaagaattgaatttttgtcttcaaaaagaatatatctccatgtttttttttcttcttctttcaaagtatcatatatatcatctattaggattttatcaaatcaaagttgattttctttttttgtgttataaataaaaatttttaaaaaat

SEQ ID NO: 11687 - DNA, 1257 bp, Oryza sativa
  ref <308>: DATABASE ACCESSION NUMBER: AK109035
  ref <309>: DATABASE ENTRY DATE: 2002-08-28
atatagggtgtgacgaggctctgctgccaggatcatgagattttcccgccatcttgctcgaatcacatccgccttgttcaccatccaacgaccagcttcagcagaagcacttgcaggcaacacaagcttcaatccgttgcgcggtatccagcaatttgcattgtcctcatattctggcaacatgacgcggctggctccagttatctcgttatcacatggcggcggaccaatgcctctgctaggcgatcctggccacaaagagatcaccaagtctctcaagaccaaagtgccaaagatcctgaagctaggaacttcagaggcacccaaggcgattctgctggtcacggcgcattggtcgacgaacaaagtcacagtcagcagcggcagcaaacatgacctgctctacgactactatggcttcccaccagagagctacgagatcaagcacgacgcaccagggagtcccgaggtcgcagaggaagtgaccaaagccctgaaagccgcaggaatcgagtgtgcaaaagacggcgagaggggctgggaccacggcgtcttcgtccccatgaagctcatcgacccatccgcccgcacgcccattgtgcaactctccgtcctcgcctcggaatcgccctcgcagagctacgccatcggcaaggcgctctcctctctgcgcgcacaaaacatcgccatcgtgggctcgggcttcgcaaccttccacaacctgcgtctaatgttttccggggcatcgtcgaccccggacttcaagaagcaaaacgttgagtggcctgctgcggtcacggacgcggccatgacaggtgacgcagacgcaagggcgcgcaaattcgaggactggaggaagtggcctggtgcgtatacgatgcatcctaggggtggcgcggagcatttcttgccgctgattgtgtgtgcgggcgcggcgggggagacggaagggaggaagtatgcggatgattttcgggggacggatatgtggagttactactgggagtgagtgtgtgggtagtaccattcctgcagaataggagtcgcacagcgttgcggcatgttccaggcaagtcgagtttgtgagaggatgagcaggaagacaggtgttgggtgtcgttcgttttcacgtgacgcgaaatgccggttcaatgcccaacatgtggagtagtactggagaggggtttggatagcggaagtgtttactgagcgggaaacagacgaatagcgcaaggaaatgccaaatcacttcccacc

SEQ ID NO: 11688 - DNA, 923 bp, Oryza sativa
  ref <308>: DATABASE ACCESSION NUMBER: AK109036
  ref <309>: DATABASE ENTRY DATE: 2002-08-28
atccagcttccacactcggtcctcagtacaacaatcatttaagatctacatcttccgcatcttcggatcatcaccctcgtcttacattcaatatgaagtggttccttgccctcgctcctctcgccgctgcgctccccagccttcccaccgttgaggttggcgatgctccccccgctggatccgtcaagatccgaggtgtcagctatggcggcactggatgtcctcagggcaccatgagctcgcagatctcgagcgaccgcagcatcgtcaccctcatcttcgactcgtacattgcctccatcggccccggtattgccgtcaccgagcagcgcaagaactgccagctcaacatcgacctcgagtaccccggaggcttccagtactcgatcctgtcggccgactaccgtggctactctgccatccagaagggcgtcaccggcaccctgaagtccacctactacttctctggtcaaactgctcagacctccaccacctacaagttcgagggccctaccaacggcgactacctcaagcacgacgaggctgactcgacctccatcatctggtcgccatgcggtgccgctggtatgctcaacatcaactcgcaagtccgcctcgaaagcaccgacagcaaggctaccggtcttctcaccaccgactcgactgatctcaagtttacccaagtcgtgtacgtccagtggcagaagtgcaacaaatagatgtaagaagttgagaatatcgtcaagcgcctcttacaatggcacgagcaagttggcgcttacgaagtggagggccttcaacaccaggaacttgtggtggaggcgctgcgaagatgaggcttgaagtgtgcacttttgtggactttttgtcgataacttttgagatcgttttgttgagtttcaatgggatggacgcatctctac

SEQ ID NO: 11689 - DNA, 1503 bp, Oryza sativa
  ref <308>: DATABASE ACCESSION NUMBER: AK109037
  ref <309>: DATABASE ENTRY DATE: 2002-08-28
tggaaaggcgccgccgagatggtgctcgcgaggtgcaccgtgtacgtcggcgcagacggcgccgcgcgcgagctcggcgtggagcagaggaggaagctcgagcaggtgatcaacgacatggcggcggcgagcctccgctgcatcgcgttcgcctacaagcaagtcgtcgacggcggcgacagcgacaacgccaagatcgacgacgaggggctgacattgctgggcttcgtcggactgaaagacccgtgcagaccagaggtaaaatccgccatcgaagcttgcaccaaagcaggcatcgccgtcaagatggtcaccggcgacaacgtcctcaaggctcgcgccatcgccaaggaatgcggcatcatctccggcaacgacgacgacgccgccggcgtcgtgatcgaggggcacgagttccgcgccatgtcggagcaggagcagctcgccatcgtcgacaacatccgcgtcatggcgcggtcgctgccactcgacaagctggtgctcgtccagcgcctgaagcagaagggccacgtggtggccgtcaccggcgacggcacgaacgacgcgccggcgctgaaagaagccgacgtgggcctctccatgggagtccagggcaccgaggtcgccaaggagagctccgacatcgtcatcctcaacgacaacttcgacacggtggtgacggcgacgcggtggggccgctgcgtgtacaacaacatccagaagttcatccagttccagctcaccgtcaacgtcgcggcgctcgtcatcaacttcgtgtcggcggtgaccacgggcaggatgccgctgaccacggtgcagctgctgtgggtgaacctgatcatggacaccatgggcgcgctggcgctcgccacggacacgccgacggcggggctgatgcgccgcccgcccatcggccgcgcggcgccgctgatcagcaacgccatgtggcgcaacctggcggcgcaggcggcgtaccaggtggccgtgctgctggcgctccagtaccgcggcttcggcggcgccggcgccggcgagagggcgaacgggacgatgatcttcaacgcgttcgtgctgtgccaggtgttcaacgagttcaacgcgagggagatcgagaggaggaacgtgttcgccggcgtgcaccggaacaggatgttcctgggcatcgtcgccgtcacggtggcgctgcaggtggtgatggtggagttgctgaccaagttcgccggaacggagaggctggggtgggggcagtggggcgcctgcgtcggcattgccgccgtgtcgtggcccatcgggtgggccgtcaagtgcatcccggtgccggagcggccgttccacgagatcatcacggcgaggaggaggaggagaagatcgacataactatcaacgcttaccactgttcatattttcggatttttgtcggtagcttaggccattcttttggagatattataccatcttgttatttgccatatataatatgatatatgatttgtttggttcatc

SEQ ID NO: 11690 - DNA, 1308 bp, Oryza sativa
  ref <308>: DATABASE ACCESSION NUMBER: AK109038
  ref <309>: DATABASE ENTRY DATE: 2002-08-28
aaaggcactccccgcaaaaacttccctcgcgttcgatttggtgtgacggcggcggcggcggcggcatctcgccgtgctagatggagaaggacaaggtgcaggaggaggcggggatcgagacgagggaggaggacgacgacgagtccgggacgaagagagagcgcgaatcaggggagatcgaaggaggcggaggagagccgagccggaagaagcgagaccccgaggcggtgtcgcgcttcaagcagcggtcggcggcgtggttcgccaagctcaaggaggagttcgagaggaaggtcgcggagcatcccgacgtcgactggtccgactcgctggccatcgacgcgagctcgtatcgcaaggattgggactacgtctggagccaagcctacggctccttcgacaaaatcacgcctatcccaccgatgcgctatactacggctgatcctgggccggattacgcatccgaacatgatgcagtgcagatcttttgtgtaaaaatcagagaattaagacggggcttacagtggccgatccatgtgtttggtctcgttgctgcacgggacgtaattgaccacaaccgcaatattatcttcaaccgcacgagggatgactgccaactcctcacccaagaggttccatatttactgttgacaggtcctacccgggcggttgtggtggttgatcctgtggactttgaggttgcgctgaaagtgaagggttcgatcgaatccgaggataaagatttaagctttcttgccgtgcagctcactcgtatctctaacattagtggaacacacttgattaacaaagagtacacaagcaagcttagcacactggagctgacatttggctacattgtacgctccgtggaggcgacgatcaacgtgcgagtcattgacgggtcatggccagaagaaggtttttcagctcggattactgcacatacctccagcctgaaggattatagagtcttactgcttgattctggagatgagatgaagaagatgtctgtcactgccgatggcatgatagagctgtcaaggcgtgttgtttctgttgaatttgagggggaattggaggtttctgttgcggcatttggatctaattgtaattatatggaagctgaggaaaagttcacacctaggacgatggtgaaagcaaggccgagcttgatgttggctttcgtaaactggaagtcactgtcttctggtcactcatgtccttgaatcctgatttgagcatgtgatgtattttgcgacctcactactgtatatattctgcttagtaagtttattgacgagggtaatt

SEQ ID NO: 11691 - DNA, 888 bp, Oryza sativa
  ref <308>: DATABASE ACCESSION NUMBER: AK109039
  ref <309>: DATABASE ENTRY DATE: 2002-08-28
atacgaaccgaaacctcagcacgatggctgttggcaagaacaagaagctcggcaaagcccgcaaaggcggtcgcaagaaagcggctgacccgtttctgaagaaggagtggtacgatgtgcgcacgccggcctgcttcccggtcaagtcggcgggcaagaccatcgccacgaagacgcagggcatcaaggtcgcccgtgacacgctgatgaaccgcatcattgaggtgtcgctgggtgatctgaaggacaacacggaggaggaggccttccgcaagttcaagctgcgcgtggaggatgtgaacggcttcaactgtctgactcagttccacggcatggacctgaccacggacaagctgcgctctctggtccgcaagaaccagtccctcattgaggcgcacgtggacatccgcacgtctgacggctattcggtgcgtctgttcgcgatcggcttcacgaagaagcacaaggagcacgtgaagaagacggcgtacgcttcggccgcgcagacccgcgcgatccgcaagaaaatgaaagaggtgatgaacaaagagacgacctccgtcgagctgcacgatctggtcactaagctcacgctcgagaccatcggtaaggagatcgagaagcacacgcaggccatctacccgctcaaggacgtgctcatccgcaaggtcaagatgctgcgcgcccccaaggccgacgtctcgaagctcgtggagggcgctggtggcgccgatgccctctccaagaccgtcggtcacgtcgccacgggcgtgaagccgaccggtggtgccctgccgccgtcggagaacacgggcaagaagatggaggacgacaaggaggaggacaagtaagcggcttctttagctgtcgctgaaaacgggtttcgtg

SEQ ID NO: 11692 - DNA, 1515 bp, Oryza sativa
  ref <308>: DATABASE ACCESSION NUMBER: AK109040
  ref <309>: DATABASE ENTRY DATE: 2002-08-28
tacaacaagagcgagatgccgcagtaagtgaatctcaagacttgcgcctgaagaacaaacagagaatttccatgccgggtgaagatctaaacaccgagttctcctcttatgagcttgaacaagcgaccagaggcttcgatcaagaactcaagatcggcgagggcggttttgggagcgtctacaaaggcacactccgcaacacaactgtggctatcaagctgctgcacccacatagcatgcaaggtcaatcagaattcgaccaggagattgctgttctcagtagagtacgacatccaaacctcgtcactttgatcggctcttgcagggaggcatttggcttggtgtacgaattcctccccaaaggcagcctcgaggaccgcctggcctgcctgaacaacacgccgccattgacatggcaggtgcgcaccaggatcatctacgagatgtgctcggcgctgagcttcctccactcgaacaagccgcacccgattgtccacggcgacctgaagccggcgaacatcctcctcgacgccaacttcgtcagcaagctgggcgacttcggcatctgccggctcctgatacagacgaacaccggcgccgccgccgccgccaccacccggttgtaccggacgaccacaccgaaggggaccttcgcgtacatggacccggagttcctcaccaccggcgagctgacgccgcgctccgacgtgtactccctcggaatcatcatcctgcggctgctgaccgggaagcctccccagaagatcgccgaggttgtggaggacgccatcgagagcggcgggctgcactccatcctcgatccctccgcggggagctggccgttcgtgcaggccaaccagctcgcgcacctcggcctgcggtgcgccgagatgagccggaggcgccggccggatctcgcgaccgacgtgtggaaggtcgtcgagcccctcatgaaggccgcgtcgctgaccgccgggaggccgtcgttcgtggcccggccggacgactccccgccgccgtcctacttcgtctgcccgatctttcaggaggagatgaacgatccccacatcgcggcggacgggttcacgtacgaagccgaggccatcaaggggtggctcgacagcggccacgacacgtcgccggtgacgaacctgacgctcgagcaccgcgagctcatcccgaacagggcgctccgctcggccatcctcgagtggcagcaacagcgtcaacggcatcagccgcaagaggaggacgacgactgtacatgagcaatctctcatcaatcatcactcaccgcagttgatatcctccatacctggcgcttcgcttcgtcctgactgtagatcctgcacatacattagcattagctttgcttgggttgaaatttgaagatccaagattgctcgagaaaaggggaagtttaccctgttcgtcttttgtgctcgttaatttgatttgcgatttccgctgtggagtacagacatttgcagttggtaatcctacccaattttaccc

SEQ ID NO: 11693 - DNA, 1438 bp, Oryza sativa
  ref <308>: DATABASE ACCESSION NUMBER: AK109041
  ref <309>: DATABASE ENTRY DATE: 2002-08-28
aaggcttgagttctgttcagtccagtcttcgcattccttaccaatggctccttacactctccttgcgagcgccctcgtcggcctcgccgttgctcagactccttctggcgccccagacaaccatcccaaagtcactacatggaagtgcaccaccgagggtggctgcgtcgagcacacgaatgccctcgtcatggactctgccgcgcatcccatcaagcgactagaccagcctggcggctcatgtggtaattggggaagcccagcagaccctactgcatgcccagacaaggagacttgcgcaaagaactgtgttatggagggcatctccgactacggcgcgtacggaattcagaccagcgctgacaacatcgaactcaagatgttcaacccaagtggtggcttgtcgagccccagaatctacatgttggcggaaggcgagaaggagtacgagatgctgcaattgaacggcaaggaattcaccttcgatgtcgatgtctctcagctcccttgcggtatgaacggcgctttgtacctgtctgagatggaggccgatggtggtcgatctgagttgaaccccggaggtgccacatggggtacaggatactgcgacgctcagtgcttcgtcactccctgggtcaacggagagggcaacatcgccggcaatggtgtctgctgtaacgagatggatatctgggaggccaactctcgctccacctccattgccccccacacctgcggcaaggacagcctcttcctgtgcaccggcgaggagtgcgaccagggcggtgccggtctctgcgacaaatggggttgcagcgacaacccctacaagcaccgggccaccaaggactactacggccctggcctcaccatcgacaccaagaagcccttcaccgtcgtcacccaattccccaccaactccgagggcgtcatgcaggccattgtccgcaagtacgtccaggacggcgtcgtctacgagaacgctgccgcaaatatcaccaacgaccaggccttctgcgactcctttggcggagccaccgaagcctacactcatcttggtggacacgccggcatgggcagggccctcgagcgcggcatggtgctcgctctctctatctggtggagcgacggtgacttcatgcagtggctcgacggcggcgacgcaggcccttgcagtgctactgagggcgacccaaagaacatccagacgattgtcgccgaccctgttgtcaacttcagcaagatcaagtggggtgacattggctcgactttcaagggtaactctacccgcatggtccgcttcagggcttagatgatgggctgagatgagtgacgaagggcttgttgcatcttgattgtaaatattcaaatatagatatccacactgtgtatatagctggaaatcgaaacagtacgaatcgatgttttattttattgc

SEQ ID NO: 11694 - DNA, 1186 bp, Oryza sativa
  ref <308>: DATABASE ACCESSION NUMBER: AK109042
  ref <309>: DATABASE ENTRY DATE: 2002-08-28
aaaaaaaaaagaaacggcgcctcctcttctcactcgtcacccgacaccgcagacttctccctctccgccgtcgtcgtatcccgcctccttcacaccatcgccgcccctcaatccatcctcgcgcctccctcgaccgccgccgcaccgatccgatctctctcgcgcttctcccccgctgccgccgctccagatccccccgcttttcctcctccttccgcccacctgccatcgacgccactgcccctgctgctgactccacctcctccccgccgccgacgcctagcgccgctgctgcccacccgcaaccgccattgcccaaccgcaaccgccgttgccgccccagataccccgcctttcctccttccgcccacctgccaccgacgccgccgcccctggcagtgactcctccccgacgccgacgccaccgccgccgacgcctactgcaaccgacgccgaatcccccgccgccaacgccaccgccaccgccgtcgacgcctactcctttggcagtgtggaggactgctgcttccctgtccccatctagtgtgtgcacgctttgtgtttgttaaaatgcatatgtgaaaaaactgtgggtataaaatgatatgctgcagattatcttttcctgttataggttcatcaataatggtttccctaattcaactttcagattgctgaatcttatggtctagattgatagctgatgcattggggtgatcatacaaatgatttccgttggtaatcatttttccctaccttaccatggaatctctactcctcactgaagcttgaaatgctagctcctcggggctcaggtgcgctggagcatgcagtttgacaacaagtacattgctttgtgtctatgcttccctactgctcaatgaaatgattggctgggttagctcctgtacttaaatcggtttcattcctatgcaacaattaagcacaaaatataacatagttggggggttcatgatgtttcagaaacttggatgtattctgtgtatattaatatttaggatgtgagaatgaaatttctccctttcatgtcttcatggaggacaataatggtaaccacagttttttcacatatgcaacaatcaagcacaaaataaaacatagttggggagttcatgatgtttcagaaacttggatgtattcggtgtatattaatatttaggatgtg

SEQ ID NO: 11695 - DNA, 1378 bp, Oryza sativa
  ref <308>: DATABASE ACCESSION NUMBER: AK109043
  ref <309>: DATABASE ENTRY DATE: 2002-08-28
cttgaagaccataaaagaagtcctacaactgaaaccatatgtgatggagatctgctaatcccagcccaaattagagacagaatcaagtcatcaacacatgatttattatggaagaagaaattaacctcaagacatacacactcttactttctctctcgtcctactaagtgttgtggaagagggaagattagtcggcggcgaagacggcgccgttgagctggaaggcgccggtgaagaaggccggccagcagaggtaggtggagaggatgctgctgacggtggaagcgcccatgagcatgttcatcaccacgatctgcagctggatggcctccagcggcgacgcgccgcccatgatgaggccggtcatggcgcccggcagcgcgatcagccccaccgtcttggcgttgtcgatcaccggcgacagcgcgatcaccagcgacctcctcacctgccgcgccgtcgcctgccgcggcgtcgcgcccagcgccagcgccgtctccatcacccctcgctgcatccccacgtcctccctcagcttcttcatcgtcaccccggtcaccgtcatcgcgttcccgaccatcatcccggccaccgggatgatgtaccgcggcgtgaacgggaacacccggagcgccacgaggagggccatggtgacggaggtgccggcgaggatggagacggcggcgatgtgcttcccccgcgggacgtggcgggcgcgctgccccgcggtgtagccggcgacggtgaccatgaagaggtaggcgaggaggatccaggcggcgctcttctgggtgaagatgaactggaggacgaagccgatgacggagagctggaggaacgcccgcgccatggcgtacagcatctcgccctcgagccccagccgctgcgtgaagctcagcgccaccgccatcgccaccaccgccgtcgccgccaccggcttcagcatgcccaccaagaactcccgccagaaccccggcgcgcccgggtccacctgattcaccaccaccagcagacgctgcagcagcgccgccatgctcgccatcatgcgttccagagcgaggcgaggcgaccgagcgcgttgatgaagacgaggaggagttggtggtggtgagcgagcggaagcgggggaggcggcgagcgagggaggcgactacgccttcttcttcggctttcgcggtgtttctctctgcttccttggcggcgtcggcgtggcgtttgggtgctacgtggggaaggcacgctggatggtggggcccacgctgcagtggcactacagtatttgtgttttttttaatcttgtcagttgatgaagaactacagtgcccgcctctcttttccatcttttattaaaaaaaattaatatcgtcagttgatgaag

SEQ ID NO: 11696 - DNA, 1470 bp, Oryza sativa
  ref <308>: DATABASE ACCESSION NUMBER: AK109044
  ref <309>: DATABASE ENTRY DATE: 2002-08-28
atatcaagaatttataattcttaaagaaattgattaaatatactgtgatagaatctaaaagagaatggcaagtgcattgttcggtagcggaccagttcggtcgaagaatttggtcgagttcaaagcgggtcgaatgaacctcaagggcaaaatggttcatcccgataagaggaagggcctcgtctatgtctatcagtccgaggactcgttgatgcacttttgttggaaggacagatcaaatggaatcgtcgaagatgaccttatgattttccccgatgatgttgagatcaaacgagttgcgcaatgcacaaccggtcgcgtttttctcatgagattcaagagctccaataagaagttcttcttttggatgcaggaaactgagactgagaaagacgagaaattgtggaagaaagtgaacgacctgttgaacaacccgccagcgccgggttcggcctcgtcgtcggtgacaagcgcgagtggagcgggcgaacgaggcgcggctagttcggcgagcggcgccggcgttgctggtgttccaggcggtctgcccggtgttctaggcgccgactttggcaatctggaaggacctgagttgcataatttgatcggatctatgagcgatcagcagctgcagatgttcctcggcggattcatgcctgtcaattcgccttcgtccaatcgatcgtccaatttgtccagcaatcaagcgtctcgtgtgcaaagcacaacgccagcatcccgcaccgagccgacatcagcagcggcagcagcagcgagctctcaaccatcatcggccgtgccaacaagcgccacaaccgagacgaaaccctcagcagcaacagcgggtagtcaagacggcacaagcagccaacaatcatcgacaaccgagaaacaagagacaacaaacggcggtgcaccgaagatgcaattcagcgacttccagaacatcctgggcaacctagcagcgagtggcggcggacgatcggacctcgacctgtcggacgtgctcacgcttgacgtgatggcgcctatactcagcaacaaggacgtgcaggcgaggctcatcgagcacttgcccgagtcgcccgacattctcgccaagaacgagcacgagttgcgtcagaccatcacgacgccgcagtttaagaaggcgttgagctcgtcctgcatggccttgcagagcggacagctcgggcctgtcttcaagcagttcgatctgcctgatgaggtctccaatgctgctgctcaaggcaatctagaggcgtttgccaaggctatggaggctcatgctaagaaggccaagaaggctaatgatgacgatgctatggacactaaataaactcatgacttatttatttcattaattaactatattctatctttaatattttttattctcttaaatatttctatttttttttcatcaatagacatttatttcttgatttgaataaaattcgattcgatttt

SEQ ID NO: 11697 - DNA, 1370 bp, Oryza sativa
  ref <308>: DATABASE ACCESSION NUMBER: AK109045
  ref <309>: DATABASE ENTRY DATE: 2002-08-28
tccgcgtcgtctgggagaacgacaagggcgagtgccaggtccagaagggctaccgcgtgcagttcaactcggcacttggcccctacaagggtggtctccgcttccaccctaccgtcaacctgtccatcctcaagttcttgggatttgagcaaatcttcaagaatgccctgaccggactcaacatgggcggtggcaagggaggctgcgactttgaccccaagggcaagtccgacaacgagatccgcaagttctgcgttgccttcatgagggagcttaacaagcacattggtgccgacacagatgtacctgcgggcgatatcggcgtcggtggccgcgaaattggctacctcttcggcgcctaccgagcagagcgtaaccgttgggagggcgttctcactggaaagggaggctcatggggaggttccttgatccgtcccgaggccactggctatggtcttgtctactacgtcgagcacatgatcaactacgcctctggcggaaaagagtctttcgccggcaagcgcgtcgccatctccggttctggaaacgtcgcccagtatgctgcgctcaagatcatcgagcttggtggcactgtcatctctctcagtgacagcaagggcgctttgattgccgacgacgacaagggcttcaccccagaagttatcaacgagattgctgccctcaagctgcagcgcaaggcgctcactgcccttgagaaccacagcttcaggtatgtcgagggtgcccgcccatggaaggaggtcaagaaggtcgacgtcgctcttccctctgcgactcagaacgaggtctccgaggacgaggccaaggctctcatcgagtccggagccaagttcatcgccgagggttccaacatgggctgcacacaagaggccatcgaagtcttcgaggcccaccgccgcgagaacaagggcagcgccatctggtacgcccccggcaaggccgccaacgccggtggtgtcgccgtctctggtctcgaaatggctcagaactctcagcgtctgtcctggtctgccgaggaggtcgacgagaagctcaagggcatcatgaaggactgcttcgagaactgtctctccactgccaaggagtacttcactccttccgagggagagttcccatctctcgttggtggtgccaatgttgctggtttccgcaaggtcgctgctgctatgcacgaccagggtgattggtggtgagcaagtcgctacttgacttgacgcgactaatcttatctcttttctgtgtttctctttatacctcacacgatacctttacattgggcatggcgttgggaggggacttggcagtttgtacatagataaaatcttgatcatgatttgaaaacaacagtg

SEQ ID NO: 11698 - DNA, 1134 bp, Oryza sativa
  ref <308>: DATABASE ACCESSION NUMBER: AK109046
  ref <309>: DATABASE ENTRY DATE: 2002-08-28
gtgcaattcatttccaaacaatggcaactaaaactaaactccgtattttcgtcgctggtggtggtggcttcattggtagtcacactgctaagcgtctcaaggaagagggtcacttcgtgcgcgtggctgactggaagagacaacactactttgaggacagccaaatatgcgacgagttccatgacgtggacttgcgtgatttgaacaattgtattaagatgtgcgaaggcatggacgaagtctacgactttgctgcagatatgggcggtatgggttttattcaatccaaccactctgttatcttgtacaacaatattatgatcagcttcaacatggtggaggctgctcgtcgctctggttctgtcaagcgattcttctacagctcctcagcttgcatctaccccgaataccgtcaattggaaactgccaatcccggtttgaaggagtctgatgcttggcccgcgcaacctcaagatgcctatggtcttgaaaagctcgttaccgaagagttctgcaagtactacaacaaggactttggcattgagttccgcattggtcgcttccacaacatctacggcccccacggcacttggaagggtggtcgcgagaaggcccccgctgccttttgtcgcaaggccctggtgtgcggcgatgtgttcgagatgtggggtgacggcgaacagacgcgctccttctgctacattgacgactgcgtggagggtgtgttgcgattgatgcgcagcgatgtgcgcgagccgatcaacattggcagcgaggagatggtgagcatgaacgacatggcacacctcgtgctcgactttgcgggcaagaaggacagcaccaagttgcatcacattccgggacctgaaggtgtgcgcggtcgtaacagcgacaacaccctcatccgcgagaagttgggctgggctcctatcatcaatttgaaggacggcttgaagcgcacttttgactggatcaagatccagatcgagaacgagaaggcgcaaggagtcgatgtgtcgcagtacagccaatcacacgtcgtcaatcagaagcccactgacttcactaaataagcactctatataaataggcctctgtggtgctgctcgaggcaataaattctacttttagtat

SEQ ID NO: 11699 - DNA, 1358 bp, Oryza sativa
  ref <308>: DATABASE ACCESSION NUMBER: AK109047
  ref <309>: DATABASE ENTRY DATE: 2002-08-28
aaaagcacacgcgtcaccactcactcacaagtcacaactccgacgagacccaacccaacccgggaaggcgatgaagggcggggtcatcaggagcggcggcggcgtcggcggcatcggcgtcggcggcggcggcggaggcgggggagccggcggggggctgatgcgcacgcggctgcgcctccccgtcgtgctcctctcctgctccctcttcttcctcgccggcttcttcggctccatcctcttcacccaggatccgcagggggaggaggagctcgacacgccgatgaggagggagcggctgatggaggcggcgtggcccggaatggcgtatggcgagtccggcgagccggagccgtccttgatcccttaccagattctgagttggcaacctcgtgcactatattttccacaatttgcaacatcgcaacagtgcgaaaatattgtaaaaactgctaaacaaaggcttatgccatcgacattggctttaaggaaaggagaaactgaggagagcaccaaaggaataaggacaagctcaggcacatttctaagttctgatgaagatccaaccggaacccttgctgaagttgaaaagaagattgcaaaggccaccatgatccctagacatcatggggagccctttaatatcctgcgctatgagattggacagaggtatgcttcgcattatgacgcattcgacccagctcagtatggtccacaaaaaagtcaaaggatcgcgtctttcttgctttatctcacggatgttgaagaaggcggagaaaccatgttcccatatgagaacggggaaaacatggatatagggtatgactatgaaaagtgcattggcttaaaggttaaaccaaggaagggtgatggtctcttgttttactcccttatggtaaatggcaccattgatccgacatctcttcatggtagctgcccagtgatcaaaggagaaaaatgggtcgccacaaaatggattagagacaagagtaaggcagtgtaaatgtggtataggagtctccacgccccatgtagatcataggcatatatatactaaacaatctttgtacacgtttctgtacgaacattacatttattcaattttcatcagcatgaatgaactagtgagaaatgatgtcactttctccttttgagtcttcgaagagaagtatttgcacttgtaggtctgggtgttaatttttccacacttgtagggcaagaaaatttgctgctatgggtgacctgatcttctgcaagtctttggaggagctggcttgtactttctcaacttgtacggcacgtcgattagtctgaatagcttcctctgggccaggggcaggtgcatattcgcaagatgt

SEQ ID NO: 11700 - DNA, 2221 bp, Oryza sativa
  ref <308>: DATABASE ACCESSION NUMBER: AK109048
  ref <309>: DATABASE ENTRY DATE: 2002-08-28
actccatctctacttcctgtactcgaaggactacggcaagtgtgtgaggaaatcgaggcgtcgtcgttgtcctggcttcgctaccttttcgcatcctcttcgtgtctgtcctgctgttggccaacgatagcatctcaagatccgagcctatctccagcttaggtccggaactgccagacagcctttaacagcttgtttgacgatatcaaacctatcgacgagcaatcgtttggcattctcttggttctgcggtagaagcatctccagccaacatgaggtacaacgcactcgtcgctggcctgctggccgttactggaggcagcgccgtttccgcctcaaatacttaccacatcgagggtgaggtcgttgagcagctccataacgttccaaaaggctggagcgaagtcggtgtgcctagtccggaccagaagctgcgtttccgcatcgccctacgctcggcggaccgcgagctgtttgagagaacgcttatggagatttcttctcccagccatcctcgctatgggcagcacctgaagcgagatgaactcaaagacctcatcaaaccgcgagctgagtctagttcaaaggttctcagctggctcgaggagtctggaattgaggccagggatattgagaatgacggcgagtggatcaacttctacgctccagtcaagcgtgcggagcaaatgatgggtactcaattcaagacgtaccagagcgaggcgcggtccaacgtcaaaaagattcgctctctgggctactcggttcccaagaacgtgcgggatgacatcgacattatccagcccacgacacgttttggtcatattcagccggaaaatagtcaggtgttcagtcaagaggaaattccattttcagcacttgccgtcaattcaacatgcgataagaggatcaatcctgactgtctcgcggacctttacaactacagagactacaagcccagcaatgtcagcgtcaccatcggagtgagcggtttcctcgagcaatatgctcgcttcgccgacttggaaaagttcatccccatgttcgcaccaaaggcagctggctctacgttcgcagttacaaaagtcaacgaaggacctttcgaccaaaactcgacagcagatagcgtcgaagctaacctggacatccagtacactgcaggtcttgtcgcgcctaacatcgcaacacgcttcttcaccactcccggtcgtggacttttggtccctgatctcgaccagcctacccaagctgacaacaacaacgagccctatctggactactttacatatcttgttgggcttgaggatgacgagctccccgaggtgctgacaacatcgtacggcgaaaacgagcagagtgtacccgttgaatacgcaaagaaggtctgcgacatgattggtcaactgggtacccgtggtgtttccgtcatcttctccagtggtgatactggccctggatctgcgtgccaatctaatgatggaaagaacacgactcgtttcatgcccacgttccctgcttcttgcccctacgtcacttctgtgggtggcactttcggtattcagcctgagaaagccgttgacttctcttccggcggcttttcggatctttaccctcgacctgcctaccaagaaaaggctgtgactagctacctcgaaaagcttggggaccgctggaatggtctctacaaccctaagggtcgcggaattcccgatgttgctgctcagggacagaattttcaggtcgtcgacaaaggcagaacaatcttagtcggaggaacgagtgcttcagctcccgcgttcgcgtctgtggttgcgctcttgaacaacgctcgcaaagcggcgggtatgccttcgctcggctttttgaacccttggatctatgagcagggctacaaggggatgaccgacatcactgcaggaggctcaaccggatgcactggaagatccatttactcgggacgccaagcaccgcgtgttccttatgcttcttggaatgccacagagggttgggatcctgttacgggccacggcacacctgattttaagcaattgctcggccttgttacggcgcctcagcaaggcgagcgtcgtgtccgtcgcggtggtctcggtggcagcgcttgaacatgtttgtgggaccgacattcgtgctgaggcctcgggtatcatgcaacacgaggtcctttagatagaaatgtgattcagggagcatatggtctatg

SEQ ID NO: 11701 - DNA, 1059 bp, Oryza sativa
  ref <308>: DATABASE ACCESSION NUMBER: AK109049
  ref <309>: DATABASE ENTRY DATE: 2002-08-28
aaggcggtaagagaagcattgattcacccatggagagtcaggtgctccgggacgccggcgccgccgtgctcaccggagccaccgcgctcgccgtgcttcgcttctgggaagaggtcggcaaccgcgccctcttggaccagaaactttgcaggaaactcgtgcacattactgttggcttagtatacttcctcatgtggcctttgttcagtgcggatgatgtctatgctccatttcttgcttccattgtcattgcattcaacatcataaaggttaccttgattggacttggtattgtcaaagatgatggtgtcattaactccatgaccaggaacggagaccctagagagcttcttaaaggaccactgtactacgcttgtgctatgactctcgctactgttattttctggaggacatctcccatttcaatcgctgtgatttgcaacttgtgtgccggagacggtgtagctgacatagctggaaggcagttaggccgtataaagcttccttacaaccctgacaaatcttacgctggatccattgcaatgttcttagctggtttccttgcatcaatcctgtacatgtgctacttccacctcttcggatttgtcgaggagagctggaccatggtgattgcctttggcgtgacatcgctttctgctgcaattgtggagtcgctctctatcagcacacgcttggacgacaatctgactgtgccactcgcctctgtcctcattggtgtccttgttttctattatattggggccagaaacctgtgctgcatgagcgctgacagcagcgatatttctgcacttgttcagaatcagatgttcttgggcaggttctagtgagtagccgccttgcagagctcaaaaacaaccgacttactaaaatcagattcgattagatgtaacaacgatggatacaggctgcaagaatcataattttgtgattgtatcttgtgatcaaggaaaacaaaaagtatctgactgtctgatattagtaaagcaaaactcgaggagaggaaaaacacaccagatagcaatcttcactttcaggtcc

SEQ ID NO: 11702 - DNA, 1026 bp, Oryza sativa
  ref <308>: DATABASE ACCESSION NUMBER: AK109050
  ref <309>: DATABASE ENTRY DATE: 2002-08-28
aagtctgttctgttcgagcggtcgattctctgttattcgagacagccttcacgaggacagaaatgagagtcgtctgctttgctttggtcatcgtcgccctctgctgggcacatgcgactgccacccagctcccccctggatacaactccgcgaacgagcttgcgactgtcctcgctaacgagccggatgctgctcgttttgcctccaccggcttcggtggtgacaccatcaccttcaaggagggaggcgacgaccaccacgacgaccacgctgccgatgcccacggcgcgagcgatgctgattctgataccgctgagttcgatgcccaaatcgagcagattaaccacgatctgaagaagctgaagggtgctatcaaggagtccgaggagtgctctcgtcgtctcactgaacagcaagccgaagttcgatcgctccaagaacagaaggaacacctcgagaaggagaaggagaagcgcatccttcaagccaagctcgagaagcagatgaaggatcttgcggaaatcaaccgcatgtcccgctctctccgcgccaagttctccgaactcaagcacacccagaagctcatcaagaccaagatgtccggtacccgctcctccctcagccaactcgactccgactccgagccccaatcctcttccgatctctccgagtccaccgatgccatcaccagcgaggtcgatgccatgcaaaaggctcaaaccgaactcattgctcgcgagcacaaatccacctccagcgccctcaagagcacgctcaaccgcgccaacaaggcctacacctccaagggccaccaccaccactaattctaagtccccgtttcgcccttcttttcgtagctgtgtcaggtttggttactttttcagaggacacgctgctagtgtagcgtcaccaattgatgcgtgtctttctgttttaagttataccgcggagataatgagatgtcgttgttggttatcttcgttatctggcattgcatgtaagaaatacatcatgacttctataacg

SEQ ID NO: 11703 - DNA, 904 bp, Oryza sativa
  ref <308>: DATABASE ACCESSION NUMBER: AK109051
  ref <309>: DATABASE ENTRY DATE: 2002-08-28
attgtcgtcgctcatacaactccaagatgtcttctccaaagctcacagtccaccacctacaagtaggccaaggcgaacgaattccctggctgctcgaagaactcaacatcccatacaaactcgtgctctacaagcgctcaccactcctttcaccgcccgagttgaaggccaagcacccactcggagcttcacccgtccttgaagaccacaccgaccccagtaatccgatcacactcgcagagtccggggcgatatgcgaatacatcatctacaaatatgcgaatggccgacttgcgctcccacccactcacaagaacttcgcggactacctctactggttccacttctccaacgcgacgcttcagagcggcttgttccgggccacgatgaccagaggcatggtaggcgagaacgacccgagacatcaaggcagcgaagcccgcgtaggcaaagctctcgaccacattaataatcggctcctgactaccgacgcctggctcgcgggcgacgagttcacggcggcagatgtcatgacgggatggtgcttcaccacgatgcgccagttcgcgcccttggatctctcgaaatatgagggcgtgctgaagtggttgaagcgcatcggggagcgggatgcgtaccgacgtgctatggccaagggagaccctgatttggatgtagacgagggattgagtgcgaaagggccgcctccacttgagatatttgcgaaggtgtacgccgggaagaagtgagttggttggtgtgctttgagggggattgatgctgatggattcaggggaggtgaggctgggaagaagagagagaagctatagatacgtggacggttatgggatcctgtacatgtcgttacgatgactccgcccgaatagaagacgctcgccactcc

SEQ ID NO: 11704 - DNA, 1448 bp, Oryza sativa
  ref <308>: DATABASE ACCESSION NUMBER: AK109052
  ref <309>: DATABASE ENTRY DATE: 2002-08-28
ctgttgttgagcctactcttgagtttgcaattgtacaagatgtagatcgtcttgatgcaattggtgcaattggtattgcaagatgttttacgtatggtgggagcaagaaaaacacattgcatgatcctaagatactgccgcgtgataatttgtcaaaggagaaatacatgtccaaggatgaaaaacagacatcaattaatcatttccatgagaagctatttaagttgaaggacatgatgaagacagaggccgggaaaaagagagcagagaaaaggcacaagttcatggaggactttgtggctgaattctatgaagagtggagtggcagagcttgaagttgaccaaccaggttatgggctgttggtctgtggcatagcttgaagttggccaaccaacaacaactcatattgctagtcgtctacttggtgacattagcatgttttgttgctgatatgttaagccatgcaaaaaaacgagggataaagcacacttgagtggccaaaccactgaataatgctcctcaacaggcaccacacttggctacagtacatattgctatttggacaaaaaggaaacagatcaaatactagtacataacagcaaacttcaaatgaagaaacaaatgcagaagaaagctttgcacagtgcacacgcatcatctgcttcaccgaccacatctggaagccaccattgcttccatcatgtcctccatacttttttttccccaaaccatgagccttattgccaaagctgtttaacaacttggtttcaaagcttgctcttgtccctcttggtcagcttcaccttgagcccatgcttcatgtatatggtgagcgccatcttgggcgccactgggtggccgtcgacgacgcggacgtggtaacggcggaggatggaggccgcggcaaacttcatctggtagtaggcgaagtccttgccgaggcacagacgagggccgccgttgaaggcggtgaacttgtaggccgattcgcccatgaagcggccgtctctgagccacctctccggcttgtactccctgcggtcctccccccagatgctctccatcctgcccatggtgtacatggcatagatcacctttgtccccttcttcagcaccgtcccgtccgggaacacctcgtcctccacaacctgacaacaggccatgagaaatgttaagcctgaagattagctcatctgttttttttttcttaaaaaaaattgggtgtcacaatctttatggctcaaaacttaaaggaggatttaatttgctgacaaataggttgtcattggatttaatttgctactattgatttcctctggcctgatagtttggtaggtgatctgatgcaaaagatgtttgaaattatctgatccggcagtaagttataagttgtacttttaggatctgtataaccattaatcaagataaagagtacccttttgttgtc

SEQ ID NO: 11705 - DNA, 1200 bp, Oryza sativa
  ref <308>: DATABASE ACCESSION NUMBER: AK109053
  ref <309>: DATABASE ENTRY DATE: 2002-08-28
gacccgacccgacaccgaccgaccgagccctcgccgcgcgccgcgccgatgccgcaagcctcctcctcctcctcgccggcgacggcggcggcgccgcctccgccgcagcctgcggcggacccttctccgtcggctgtgccagcttcggaggaggcgctggacccgcagacgccggcgccgccgccgcaggcgcagccggaggccgtgctgaccgccgcgcagaaggcgctccgctccaagccgacgaggccgcccgaagactccgacaagaagaataaaaaactcaaggatgtggagatcagtttcccaattgtctatggaaccatttctttctggcttggcaagaaggcaagcgagtacaactctcacaaatggactgtgtatgttcgctctgcaacaaatgaggatttaagtgtgatagttaagcgtgtggtgtttcaacttcacccgagtttcactaatccaacaagagttgtagagcaaccacctttcgagttgtctgaatctggctggggagaatttgaaattgcaataaccctttatttccacagtgacgtgtgtgaaaagcgtctggatttgtttcatcaacttaaactgtatccagaagaggacactggaccacaatcaactaaaaagcctgttgtcgtggaaacgtacgatgaaattgtcttccctgagcccactgaggcctttttccaacgagtacaaaatcatccagctgctactgtgcctaggttgcctcctggtataacctcgcctcctccaggccctatggaacttgtgccacatgaaaagaagcgtggtgacactaaggatcatcctttgagccagtggttctcaaatttctctgaagctgatgaactattaaaactggctgctgctcggcaacaggtgcaagctcacatagctaagctgagaaggcaattaagcatgatagatggaatgcctcagcaatccaaagctgtttctgttcaaggccaacaatttgggcacggctaatttgctacaagtgctgtcataaggaagatgttgggatctgataacaacgctctaactagatgataacaagtgtatcactgtatttccattgtagctgttgccttagcccttgggcttgcaattaatgtactaacaagcagtgtcattgtgcatatattctactatgatttcattcatcttatgagaacacctacttctctg

SEQ ID NO: 11706 - DNA, 1275 bp, Oryza sativa
  ref <308>: DATABASE ACCESSION NUMBER: AK109054
  ref <309>: DATABASE ENTRY DATE: 2002-08-28
acacacaccacagtcgcaatcagacattctctcttgttggttaactaaatagcttaattaatttgaggagtttagtctctgaaacatggcgatggcgacagcagcatgcagaaggcctgcagtgatgctcatggcgttcgccatggcggctgcggtgacgatgagctccgtgccgccggcgtcggggacgacgacgctgcagtacgacttctactcgtcgtcgtgcccgaaagccgaggagacggtgaggaacgtcgtcgagccgatgatcttcaacgaccccaccatgggcgccgccttcatccgcctcttcttccacgactgcttcgtcaggggttgtgacgcgtccatcctgctggacccgacgagcagaaacacgcagccggagaagacggcgatcccgctgcgcggctacgacgccgtgaacaagatcaaggccgccgtcgaggccgtctgccccggcaaggtctcctgcgccgacatcctcgccttcgccgcgcgcgactccgccgtcgtcaacggcaacttcgccttcgccatgccctccggccgccgcgacggcaccgcctcctccgcctccgacgtcgcccggttcatcccgtccccggcgttccacctccaggacctcgtcgacagcttcgccgccaagggcctcaccgccgacgacctcgtcatcctctccggcgcccactccttcggcctcacccactgcgccttcgtcaccggcaggctctaccccaccgtcgaccccaccatgaacgccacgttcgccgcggcgctcaagaagctgtgcccgccgccggcgagcggcggcggcgggagggcggtgagcaacaaccaggtgaccgaccccaacgtgctgagcaaccagtacttcaagaacgtggccgccggggaggtgatgttcacgtcggaccagacgctgacgagccgcgacgacaccaaggcgatggtcgacgacaacgccgccaacccggtggcgtggatggcgaggttcgcggcggcgatggtgaagatgggcggcgtcgaggtgctcaccgggaacgccggcgaggtcaggaaggtctgcttcgccaccaacacggcgagctgataattaagctacaagttctctttctccagcgatcggctggatcattaccacataatatatatattccttgttattttgatctcttaatttgtactccgtagttacctgcatcgattcttgctgttgtaaaactgaattgtaattcactatctttgaatattcagtgatcagttacagtggtt

SEQ ID NO: 11707 - DNA, 965 bp, Oryza sativa
  ref <308>: DATABASE ACCESSION NUMBER: AK109055
  ref <309>: DATABASE ENTRY DATE: 2002-08-28
tgattcatgtaaagattgacagtgataaaagcgtggtttatgaggttccatgccaatcagataactggtgctgagttcttgttgcataacatgttctgtagcatcatcatatattgatagtacaaccttgacgatggacactgaacactacctgatggtacaagtgagaaaactacaaagatatgaggcatgttatgcagacgacccagcaattattttgttgatatgcttataaggtaccagtacaagcgagaaaactacagagacatgaggcatgttatgcggacgacccccaattattgtgttgatatgcttataagtctcagcagcaggcgcacgcgtcgcgccacaggagaaggcggagtccgcgacgccgatcccgacgctgtcgccaccggaggggaacatgacgttcgtggacggcgtgacgtggtgcgtggcgcggccgggggtgtcacaggaggacctccagaacgcgctggactgggcgtgcggccagggcggcgcggactgcaccccgctgcaacccggtggtcggtgctaccagccggacaccctcctctcccacgcctcctacgccttcaacatcttctaccagcagaacggcaactccgacatcgcctgcaacttcggtggcgccggaaccatcatcaagagaaatccaagttttggatcatgcaagttcctggcatccgagacatctgctgcatcagcactgactcgaggaagcatgtggatgatcttcgcagctgcgtctatgatgtttcttcatctgagagttttccaatccgtgtgaattgggtcgatgctaccaaagtaattagtacctgtggtggtttggttctctttgtagtatattacttatgtaagaagcaaggaacagtgctagttttttcgtgtaaaattgtgaagattatatattactacctccatcccaaaatgtttgacgccgttgactttttttt

SEQ ID NO: 11708 - DNA, 1076 bp, Oryza sativa
  ref <308>: DATABASE ACCESSION NUMBER: AK109056
  ref <309>: DATABASE ENTRY DATE: 2002-08-28
caggtggatctatctatcgggttcgaaagcggtgcagtccaatcttgcggcctgtgctcctgacgtcctccatgatctgcttcctgtactcgccgaaggtgaagctccggtaatgggcatcgtcgtcgtggacacggctgctgcttgggatgatgagcgtgtggtaggaggggcagaggaagaaggccatggagaagcgctccagcgtggcgttggccatcaccctgtgctccacgctcttgtacacatcgttgctccacgcctgcaggaggtcgccgacgttgacgatgagggtgctggggctgggcttcacggccacccacctgccgcccttgagcagctggaggccgccgacggtgtcctgctgctggtgcacgatggtgagcaagtcgctgtccgtgtgcgggcacagcccgaagcccccatggccatggcgcacggtgggtaccggttcagccgcaggaagcacgtctcctcccgcgtcgtcaccatcgtctcgccctcgccggcgcccggcagccctctcatcaggatctctgccagcttctgcgccagctcgtacatcgccctcgacacctcctcgatcaccgccctggccctgatgctcgtgctgggcctgggcgtcgtcattgggatgtgataggcctccgaccacgacagctgctccaggcacttggccgccggcgttccccaccggtagctctccggcgagaagccgagcagcctctcggtcaccttctcctggaagggccgccggaacacggccacctgtgcgtcgtgcagctcgcgcagcagcgcctgcggcacgccgtggttggtcacctggaagaagccccattccgacgccgcacgcaccatgtctgcgcggcacacctgctccgcctccatgagccccgcgaggtcgatcacagggagctcgcactcgtcgacgtcgatggcgcccatgtccatgtccaggcggtgctgctccacgaacaggtgcttgtacgtgctcatcaacggcgggttcgagttggagtcgtagtcgtgctcctccattaattattaactccgccctgcctgcatgcgccttaatc

SEQ ID NO: 11709 - DNA, 974 bp, Oryza sativa
  ref <308>: DATABASE ACCESSION NUMBER: AK109057
  ref <309>: DATABASE ENTRY DATE: 2002-08-28
agctcaaaacacttagctagctagctcacaaaagcatcagagttaacgtacactcatctagctagggaagaagaagctaactaagccatggcttctcgtgcatttgctgcagtgtttgcagcagtagcacttgtagtgtgttcttcagtcttgcctcgtgctctggcctctgacccgagccagctccaagatttctgcgttgctgacggtgaacgagctgccgggcctcaacacgctcggcatctcgttcgcccgcatcgactttgcccccaacgggcaaaacccgccgcacacccaccctcgtgccaccgagatcctcaccgtcctccagggcaccctcctcgtcggcttcgtcacatccaaccagccgggcggtggcaacttgcagttcaccaagctgctcggccccggagatgtcttcgtcttcccgcagggtctcatccacttccagctcaataatggcgccgtcccggccgtcgccatcgccgcgctcagcagccagaaccctggggtgatcaccattgctaatgccgtgtttggatccaccccgcccatcctcgacgacgtcctcgccaaggcgttcatgattgataaggatcaggtcgactggatccaggccaagctcgccgcgccaccggctgcctctggtggtggcggtggcttcattggcggcggcggtggtggcggcttccccggcggcggcgcgccatagacggcctcattctcgacgcgcttagcaatgcatgcaaaggcggcgtcgtcgtcatgcataatgcatgttactatcttataaaacctttattacacatgtaagctgcgtgtctacgtggcttgacacgtaggatacatctcgatcgtgtccaataatctggtgaaatcgcatcagtgtattatgctaaaaatgttacacctctttatgaaataataacaaagttggatatttatgtgctgcctatgcacaggaatagcagaat

SEQ ID NO: 11710 - DNA, 1621 bp, Oryza sativa
  ref <308>: DATABASE ACCESSION NUMBER: AK109058
  ref <309>: DATABASE ENTRY DATE: 2002-08-28
aagatggccagcatgcaggagaagatgatcagggaggcaatggcggcaatgaacgggcagaccgccgccgacgtcgccgtgaacctctacccgttcatccgcaagtacaccgacggccgcgtcgagcggctgctgacgagctcctacgtgccggcgtcggaggacgccggcaggggcaggggcggcgtcggtgtggcgacgagggacgtcgtcgtcgatcgtgacaacggcgtgtccgcgcggctgttcctcccgtcctccgcggccaccggcggcggcggcggtggcaggaggctacccgtggtgctgtacttccacggcggctcgttctgcacggagagcgccttctgccggacgtaccaccggtacgccagctcactcgcgtcgcgcgccggggcgctcgtcgtgtccgtcgagtaccgcctcgcgccggagcacccgatacccgcggcgtacgacgacgcgtgggcggcgttccggtgggtggagtccctgtccgacccgtggctcgcggagtacggcgacctgcgacggacgttcgtcgccggcgacagcgccggcggcaacatcgcctaccacacggtggcacgcgccggccgcgagaacgtcggcggcggcatccagggcctgatcatggtgcacccattcttctgggggcccgagaggctgccgtgcgagacggtctgggacggcgcgtcggtgttcccggcgttcggcgtcgactggctctggccgttcgtgacggccggccaggcggacaacgacgacccccgcatcgaccccgccgacgacgagctcgcgtccctgccctgccgccgcgtgctcatggccgtggccgggagggacaccctgcgcgaccgcggccgccgcctcgcgtcccggatgcgcggcgacgtgacggtggtggagtcggagggcgaggaccacggcttccacctctacagcccgctgcgcgccaccagcaagaggctcatgcagagcatcgtgcagttcatcaaccagccgcctagcccatgcccacctccgccggcgccggcgccatcgccggcgatgaggtggccggcaaccattcttccagagttcgacgagtggtcgtcgacgtacagtgacgacactgccaattcctcgcagattcttcttggcatgcctgctagggcatacaaggcaatattcgttgataggatggacaggaaagctgctaagactggacgactaagctctaatccgacggttaatgcgtcattaagcattggtcccagcgggaaagcatcaaagacaagctgctacgggatgtcatttggccggaccagagcttacaatttcagaggggtagcagctgcagggagcggccagtgtcagcctcccttccgtggagtgacgatttgatgagattaccgtcagctagcctggctaatctctcccagaagacgacgtgcatttcatcgtgccgttcgaagaatatataatagaaacaataataatcttaattatgacatgttgacactgttcgataaaagtgccctatacaaatatactgtctttcttttttatttttacggattactgattcacatatttcttgtgctcgatctaaaaatttaatcaaaggatatgatttgtt

SEQ ID NO: 11711 - DNA, 991 bp, Oryza sativa
  ref <308>: DATABASE ACCESSION NUMBER: AK109059
  ref <309>: DATABASE ENTRY DATE: 2002-08-28
tatcatcaaccactcttcactcttcaactctcatctctcggatatctatctcttcaccatggtcaagttcgcttccgtcgttgcacttgttgctcccctggctgctgccgctcctcaggagatccccaacatcgttggtggcacttctgccagcgctggcgactttcctttcatcgtgagcatcagccgcaacggtggcccttggtgcggaggatctctcctcaacgccaacaccgtcttgactgctgcccactgcgtttccggatacgctcagagcggtttccagattcgcgctggcagtctttctcgcacttctggtggtgttacctcgtcgctctcttccgtccgagttcaccctagctacagcggcaacaacaacgatcttgccattctcaagctctctacttccatccccgccagtggaaccatcggctatgctcgccttgctgcttccggctctgaccccgtcgctggatcttccgccaccgttgctggctggggcgctacctccgagggcggcagctctactcccgtcaaccttctcaaggttactgtccctattgtctctcgtgctacctgccgacagcagtacggcacttccgccatcaccaaccagatgttctgtgctggtgtttcttccggcggcaaggactcttgccagggtgacagcggcggtcccatcgtcgacagctccaagactctcatcggtgctgtctcttggggtaacggatgtgcccgacccaactactctggtgtctatgccagcgttggtgctctccgatctttcattgacacctacgcttaaacgccttgctggaagcgctgagatgttccttggatattctctagcttgagtcttggatgcgaatcctgttttagaaataggtttcaacgagttaagaagatatgagttggtttcagttggatcttagtcctggttgctcgtaatacagcaatctagatagcccaaattgaatattaaatttgatgg

SEQ ID NO: 11712 - DNA, 1838 bp, Oryza sativa
  ref <308>: DATABASE ACCESSION NUMBER: AK109060
  ref <309>: DATABASE ENTRY DATE: 2002-08-28
aattgcttcaattgcactcataacaacttgaagaacatacacagtcatcatgagcgcacgaactgtcgaactcaagcctttccaggaccagaagcccggaacttctggtctccgcaagaaggtcaaggtcttccagcaggaccactactcagaagccttcgttaccagcatcctgctgtccatccctgagggcgtttccggctctaccctcgtcatcggtggtgatggtcgttactggaaccccgaggttactcagctgatcgcgaagattggtgccgcctacggtgtcaagaagctcctcatcggccagaacggtatcctcagcacacccgcagccagtcatatcatccgcatacgcaaggctaccggcggtatccttctgactgctagccataaccccggaggccccactgaagacttcggtatcaagtacaatctcgctaatggtgcaccggcacccgagagcgtcaccaacaagatctacgaaacctccaagaccctcacctcctacaagatcgccgacatccccgacgtggacctgaagtcgatcggtacacaaaagtatggcgaccttgaagttgagatcctcgactcgaccaaggactacctacagatgctcaaggacattttcgactttgacctcatcaagtcgttcctcaagcagcactctgacttcaaggtcctcttcgacggtctcagcggtgtgactggctcatacggcgttgacattttcgagaaggagctcggcatccccaacagcacacagaactgcgttcccaagccagactttggcggccaccacccagaccccaacctcgtctacgcgaagtccctggtggatgcggtcgacaagaacggcatccactttggcgccgccagcgatggcgacggtgaccgcaacatgatctacggagcgaagtcgttcgtctcgcccggcgacagcttagccatcatcgcacaccacgccgagctcattccatacttcaagaagcagggcatctacggtctcgcacgaagcatgccgacttctggcgcaattgaccttgttgccaagaagaagggcgtcgagtgctacgaggtccccactggctggaaattcttctgtggcctcttcgactctgacaagatgaacatctgcggtgaggagagtttcggaaccggcagcaaccacattcgcgagaaggacggtctttgggcggtcgttgcgtggctcaacatccttgcgggtgtcggccagcagacgggcaccactcccagcattgcgtcagtacagaaggatttctggaagacctatggacgcacattcttcacccgctacgactacgagggctgcgagaccgagggcgccaacaaggtcactggccacatgaaggagctcatcaccaccaagaaggacgagttcatcggttcaagcgttgctggccgcaaggtcgtcgaggctgacgacttctcgtacaccgaccttgatggcagtgtcagcaagaaccagggtatctacgtcaagttcgatgacggcagccgtatcgtggtacgtctttcgggtaccggcagcagcggcgcaaccatccgtctgtacatcgagaagcacaccagcgacgagtcgacatacgacatggatgcgcaggactacttgaaggacaacgtcaagctggcgaccgacctgttgaagcttcaggagtacatcggccgcaccgagcccgacgtcaagacctaagctgtcgatggcgtgtggcgacagtggttggcgtggagggagtaaaagtcatggcgaaataagcgtcaacgtatagagtgtattgtaagcgttcataatgacctgaatgaatctagtagtgtac

SEQ ID NO: 11713 - DNA, 1088 bp, Oryza sativa
  ref <308>: DATABASE ACCESSION NUMBER: AK109061
  ref <309>: DATABASE ENTRY DATE: 2002-08-28
acaaatagcagatgagatgagagataagtagatgacacattcacagttgctatagttgttgctgccactgcctattagctagcttcctctcattcgtaagtggcagcttcttcttcttcttcttcttcttcttcacttcctctctctacatctacccaagaacaccttctctctctctagctctctctctctctctaagctagccaagaagagagtgaagagctagcttagtgtgagtgtgttggtggctgctatggcgagcacgaacggcaaggaggaggtgtatgtgaaggaggggagcaagctctactcgaggatgatgtccaaggaggcggcggcggcggcggcgccgctcgccgtgccgtcgttcagggtgtactacggcgtcgcgtcggcgggatccgtaccgttcctgtgggagtcgcagcccggcacgcccaagagctcgccctccaccgccgtgctcccgccgctcacgccgccgccctcgtactacgcctccgccggcaagaaaggcggcggcggcggcgcctcgtccggctccaggaggagcggctggtccgccggcggcgcgcgcggcgtcctcggcgccatgttccggcggccgtggcgccggacgtcgccgtgctccacctcctcctcctcgtcgtggtcctactcctcgccgtcgtccgtgtcgatgtcgccggtgttcaccgtgcaccaggcgtcccccatggcggtggcgcgctcccaccacacgcgcgcgtgctccgccggcgccgcctacgacgacgccgccgcggcgaggtgcttcggcatggagcgcgagtgcgagagggggctcgtgaaagggtgcggcgtcgcggtggccgtcaggaacgcgctgtcgtcggtcgtcggccacaagtccggcggccacggcggcgcgccgccggcggcggcggcggcgtattaaatccctccgctgcacatgcacgctggccgctagtatgtactgctatctaatttgcgttttttccggggtgttctttgcattttgtacgccatagtacaaacatgtacgtacttactctacgtgatagtatggaggagaagtaattaagtgt

SEQ ID NO: 11714 - DNA, 1832 bp, Oryza sativa
  ref <308>: DATABASE ACCESSION NUMBER: AK109062
  ref <309>: DATABASE ENTRY DATE: 2002-08-28
acgcctcacgacaagcctcaagctcgacaatccggtgtgttctcacgcaagtgtgcaaacaccaagagttttcagtttctgcactttctcgcctaaagcgccagatctgaagcttccagagctccctagaacgaaccagcgtcaatcaacctgtccactcttttaacctacttccgtcgctcgcttaaatccatctcttcgctgaaaatgtttggaaaacgctcctttgctagctcaaaagaccgttccggcaagataaccaagcagcaaacaacgaagagatcctttcgcgatgcttccaagcagaagcaggccgtcgccgagaagctcgacacgcgcaaggatagtccgatgatggagggctcgccgagccttaccagcgccatcgtgacggtagtcgtgggccaagagtcaaggctctttgctgcccacgaggatgtgctgtctcacagcccgttctttgccgacctcctgcgctctcagttcttcgagtccgctaatcgacgaatcaacctgcccacggaggaacccgagatcttcagctgcgtcctcgagtatctgtacaagggggattattacccgcgcttggtgcacgacaagcgccgatcaacctggatgctcgagggtggagttgtggcctcacccgacccaaataaaggcgaccgcgcagttgccgtcgaaccaacattcttccacactggtgtgggcgatgttctcctgcgagacaccgctgtgtactgtgctgctgaccgatatggcctcgaagagctcaagaaattgtcgctccgcaagcaaggattgcagagcggcatcgaagtcggaactatacttcgatcagcacgctacgcgtacgacaacacaccagacagtgattcgagactgcgcgctcactacctcgccctgatcattcgcagtcgtaagaccttcaagcgtagtggtaccatgcagatggaaatggagatggggggaaaaatcttcttcgacctgttcgtggcgatgtgcaaccatgtcgatgatctgacggaggcgaacagcgttcgcggaactcccaggaccatctaaaggttgtcgtcccaccagaactcgtcgcaagtcgaccgcaaacacacacaatacccggagtttcccaacttgaccaacttttcaactccacctcttcccaaattgccaacaacaaagcgacaaagcgctccatgcaactcgctcctcgtcctctcacctcaaaaggaacaacaaaaagccccagaaaaaacatatggcgcagattgattctgctccagtggctttcttcggcgtacgcgaaacggctggttgcatgcacatcatcatctttacccccttgctactctctcgcaacttttgtctctttaaagctgttctagctttctttgtggagtttgctcaccccccatcacgtccccactcaccccctaatccccagttcctgttgtaacgatgacgcttatttcgccttgtcttgtttttctatccttcccctctctgcttgcggagagagtacatgacgacaatatcgcggaagctgtgtttcctttgtgcaatgtgtgcggtggatggaaattaggtttggagaaggtgttatttggcaggatatatggatggtgggaattaggggacattcatttttagtagaagtctgttgttggtatcgcgatggttcataatggaggaaccgtgctggtaatgagcttctttccgctgtgtggggaagcttgggatcgcggatcgctagattggaccgggaccgcttgagggcagattggctgtggaggatttttagtggcgatgataatgagaaaacccaggtcgctgct

SEQ ID NO: 11715 - DNA, 1194 bp, Oryza sativa
  ref <308>: DATABASE ACCESSION NUMBER: AK109063
  ref <309>: DATABASE ENTRY DATE: 2002-08-28
atcaagttgttctttttgcgagatttttagattttcaaaagcttatataatattataacaaaatgctcattaagcttgttctgctaacgcttgcgttggctcatagtttggaggccaacaaagcccgtcaattgagctttggtagcagctatggcggcagcctaggtggctataatagcttcggtggttatggtagcggttatggtagcggttttggtagcggttttggaagcggatatggaagcggatatggaagtggttatggaagtggttatggaaacggctatggatacaacttcccgtcgccatcgccatcgccagccccagtcccatcgccagcgccgacaccattgccagctccaaccatgccagctccaactatgccagcgcctactccgactccaactccaactccaactccattgccagcaccagctccaggaccaagcccagcgccagctccatcgccccttccacaatacagagacacgcaatacgacagtggattctacaacagcttcgacccgagctattcgccattctcctacaaccgtggtccattcccatcgtcctatccgtcgttcggttcatcctacccgtcgttcggaccgtcgtatggttcctcgtatggttcgtcttatggttcgtcgtatgctgctccatctttcccctcgtatggtccatcgtatggcccatctttcccatcatatgccgctccagctcttccatcatatgctccagctctcccatcgtacgctccagccctcccatcgtatgctccagctctcccagccccaattgctgctccagtttatgccactgttagcgccgtcgaagtcgtcgctccatatggtggatacgtcgatccgctttacggatatggtgctggctatggcgctggctatggtaatggctatggcctcaacggtgatctcatcattcaaaacgtcaaccagaacgccaataccccgtcgtacggaaacggctatggaagtggctacggaaatggctacggaagtggctacggaaatggctacggaagtggctacggaagtggcaactactaaacatatttattaatataagtctaatttatttatagttttattggcatgtttttatcttgttttttaattcttgttttttattgttatttacagttattgttgaaataaaataacttttttttctctt

SEQ ID NO: 11716 - DNA, 1893 bp, Oryza sativa
  ref <308>: DATABASE ACCESSION NUMBER: AK109064
  ref <309>: DATABASE ENTRY DATE: 2002-08-28
aaataatttatttaacaattctttcttttttaattttatgtgttagactttagaaaatgataaagtgtctcgcatttatctgtcttctcggcctcaccgtgagcgcttgggaattcgacaacaagcgatcgaaccgcatgaacctcttgtcaaagactgttggcgctcgtatgttggccggcactaatgatggcttccaaattgcagataacggcaaccaacaattcgtcccaatccaacgtaccgtccaaccagctattaacaacattgccgaaaacggacaattgaccccggatcagctccaacaattgcatcagttcattagctcgcaaagcgttggtcaacaacaaccagttagccagcaattccagccacagcagccaactcagcagcagcaattccagccaccagtgcagacgcagcaaaagttcgctcctcagcaacaacaacagccacagcagaccttccgtatggactcgttcaaccagaacccgaacccaatgaccttcgacaacactcagcagttcggccgtatgactttgatcactacaagcacgaccaccacgaccaccccagcgccgatcatgcaagcgtcgaagccaagcgccatggagcagcagttgttggaccaacaggttcgcattcagcaaatgaaggatcagctcttcaacctccaacagcaacagcagcgaatgaccacccagcaacaggtgccaactcagaccccgcaacaacagcagccagtgccaactcaacaggctcagccaactcttctccaacaacagcaattgcagcaacagcaacaacagcagcagcagttcgtccagcaacaacagaaggtccaacagcaacagcagatgcagcaacagcaattgctcgaccagatcgctcagcaacaacagttgaaccagaagccagtcccaggacagcaacagaccttccaaaaggtgccacagatgcaggttgcccaagttgcccagccaacaatgaacgttagccgaattgccacccaagtccgcccacaacagccagtcttccaacaacaacagccaattgtccagcaacaacaacaacaacaacgaggccgaagcaacgatatctgcgccggagctaagccaggcgacaagatcccacacccagtcgaagagacccaatacgtcgtttgcggcgagttgggcgagatcttcctcatggactgcccgcaacacactgtcttcaacccacacttgggtctctgcgacttgaccacggacttgccaatcctctgcaaatcgaacccatgtttgaacggcgccaagtgcgttgagttgagcgccacgcaattccaatgcgagtgcccactcggcttctctggcaagacctgcgagaagttcgacacgtgctcgagctcgcagccgtgcggtcaagatggcgtgtgcttgtcgttcgccctcggcagcccgatcccccatgtgtgcttgtgcaatggcggccgatcagtcggtatgacctgcgctcagagcgagcagaacccgtgcttggtgcaaggctcgagcaccaagttgatgccagtcaacttcaaccgtgccgtgttcgctcactgcgagggcgctcgaccccacttcaaattctgccagccgccgttgatgttctcgccgaccaagcaggcttgcgaatggaccatctaaatggatcattctcttcttatttacattctatcgttattatatttattttcattcttgttgttacatgatgtttaacttatttttattgaacgattttttgttgttggtttaagtttattttttcgatttatattgttgttaatttgtgttttaaaaccgtttttattctactcaaaacgaagaattcttagattttaattttaaataaaaaataaaaattaaaaac

SEQ ID NO: 11717 - DNA, 975 bp, Oryza sativa
  ref <308>: DATABASE ACCESSION NUMBER: AK109065
  ref <309>: DATABASE ENTRY DATE: 2002-08-28
acatgtctctgaacctcctgaaccctcttgctgtctcatccatgcaaagtacagttcagttcagttcagttcagtaatctgctacacatctgaaactgattagtgatttcttgtctcctgatcatctgtagtctgtagaacaatcctgttttctattctattttgtttgttgcatttggcatcatcatctggaagagagagttatctccagcttaattaatttgatcggtctagccatgaagaagatgaggaaggtggccgagttcttgaggaaggcggtggtggcgctgagggggaaggccagcgtgctcagggcgaggctcctcttcctcgcctcgctccgccgcaggacggcggtggtcggagccatctcgcaccaccttcgcgcgctcatgccgggcaacgctccggcgccggcgccggacggcggccgcctcccagcggcggaggacgacgacgagcagatggcgctcgacgacgtcgctggcctctccgagctggccaccttgttccaagaagtcgacgacgacgacgacggcgcgcgctaccccgactggacacactcgatgttcgacgacgacgacgacggcgagggcggcggcgaggaggccgtgtcggtgatggaggtgatcaggaggcggcgggagggggacggggaggagttcgacatggaggaggagatcgaccacgccgccgacatgttcatacggcgagtccgccaccgcatggccgccaaccgccggagcttttagttaacccgtcggtgatggtggattagtccattaattattaattaccctgaagatttatcatgtctggaattaatttcagcgtgtgatattttagctttgatttgttttttttttgcttcagattgaattaatttggctgaggcaaattgatcagtggtgggtcatctaccactggctctaatccctgttctgatcttttgttcttacaagaataatgctttct

SEQ ID NO: 11718 - DNA, 1708 bp, Oryza sativa
  ref <308>: DATABASE ACCESSION NUMBER: AK109066
  ref <309>: DATABASE ENTRY DATE: 2002-08-28
aagcgaaaaaccgagtttgtatactcgataaattaaggccaaagcgctcgcgcgccaaatggcggcgccggttcgcggtctcgcaggtgacgcggacacgaagacggccgcaccgccaccgctgacggctgctgcagcggtcgggtcgaccgtgcggccgtggtgggcgccgttcgacctgaccacacgcgtcatggctgcgctgctgctgcagcgactgttgggaccggatgtgagtccggtgcgcgcgttcggcctcactgtggccagcggtggtgtacgcacataccagcagcagcacgacatccttacgtgccacggcgttcgcggatgtgtgctaccaaccggctatcccgctgccgctgcggtggtcgatgctgcggctgccgcgggtgctgcgggtgccgccaccaaacccgtttgggcgcagttgccgcatgtgcatgcggtcgggtcttccgataccagtaccactgcgcaggagctgttttggacggccgtcagttacggaaaggtgccgcgacagccggtgttgcgcggtacgacccgcctcacccgtggtgctgcgtccaaagccgaagccgatcggcgcattaaagccgctgcctttcgcgccatcgaatgcgcgctttgcgccatgtgccatgcggctgacacactggggctgagcggcggcaatttggacgttaacgcgtggttcgagcccgactggagggtggacgcaccggccacacagcgtgtgccgctgttggcgcaggtcgtgccgcgcgacgacgcatgcgaatgggtgcgtgcactcatgacgctgccgcacacggcggggcggccgtacgtgaacccgttcggcgaacgcgagctggaggtgagcggcctgcattggctgacgtcgcaaccgcatgacgcacgtgcgcgggccagtaccaccgacgggaattcggtgctgcgtatggcggtgctcaaagaagcgcgcaagccacagccgaacgtggcgctcatccgtctgctgttagagcgctgtccggcacacatcatcaacgcgtgcggctcgccatatgacgacggctgcggcggcactccgctgcacgtcgccacgtccatgctgtgccgcaacgcgtcgtatctgaagcacgtcagtgccgtgcaacagcggcggcggctgcagaacgacggcgcagcgcaggtcgtgcgggtgtttttggagtgcgcgtgtgagtcgtacggtcagcgcgtcgacctgcgtgtgcgcgggacataccgcatgcgccacgacacggcactggacctgatgcggcgctgccggcacgacgacatcgcggcgtttatggaccctgtcatcgcgcagttcgagtatgcgctgtctgaccggttcgatgcggtgcagcgccgaccggccgtactcgcagcgctgcacacggtcgtgggcgatatcatcaccgtcaatgccctccggcagctcatccgcgactacgacgtgtcgccaccgtcgccggcgccgccgccgttcgcgagtccgctccgggaagccgcacgcgtcgccgcggaagccgcacgcgtcgctgcggaagctgcacgcgccgctgcggaagcggctcgcgctgccgcgcgcgtggtggcacgacatgacgacaacgacgacgacgtcgacatcgggttgtctctatttgattaggtgatgaatagtaggctttgaagaggcattttgttgttg

SEQ ID NO: 11719 - DNA, 1572 bp, Oryza sativa
  ref <308>: DATABASE ACCESSION NUMBER: AK109067
  ref <309>: DATABASE ENTRY DATE: 2002-08-28
aacgaagaaaaatggaattccactattgtcagcaacgtttggcttcagtgctgctactttgcttttggatgctgttcatcagagcgcacggatcacgcaaggttagcatgcctccttcacgatttgcttttcaagagattggactaagaaatgttctaaacaccctctgctatagctctacataacgtatctaggtgacagaaagcatgcacacacagacgatgttgttgcttcccaccatgatacactctcaagcgttcttggaaggtgatctctgtcactgtcagttagtttgatgactttgatcacatgatattttgtatactttcacctttatggttttgtatcaaaggttctttgatgaaccatctgaactttgaaattcaagagcttaaccaaaccatttcttgctaaccaattaaccatgttgaactttcagtaaagaggaatccttatcttccatcatctataactacaagcatggattctcaggatttgctgcaatgctaacagaagagcaagcagaacaacttgcaggtcagatgatcctaccaataaactgatatacccatccagaaaagaggatgatacatcgattcacttggctagaataccgatcatatatacttctcacattctgattctaatcgagcagtatgattatcccgataaactcagcatgtgtggtttgcttaatgcatctgatatctccagagttaccagaagaaatcagtgtgcagcgaagcaggaggtacaagacaacgaccacacggagctgggatttcctggggctgaactaccaaaaccccagtgaattactccgaaggagcaactacggagaagacataatcatcggggttgttgacaccgggatatggccggagtcgagaagcttccgcgacgaagggtacgggccggtgccggcacggtggaagggcgtgtgtcaggtcggagaaggatggggcagcaacaactgcagccgcaagatcatcggcgcgcggttctaccacgccggggtggacgaggacgacctcaagatcgactacctctcgccccgtgacgtgaacggccacggcacgcacacggcgtccaccgcggcgggctccgtcgtggaggcggtcagcttccacgggctggccgcgggcaccgcccgcggcggcgcgccccgggcgcgcatcgcggtgtacaagtccgtctggggcaggggcggcgccgggtcagggaactccgccaccgtgcttgccgccatcgatgacgcgatccacgacggcgtggacgtgctgtcgctgtccctgggtaccctggagaactcgttcggcgcgctgcacgccgtccagaaggggatcaccgttgtgtacgcagccacgaactttgggcctgcgccgcaggtagtcaggaacactgctccctgggtcatcaccgtcgcggcaagcaagattgaccggtcgttcccgaccgtgatcactctgggggacaagcgccagattgtgggacagtccatgtactactacgaagggaataactcatcaggcagcagcttcaggcttctagcatatggaggcctgtaagacc

SEQ ID NO: 11720 - DNA, 1611 bp, Oryza sativa
  ref <308>: DATABASE ACCESSION NUMBER: AK109068
  ref <309>: DATABASE ENTRY DATE: 2002-08-28
atttccaagcatggccttgtcttcacctccaaggacccagaccttaatcctgcgacacataccaagacgaacatttacgttgtggcctcggacaacttttgggatgagctctcggaaaagtcatcaaagattgaaaaagtgaccgtcaaaggctttgaaggtgctagcacgagccctgtctggtccaactctggagaaatgattgctttcttatcgatgaaaacagatggatatgaatcggacaagaatcagcctttcatcgtccatgattggaagaagccatcacagctgatccaactctatgcaacggaagacggcaagggcgcatgggatagaagccctcaatcgatatcgtggagccctgacgactggcatctctactttactgcagaagagcaaggtcgtggtaacctcttcagagccgggcctcccaagtctcgagacgaaaaggagcctcttccaacggtactggtaagaggcggatatgtgacaggtgtttcggtgctcaaagacggagacattttcgtgacatctacgagtttgattgaaaacagcctgtactctcttgtacctctcagtaagaagtcagaccagagcatcacctatacacttcctatcgatgacaggccgtttgactcagtgccagaacagctcacgaccaagtacatttcctcggcgtcacgctctggctcaaagtttgagctttctcgtggtcaggtcagcgaactacgctggccaggcgccgcgccttccacttcggtgcatgcctgggtcgtcaagcccagcgacttcaatcctcataagaagtatcccttggcttatttgattcatggcggtccacaaggtgcctggggcgattcatggagcacacgctggaatccatcaattttcgcagaacaaggctacgtggttgtctgcccgaacccgactggatctacgggctacggccaggactttaccgatgcaattcagggccagtggggtggactaccctatgaagacatcgtccttggcttcaagtatatcaagaagaacctcgactacgtggacacctcgcgctctgtagctctaggtgcctcgtacgggggatatatgatgaattgggtacaaggccacgatctaggtcgcgaattcaaagcgctcgtcactcacgacggtgtcttctccatgactggacaacttgcttcggaagagctctatttcccctttcacgacctcaaggctccgctttggaaagcaccggagaattgggcgcaatgggatcccagccggttcacgcagaattgggcgactcctcagctgatcatccacagcgagctcgactacagactattgatgggcgagggtctggcggctttcaatgtgcttcagacgcggggtgtggatagtcagttcttgacattcccggatgagaatcattgggtgctcaagccggagaacagcttggtgtggcatgaggttgttctggattggattaatgggcatgtaggactggagaagtacactgaggcgcgcaagaagcgctcataagttgcgacagcattctacactttatcataccggcgaaatgcatcaagaaagcacaaatcgtaatccgagtattaaatattg

SEQ ID NO: 11721 - DNA, 1832 bp, Oryza sativa
  ref <308>: DATABASE ACCESSION NUMBER: AK109069
  ref <309>: DATABASE ENTRY DATE: 2002-08-28
gaaacaaaaaaagttaattttttttgtagaaaaaaaagtttttttgatacatattttaagttaaatatataaaaaaagaagaaaaaatgggcggacgttgttgtcgtcaacaaacagtgtgcattcgagtaccaccatgctgtccaccaccacaaccgcagtgttgtccacctccacaaccacagtgtggaggaggcctaggtggtggcttcggaggcggctttggcggaagcttcggtggaggattcggcggtgccggcatcggtggattcccgtctccagctccagctcttccagctcacaatcacaatctcccgctctgctcgtcgttgcaatcggcggcaccagcgccagctcagcttccaatccaggctccaattaactttccagcgccagctccactaccgttcccagagccagcgccacagttcaacttcccagctccagctccggctccattgccactaccgcttccagctccagctccacaattcaatttcccggctccagctccagctcttccagctcaacatcacaatctaccgctctgctcatctctccaaggagctgctccagcaccacagttcaacttcccaccaccagctccagcgccacaatttaacttcccagctccagcgccagccccacttccattcccagaaccagctccacaattcaacttcccagctccagccccactaccactcccagagccagccccacaattcaacttcccaccaccagctccagcccctctaccactcccagctccatctttccctgctccagctccagctcatcataatcttccactttgctcatctcttcaaggagctgctccagcaccacagttcaacttcccaccaccagctccagcgccacaatttaacttcccagctccagcgccagccccacttccattccctgagccagcaccacagttcaacttcccaccaccagctccagcgccacaatttaacttcccagctccagctccagccccacttccattcccagaaccagccccacaattcaacttcccaccaccagctccagccccactaccactcccagctccatctttcccagctccatctttcccagctccagctccagctcatcacaacctcccactttgctcatcattccaatcagctccggctccagccccagctccaatcaacttcccaccaccgccaccaatcaatttcccaccaccaccaccaccaccaattaacttcccaccaccagctccagctcatcacaatctcccactttgctcatcactacaaggagctgccccagcgccagcccctcttccactcccagctccagctcctcttcctctaccacttccagctccagcgccatcattcggcgccggcggcggtgacgtttgtgctggcctcaatgctggcgccggcgctggtttcggtggagctgctggcttcggtggcggcttcggcggtgctcctcaaccttttggcggtgctggcttcggcggcggattcggcggtgctcaagctggcggatgcggctgctaaaaaaggaaaaactatttctactcgaagagcattttttctttttttttgagcttccctcttttccttattattattattatttattaaactttaattattataatagaagtagttatattatttagttttaactatcatggattttttctttactctcgcaataaaaaaatttcagatttttttatatcaaaaaaaaatcgaatcgattggatcaactatttattaaagttttctttttttttcgagataatttcataataaatttttttttaaaacaaaaaaaaaaac

SEQ ID NO: 11722 - DNA, 1023 bp, Oryza sativa
  ref <308>: DATABASE ACCESSION NUMBER: AK109070
  ref <309>: DATABASE ENTRY DATE: 2002-08-28
agcttccaaatcatttcccctcctcgtctcctccagctagaatccgcggcctcctagatccactccgatcgcagcctagggttcgccttcgccatggccgcctccaccgcctcatggtcgcgctacggcaccgtcccgccggcggcggcggcggcggcgcctcccctgaagcgcgaggaggtggtggtgggcggggacggggaggcggcggcggcggcgccctcgccgtcgcccgcgacggcggcggaggccggggtggcgttcttctcgcgggcgagggcggtggcgggcgccgcggcggggaggccgagggcgtggagggaggtgctcgacgcgacggcgttctcgcgcccggagagctgcggggaggcgagggcgcgggcgcggcggaacctcgcctacttccgcgccaactacgcgctcgcggcgctcgtgctcgtcttcctcggcctcgtctaccgcccggtctccatgctcgccttcctcgcgctcttcgccgcctggctcggcctctacttcggccgcggcgacggcgagccgccgctcgcctgcatgggccgcgaggtcgacgaccgcgtcgtgctcgccgccctctccgtcgccaccgtcctcgccgtcgcgctctcccgcgccggcctcaacctgctcgtctcgctcgtcctcgccgccgccgccatcggcgcgcacgccgcgttccggatgaacgtgtacctcgacgagagggacgcgtacgacggatcgtccttcatggggagctcctatggcggctacgcgctcccaagatgaagaagcatcaacacactgaaatgagatgagacgaaggtgtttttttttcttcttctaagaggattcttgatgtgattctgatcttgtgcttgtgttcttggatttctgtagcttgcaatgttgtgtatagaattttcgttttcatttttcaagggagttttacatttgtttgatgtagtatgctcatttgggtgaattttttgggctgattatgatgatttcaagttgctttggagg

SEQ ID NO: 11723 - DNA, 966 bp, Oryza sativa
  ref <308>: DATABASE ACCESSION NUMBER: AK109071
  ref <309>: DATABASE ENTRY DATE: 2002-08-28
gggggagtcaccgcgatgcaacacgagcacgacactgcactagaggacgaggaagaggcgagacgtagcgaaatcaatgctctattagcgactacaccgaggttaaagcagattgctgaactgtttcgcagtggcaaatctgtgcctcgtcaaagcaaagaccacttattacaacgtccaacattttgcttagtgccagatctaaaagcacagccatggtgggatccatccgaatttccacttgtcacagccttagagcgcgaatacagcgctattcgcagtgaaatactgcacgtgctgggcgtgtcagatgtgaccttgcaacccctcgaacaggcacccaacgacactacggagactaaaaatacacatccgctcaccgcgctgccagtcagaactccgctgcacgagatccgggcctcagtggcgcgtggtgagtggcgcgcactgtatttgtggaaggaagggcagcccgtgtccgcacatcagacactgtgtccgcacacctgcgcgctgattggtcagttcgtggaacagtcaggactcgagcccgatgcgcggtcagtggtgatgcagggcacgggtccgggctacgtgtacgtgtcactgctgcagccaggcacggtgatacagccgcactgtggtcccaccaatctgcgactgcgcgtgcacctcgcactcagctgcgatgcgggtgccctgatcaccgtcaacggcacgacacgacagtggcaagcaggacagtgcttggtattcgacgacagctttgaacacgcggtgcatataggagcaacaccgcgactggtcttgatcgtggatgtgtttcaccctgacctcactcgcaacgagcgacagttgattcgaacactgttgcctgatgtgggaggcgattgagcattcgtatatgtacagttgtagaggatgataggcgcctatcagttgaataaagcagcatttagttgtgtg

SEQ ID NO: 11724 - DNA, 1008 bp, Oryza sativa
  ref <308>: DATABASE ACCESSION NUMBER: AK109072
  ref <309>: DATABASE ENTRY DATE: 2002-08-28
gtaggtctgagcccacaacattgtgtcccgcaccatcaagaaacggagagagaggacaggaggggagggctgagctcgttgggtacttggccgtgccgacgacgtagcaaccgtggatgaaggttgccgccgttcttgtccgccgccgctgcccgacgccaaatctggtgagctcggtggatgcggacggagaggaggggcgcaagctaaacagggtggcggcggtgacacgtcccaacggtagccacctcgatctgtgccgccgttgttaggggcaggggcggacccagacctagggtaagctgggccacggcccggggcctgggatgaaaggcccattgagaagtatgcattttcatcaggactaagtctatttggcctcctttttcaccatgtaaacttgtgttgggctgagatttccatggggcggccgcggttaggggaggaggagagggaggcgacggagcgggagaggaccctaccgagatcagctgctcggcgccgccaccgctccgctgcgccgctctactccgttgtgctgctgtcgtccacagtttccgccccgacgaggagaagtggaagcgtggactttgtcttgacctcgtcgacgtccatcttcgtctcgctcaccagaggagtggtgctggccgggtcacccggccgccggcgccgtcgtcgctcgggccaccccgcccgccgccttcgtcaccgctcgggccgcccggtgtcgtcgccgttgggaccaggttgcccggccacccggcgccgtcgccgggccaccccgcctgccgccttcgccactgtcggaccgcccgatgtcgtcgctgctaggaccgcttcaccggccgccgctactcaactcggtttctccgatctcacttggggaaagaatgagtggagagagagagagagattgggaattgagagatgaaaaatgagagatgtactggcgggacccactacaagtaacttgcactatggagtatgtagcttaccacgttcttagtc

SEQ ID NO: 11725 - DNA, 1404 bp, Oryza sativa
  ref <308>: DATABASE ACCESSION NUMBER: AK109073
  ref <309>: DATABASE ENTRY DATE: 2002-08-28
tgagaaattggatgcgcgcaaggatagccccatgatggagtcgacgtcaccaagtctgacctccgccatcgtgacagtcgtcgtgggtcccgaccagcgactgtttgctgcgcatgaagacgtcctgtcacatgccccgttcttcgcgcaagcgttgcacggccagttcttcgaatccactactcgacgcatcgatctgcctacagaggagcctgaggtcttctcctgcgtcctcgagtatctgtacaagggtgactactaccccccgcttgcttcatgataagcgccgtcagacctggatgcttgagggtgcaatgacctcgcccgaccccaataaaaccagcgaccgcgctgccgcagtcgagccaacctttttccataccggtgtgggtgacgttatccttcgtgacacagccgtgtattgcgctgccgaccgctacggcctcgaggagctcaagaagctctctctgcgcaagcagggcctgcagagcgggatcgaagtcggcgtgatcctgcgcagtgctcggtatgcctacgagaacacaccggacaatgactcgcggctgcgcgctcattacctcgctttgattatccgcagccggaaaacattcaagcgtagtggaaccatgcagatggagatggagatggggggaaaactgttctttgacttgttcgtggcgatgtgcaaccatgtcgatgatcttgtggacgcgagcccatccgctcgcggcactcctaggaccatctaaggttgcaacgaccacttctcgtcaagcacaactgcaaacacaccacacaccacacaactttggagtaccattaatttgatccactctcaactcccgacaaacacaaattgccaacaagcgacaatgctcacgcaactcgctcatcgtcactcaacgtaaacaacaaaacccagaaaaagacggaaaggacacgactcctcccctgatttactcggcgtatctcgacggcccggctggttgcaattatccttaccctcccctcatctttacacgcgcttcttcttctcctctctcctttaccgtgtttgctcacccctgtcacgtttctaatgtttcttgaaaaatagcgttgcaacgttcttctcacaccacccctctctgcttgcggagagagtacatgtctacgacgagactgcgtttcctttgttcatatgtgcgcgttggtggatgaagtgagaactgttgtagttatagtaagggatatacggacattcattttcagatgtatggttctgcgctggtcacgatgaccgcgctggaaggctcttccattgatggaaaggccgaagcggaaagactgactgaaaccactcgaatggtcagactagctgcggaggattttagtggcgcgcaatgagagatttaggccgctgct

SEQ ID NO: 11726 - DNA, 1143 bp, Oryza sativa
  ref <308>: DATABASE ACCESSION NUMBER: AK109074
  ref <309>: DATABASE ENTRY DATE: 2002-08-28
ctgatggcagagtacctgggcaagagcaggacagcttccgaggctgtcaactgcgctgctccagacacaggcaacatggaggtgctcgccaagtatggcagtgagcaacagaagagaaggtggctcgatccccttctaaagggcgagattcgatccgctttcctcatgaccgagccccaggtcgcgtctagtgatgccactaacattgagatgacgatcaagcgtgacggcgatcactatgtccttaatggccagaaatggtggtcatcaggcatcggtgatcttcgctgcaagatcttcatcgttcttggaaagaccgaccccaacaacgccgacaagtacaggcaacagtccgtcatcctcgtcccccacgatgcccccggcatcaccatccaccgcatgttgtccgtcatgggcttcgacgatgcaccccacggccatggccacgttactttcaccaacgtgcgtgtcccagctagcaacatggtccttggcgagggccgcggcttcgagatcatccagggccgcctaggacccggccgcatccaccacgccatgcgcagcgtcggctccgcagaaaaggctctcgagtggatgcttgcccgtctcaacgacgagcgcaagaagccattcggcaagctccttaacgaacacggcattatgctcgagcgcgtcgcccgctcgcgcatcgaaatcgatgccgcgcgcctcgcagtcctaaacgccgcgatccaaatcgaccagactaacgctaaaggcgcgctcaaggaaatcgccgaggtcaaagtgctagtacccgaagtcaacctcaaggtcattgactgggcgatccaagcctatggcggcgcaggcgtcagtcaggagacgccgctggcaaacatgtatgcgcagggccggacgatgagaattgttgacgggccagatgaggtgcatcttttgcaattggggcgcaatgagaataagcggggtgttgcacataaaaagaggtttcaggcgcaaaaagagaagggagaggagctgtgcaggaagtatgggattgagccgagggatcctttgtatttgaataggacgagtggggaggcgagtaagttgtaaatgaatgggaggggagggtgtagataaaatggattgaatggctactgc

SEQ ID NO: 11727 - DNA, 984 bp, Oryza sativa
  ref <308>: DATABASE ACCESSION NUMBER: AK109075
  ref <309>: DATABASE ENTRY DATE: 2002-08-28
gcggatcatccagaccttcacttccaacactcacttcagcacgacagctcgctcgacaatcttttttttgtctttacaattctcaaaatgcacggcaaactcgctgcccttcttcttccggtcctcgctgcggcgaacccagtgagacgcggtgatgctcccgacccaaaccaaatcaccattgtggacacaacttactctggtaacggatgtcctcagggctccgtgtcgaccagcacctcgactgacaagactgtcgtaacctacggcttcgacgccttccagacctacattggtcccggaaccactcccgccgacaggtccaagaactgccagcttcacctgaacctcaagtaccccggcggcttccagtacgccgttgtcgacgccacgtaccacggctgggctcgtctggacgagggcgtaaccggcagcttcatcacgacctactacttcagccaggacgcgggtaagacgcagactacgcgcatgtcggcggttggcggcggggccctcgcagccggtcaggtctacaccaagacggacaaggtggagacgacggctaccatctggagcccttgcggccagaacggcatcttgaacatcaacaaccgtattgcccttaccaacaagaagtcgactcaggcgggtgagatgagcaacgacgacgcgcctgtcgcctttacccagcagctgcacgttgcgtggaggaagtgcgagtctggaagtggaagcggtggtagcggaagtgacacgattggcattggtaaccccaactctgagcttgagtttgagtagatgggtttggtggctgaagagggaattgcggagaggttgggttgagtttgggtagggtagggtagggtagggtagggtaaggtcgggtcgagcggtgaagatgatggtcatggtgacagcctggaacgtgtatatagtcaagttgtcgagttgatgtcgctatgaatttcatgcatcttttttctt

SEQ ID NO: 11728 - DNA, 946 bp, Oryza sativa
  ref <308>: DATABASE ACCESSION NUMBER: AK109076
  ref <309>: DATABASE ENTRY DATE: 2002-08-28
cactacggcacctaccccaccgagcctgaggtcccagccccagccgagtcttgcagcactgaggtttctggctacccagtccagactccctctgccccggctcctggctacccagtcaacaccccctctgccccggctcctggctacccagtccacactccctctgctccggctcctggttacccagtccacactcctgaggttcccagccctgaggagtccacctcctgctctgaggagacccccaagcccaccaagcccacctctcctcaggagagccaccccggctacccagttggcaccccctctgccccagctcctggctacccagtcaacaccccatctgctcccgctcccggctacccagttggaactccttctgctcccgctcctggctaccctgcccacactcctgaggttcccagccctgagcagtccacctcttgcctgagctccaccaccatcaccatcaccgtcccataccccaccggaactgctactccccccaagcctgtcgtccccgccagccagcagcctccttctccccaggctccttacccatccaagcctgtcggtggtgctccctacccatcctcccccgtcggtaccggtgttccccctgctggcactggcgttccccctgctggcactggttaccccaccaagactggtggctacatcaagccttccagccctcctgagttctctggcgctgcctcttccctcaacgttggtggcttcgttgctggtgttggtgctttcgccgctttcttcttgtaaatgtcatcttctccaaataagcttgctctcgagtaggctatgactttacatgagcgcattgcatagaggtgctggtcattgcttgtgggtttatatccttggtatcgcaaagggtaattgtaattagttggggatgttactttttagaaattcgaacttggaaaat

SEQ ID NO: 11729 - DNA, 1046 bp, Oryza sativa
  ref <308>: DATABASE ACCESSION NUMBER: AK109077
  ref <309>: DATABASE ENTRY DATE: 2002-08-28
aactataactcgaaagaagaagcttattaaaaaaaactaaaactattttagagaaaaactctcgaaataaagatggcattgatcccacacggaatcttcccacgctcagcgttcgacatggactcgtggttggcgccattccagcacccaaccggtccatcgaccgtcgacctcttcgacccgttcgatgagctcgaccacatgctcggtcgcaacctcgagtggctcgccaagcccgagttcctcaccccggccgtgccacgcgtgccacaaaagtaccgcatcacgttggactgcaccggctactcgcccaagtcgatcaagaccgacgtggtcggccacaagctcaccgtgaccggtcgcgaggaagtcaagcaggacgatggcgacttccacatcaaggagttcaagaagacctactcgctcccgacccacgccgagtccgacaagctcgtgtcgttcatgacccctcagggccagctcgtcattgaggtcccactcaaggagatccacaagcactccaacgatgatctcttcccacgagtcgtcgatatcccaactggcggcaagcacgttcagatgaagttccacgtgccagagaccattgacccggccaagttgcacgtctccatcaaggaccgcgacttgatcgtcaaggctgaggacaaggtcgagaagccagatggtgtctcccgattctactactacaagcgcactactctcccagagaacaccgacttcaagtcgttgaagtgcaactacgacaaccatcagatcgctgtcgatgcgcccattgatgtcaacttcaaggcgcaccgatctgtgcccattgagcacaagaagcaacacgccatcaacaacaaataaatttcttttttgcagagaatcaaccattaaattatcaatataattgaaattaatttaatttttttaagcgaatttttttttatcttactatatatatacataaaacatggacatactttttttagttctcaattagattagaattagatatttatcaaataaataaattttcatgaatt

SEQ ID NO: 11730 - DNA, 1250 bp, Oryza sativa
  ref <308>: DATABASE ACCESSION NUMBER: AK109078
  ref <309>: DATABASE ENTRY DATE: 2002-08-28
acttataaaaaaatattttaaaagaaaatttagacaaagagaagtgaataaagaagagaaaagagaaaatagaagtgggacgagaataagacgatgatgtcagacaacgacgacgagttctgcatcccgcgctcggccatgtacaagctggtgaaagagctcgtgccacaagtgcgtctcagcggcgaggcgaaagacctcatcgtgacggcttgcaacgagttcatccacctgctagcgaccgaggcgaatcaggtgtgcgagaagcagtccaagaagctcatcctgcccgatcacgttctgtgcgcgctcgacaatctcggcttcggcgagtacaaagaggactgcgtcgaggtgatgaagcagatgcaagaggagaccgacaagcgcaagaagctgcgcaatcggctcgaaaagcccggcattccggaggaggagctcctccgtcagcaaaaccagctattcgccgaggcgaaaaagcagcagcaggccgccgacgaggccaacgacgagtggacccgaatgcagcacgaagccaaactcgctctccagcggcaggcttctaccgccgccgccgctgccgcttgctccacttcatacgatgaatctgccgcggctactgctcaactagccgccaacaatggaaaacccggtggaaaagacgacgacgatgataattacgattaatattcaactcttacacattcccttttttcttaatcttaagaacaaatttctttttatatatatgtttacacagggaactatatgctgtttttttttacacggtgatgaggaaaaaattataatgaaatttcaattttctatttttctgaaaacaaacaaaacactaaaactaaatcggtacgctttattttactattttattgtcaatcgtctatttatattattatttcattttattaaacaaacgtttttaaaagattttaacatcatctctatcaatcatcatctctttttatgtctaatgtacaaatgtagaaaatgaaatatatagcacacaatctctctaattttaagatttactagaataaaattaaataaaactaatttaaatttttttttcgtctctctcttatgttagtatgtcaataaaattaaaaaatgtgtgtgtgataaatcgattgattgatgtatcttatacatatatatataatatatatttgattttttgttgttaatttctttatatatttttttcatcaagaataaaatttattaattaaatg

SEQ ID NO: 11731 - DNA, 1040 bp, Oryza sativa
  ref <308>: DATABASE ACCESSION NUMBER: AK109079
  ref <309>: DATABASE ENTRY DATE: 2002-08-28
actcacgctcgctcagcaaccatcactacataatcccgtcgcaactacgcgttaatcaacaataataccaaacaacaccgtcaacatgttctccaagaccgccatcttcgccgccattatcggcctcgtcgccgcacaggagccttctggcaacccgatcacccgtcctctgaacgagatcgtccccgcctgcaagcccttcaccatcacctggaccccgacgacccccaacagcgtgtccctcatcttccttaagggcccctccaccaacgtcgtccccttcggccccaacgacggcaagatcgtctccggcatccccaactcgggctccttcgtctggactccccccgcgaccgccgatgccaccaccggcccgaccggctacggcctcaagcttgtcgacgacgtgaccggccagttccagtactcgacccagttcggtatctccaagggccccgagtgcgactcgtacgttgcgccgtcccctagctcgtcccagtatggcggtggctacccgatgagcacccctgtgtcctccaagatggcgtctgcttcttcgtccatgcccatggtctcctcctcggctgtccactccagcatgcacacctccgtctacagcaccggcatgccccccatgaactccaccgtggttatgcccaccaagagcatgactgtcccctccagcctcatgagccccactggttccagcaccaagacgcccacttcctcggcgcctgcccagcagaccaccaacgctgcggctggcctcaaggccggtctcggcatggctggtgccgccgccgttgctgcgctcatgctttaagaagcttttctagttccggtttccttgtttggatcgcggtgttggaagggttgaacatgtcatgattttgcattttggatggggaggaggaagtatataccactgcttcgtgaggagagttggatgtgtatctaggtggaagtggatagcatgtttggtaaactaaaagactggtgtggttgtgttggatcttaatgcatcgcgatataccctgttc

SEQ ID NO: 11732 - DNA, 1291 bp, Oryza sativa
  ref <308>: DATABASE ACCESSION NUMBER: AK109080
  ref <309>: DATABASE ENTRY DATE: 2002-08-28
cacacaaaccctaaacaaacacacacacacacacacacacacacacactctctctctcttctcctctcttctcctattatcatcatcatcatcatcatcatcatcacttgcatatcgaattattaataatatcgatggcaggccttgatttgggcaccagctacctccaccaccaccaatcactgcatctccgccacgacgatggcggcgccggctccgacgacggcggccacgacgacctctcgccggggagcggcggtggcggcgggcccagcagcacggccggtggcgccgggatcggcggcggcgaggtcgtcgctcgccgcccccgcggccgcccgccgggctccaagaacaagcccaagccgccggtgatcatcaccagggagagcgccaacgcgctcagggcgcatatcctcgaggtagccgccggttgcgatgtgttcgaggcgctgacggcgtacgcgtgccgccggcagcgcggggtgtgcgtgctctcggcggcggggacagtggcgaacgtcacgctccggcagccgcagtcggcgcagcccgggccggcctcgccggcggtggcgacgctgcacggcaggttcgagatactctccctcgcgggctccttcctgcccccgcccgcgccgccgggcgccaccagcctcgccgcgttcctcgccggcgggcaggggcaggtcgtcggtggcagcgtcgccggcgcgctcatcgcggcggggcccgtcgtcgtcgtcgccgcgtcgttcagcaacgtggcgtacgagaggctgccgctcgaggacggcgacgaggtggtccccccggcgccggcagggagcgaccagggcggcggcggcagcggcggcatgccaccattaggcgttgatccgtcgggcggcgccgccaccggtgggctcccgttcttcaacatgccgttcgggatgccgccaatgccggtggacggccacgccggctggcctggcgccggcgtcgggaggccaccgttctcatgatggatggatccccatattccggcgagcggccggcggcgaggtggtcggcaagattgaagacatggacatggacatgtacaacaacaagtagcctttcttatctctgaatctttttctcctcttgttcgatctctgtgatgtctgtctttgtgatcttttcgtgatgttttttgtgttaacctgtatgagagtacttgtgttaattgtttcagtcaggtgtctttgctgcttcgaatgtgttgtgaggacatgcactcataaattgatcaaatcaattattattgtct

SEQ ID NO: 11733 - DNA, 1544 bp, Oryza sativa
  ref <308>: DATABASE ACCESSION NUMBER: AK109081
  ref <309>: DATABASE ENTRY DATE: 2002-08-28
ggacaccaccagcgcatcacccaccacacctacacctcccgcatccttcgattcttccgattctcgagagacaccctcggcgcgctgccgacccctgccacccaagatgatgcgcaagaaagtccagtacacaaacataacgcccatccccaccttcattcctcgtcagctcgccatcgatttcctgcactcacacagcgagatcatcgagctcaacccccttgtcaccggccatgaggccatcaaagcgccccgcgatgcgcccgccgacgaattctatagcacctggtatgagatctcagagcgaatccagtacgtgccgggtattggcaagatgggctctggctccatcaagtttcgcggtgtcttccacgacctgccctttggcctgcagacacatacgtacgcacccgccggcgtcgacctcaggaataaatggcagattctgggaaaccagcctggcgaaccgccagagccgaaagagctgggctcgaaagcgccgccagagggactctacatccgcgaagacgtcgagattcaagcgaatcgtgccatggtcggcttcgtacagaaagaaatgaaagccgcggccaagatcatgctcgagcgcctcgtcaagaaagctgagctcctcgactccggcgcccttcaagccatgatggagaacggcaagctcaagacgctcaatcctgccgaccgcaccacagaccacatgtcacctaagccctcgcccacgcacccatacaacatgcccatgtccccgacgcatcccagcttccgccagagtcagtacggcagcatgagcatgcagcagcagccctacgttgcacctcagcagcttctcggccagaacaatgtcgtgatggagctccccggtgactactatcacacgtccgcaccgcaagctcccggctccccaggcctcctgtacgcaaatcaaacccagactcctcgcacaacctccacgtccgactctcccgacccccgctggtcgaccgtcagccactcctccgcatcctcccgaccctcctcgtacgcgccctccgaaggtggcgctgcgggactccgcagcccaggcctcgagcagaaggctttcgcttccgagctacccaccatggaagagacgcgcgaggaacacgatgagcgcaggcggcgcgagagtcagttgcccggtcaacagcagaaatatacgtataatccacaggattttgttaggaatgaggcacagtatgcgcctgcaccgccgtatcaggcttataacggtggacggtagatactgaggaggagctagatccttcatgagaaaggagacaggaaggaagtcttaatgtacgatttattttgtctggaactgttgggaggatcacgtggagttttcgatcacgctaccgccaaaatgttgttagatatcctcttttattttgggctactatttgctggtatggattgggatttggattgggaatatggccacctgtggacttgcttcatgtatactgcaaagcacaggcatgaatacgtaatgaaccactctttttcttgct

SEQ ID NO: 11734 - DNA, 770 bp, Oryza sativa
  ref <308>: DATABASE ACCESSION NUMBER: AK109082
  ref <309>: DATABASE ENTRY DATE: 2002-08-28
accacactcgagattgtgcgatccagtcctaattaattataccgtgagttgaaaattaattaagatcacttaaggtcttaaagctagcagccatggcggcatcgtccaagttggctttactggtgttcactctcctgctcgccgccgctgctttcatccacgtcgcctccgccgaagaaacacatgacgatcacgacggcggcgatcacgacccgtcgccatcgccgccggaccacgaggacccgtcgccgtcgccgccggaccacgaggacgaaccgccgccgccgtcgtctccggggaaggaggacgtctgcaaaggcaaggggtgctgcgactggtccggcggcgactgcaagcactactgcgacggatacgacgacaaatcctgctgcgacgactggtccggcgactgccacaagtgctgctccaagtagcccggcccgccgtatatacgtcgatatcgccgtacgccgtactatgtgtgtatacgactgtatacgcaacacaagctcgatcgtagtattgcttattgcactcttcgtcgtcatcaataaattaaggcacgcgtgtcagcgtgtgtacgcggtgccgacgtgcgtttgtacgtacgtgtacggcttgctaggccatgagtgtgagctctttccaaaggctacatgtactatgcgccagtcgatggcttataatattgtaataacataagttgtgcgtgagtgtaacatgatataatataataataataatatgatgtgcgtgtatgtttgaacgtg

SEQ ID NO: 11735 - DNA, 1690 bp, Oryza sativa
  ref <308>: DATABASE ACCESSION NUMBER: AK109083
  ref <309>: DATABASE ENTRY DATE: 2002-08-28
acagcagaaaacttcttcaacatgtcctctattagtcttctgaatgcaaactctgagattgccaaggctcagcaagccatgatgatcaatattggcgctgctagaaacctcatgtctatcctcaaaacaaatttgggaccaagaggaacaattaaaatgcttgttggcggtgctggagacatcagaatgaccaaggacggtcaagtcttgttgagcgacatgcaaattcaacacccaaccgcagctctcatcgcacgtactgcaactgctcaagacgacataactggagacggtactacatccatcgttctccttttgggagaaatgctttcccaatctcaaagatatttggctgaaggaactcacccttcagttttgattgaaggattgtacatggctaagaacgaagcaagaaaattcttggatagctacaaggcggatgttcaaaagaaggttccaaaactcgatagagaagtccttgttaacgttgctaagacttccttgagaaccaaacttcaccaagagcttgcagacaagctcgccgatatcgttgtagatgctgtagaatgtgttagaattggcgacaccattgatcttcatatggttgaaattatgcacatgcaacacagatccgaccttgacacccaattcattaacggattggtccttgaccacggcgcacgtcatccagatatgaagaaagatttgagaaacgcatacattctcacttgcaacgtttcccttgagtacgaaaagagtgaagtcaattctgtattccaatttagcagcgctgaacaaagacaacaacttgttgaagctgaaagaaaacacgttgacgaaagagtcagaaagattgttgaactcaagaagaaggtttgcgacgacatcccagaagaagagaaagcaaaggaaccaaagagcttcgtagttatcaaccaaaagggtattgacccaatgtccttggatctgctgtgcaagaacggtatcactggtctgagaagagcgaagagaagaaacatggaacgtctcactcttgcttttggcggtttggctgtcaactccactgatgacatgacacctgaagttcttggctacgctgatcacgtctacgaacaaactctcggagaagacacctacacattcgtcgagaacgaaaaggctactcttaagaagagaggtcacagctgcacaattttgctcaagggacctgatcgtcacacaattgcgcaaatcaaggatgcaactagagatggtcttcgtgcagttgttaatgcaatagacgacaacgcagtgataccaggtgctggtgcatttgaaattgctctttctgaacatttgaacactttcgccaagacagttgaaggaagagcacaacttggtgtcaagaccttcgcagaggctgtcttgatcattcctaagactcttgctcaaaattctggttttgacccacaagactccattctcaagctcatccagaacttcaacgctggtaatgttgcaggtttggacatctacaccggagaacctataaatccaattcaaagcggtatcttcgataacgtcaaggtgaaacaacaaattttggaagcaagcacattcactgcaactcagcttttgtacgttgatgagatcctcaaggcagcaaaagcaaccaagagagaagctgcagaataaaacacccatactacct

SEQ ID NO: 11736 - DNA, 1671 bp, Oryza sativa
  ref <308>: DATABASE ACCESSION NUMBER: AK109084
  ref <309>: DATABASE ENTRY DATE: 2002-08-28
gttgtccacccatttttacttacctgtcactcgttagacacccatttgcgtccttttagtctttgtttaatcccttcttttttcctacggtcacaatcatgaagtcgtttgctttgctcgccgccctcggcgcagtaatcgccccggtattcgcccaaggaaaaggaaagcttccagccgttacagtcaagggcaatgcctttttcactggtgacaaacgattctacgttcgaggtgttgcgtatcaaccaggtggtgctgctgatgctcaggaccctctgctcgatattcccagcttgaagcgtgatatcactaacttcaagtcgctcggaatcaacactatccgtatctacaccattgataactcacagaaccacgatgaggccatgaagatgctcgatgaggccggtatctaccttgcccttgatgccaacacaccaaagtactctcttaaccgtgagactggtgctaccctccaccgctcgtacaatgatgcgtacctccagagcgtttttgctaccattgacgctttcgccgactacaacaacctgcttctcttcttctccggaaacgaagtcatcaatgataagaacaacaccaatgcggctccttatatcaaagctgttacccgtgacatgaagcagtacattgccaaccgcaagggccgcgttattcccgtcggttactctgctgccgatgttgctgagaacatcgaggctcaagccctctacttcaactgtggctcagacgactctcgctccgacttctttgctttcaacgactactcctggcgcgatccttcctcatacaagatctctggctgggacaagaaggttgagacctacaaggattacagcaagcccatcttcctctctgagttcggttgcatcaccaacacccgtcaatggggtgagattgctgccctttactctaccgacatgactgccgtctactctggcggactcgcatacgagtacactgtagagccaaacggttacggacttgtcgaggttggcagcgacggcaagatcaccccgaacaaggactttgatcgtctcaagtcagcctacgagaagaccaagaaccccaccggtaacggcggtttcaaggagaacggctctgcctccaagtgccctgcacaatctgatgattggcaagtcaagcccaacagtgtgcctgctatgcccaagaatgcgcagaagttcatgaacagcggtgctggtgccggtccgggtcttaagggctctggctctcactttgccggcacccccagcgactcaactgccactcctggctctggcaaccctacccgcacccccgatggtcaggctgcaggctcttccagcggcactggtgctgctgccagcgttgagattcctgtccgcttcgtgggtatgatcgcttcaagcgttctccttggtgccatgcttgtactttagaggaattcatgttggacgggaggatgggatagctgattcaagatgtgtatatccgtaagaaaattagaagttgatttattgctttcatttgtgggtactttgaggatggagttctaccatggcctgcgatgtgtttggcataaattatccaggtcctttctataccagtcattgtgtcaggcgtcactttcttttcgcttatgactagtaatatatcctgtatgccatgaag

SEQ ID NO: 11737 - DNA, 1049 bp, Oryza sativa
  ref <308>: DATABASE ACCESSION NUMBER: AK109085
  ref <309>: DATABASE ENTRY DATE: 2002-08-28
ctctttcagctgctgcatagaggggcttcgtcacctcaagcgcagcagcgcagcggttagccatgaagctcaacattgcctaccccaccacggggcgccagaagaagctcgagattgatgacgaccagaagctgcgcgccttttacgacaggcgcctggctgccgaggtggagggagatgtgcttggtgacgagttcaagggctacgtcttcaagatcatgggaggacaggacaagcagggtttccccatgaagcagggtgtgctgaccaacggccgtgtgcaactgctgatgagcccgggcgaccagtgcttccgtggccacggccgccgcaacggcgagcgccgcaggaagagcgtgcgcggctgcattgtgtcccccgacctgagcgtgctcaacctggtcattgtgaagaagggcgagaaggacctgccagggctcacagacgaggagaagccacgcatgaggggaccaaagcgcgcaagcaagatccgcaagctgttcaaccttagcaaggacgatgacgtgcgcaagtacgtgaacacctaccgtcgcacctttgaggccaacggcaagaagcacagcaaggccccagccatccagcgcctggtcaccccagagacgctgcagcgcaagcgcagaaaggccgccgtgaagaaggccaagcacgagaagagccgcacagaggcagcagagtaccacaagctgctcgtccagaggctgaaggagcagcgtgagcgccgctccgagtccctggccaagaagcgcgccatgcgtgttgccagccaggcctcaaaggagtaaaagccaccacgcatgtatagctggcagcagcggcactcagtgctgctgttcagctgatttatgcgtgtgcaagcaagaacgggcctgggcatggccagctgagcagcttgtgcagcagcagatattgggccgtttgctgctactgggctggagcagcggattgggcgtagcaggccaggttgcagtgtaactgcttcacagattccattcggtggctgaggcatcctatgaacttcggctggtgtg

SEQ ID NO: 11738 - DNA, 2022 bp, Oryza sativa
  ref <308>: DATABASE ACCESSION NUMBER: AK109086
  ref <309>: DATABASE ENTRY DATE: 2002-08-28
atgccttggcaccaggagccgatgaaggacgtaggagcctgcgataagcctcgaggagctggcaaccgagctgtgattcgaggatttccgaatggggaaaccccgccgggttcattcccggtgacccgcgcctgaatatatagggcgtgtggagggaacgtggggaagtgaaacatctcagtacccacaggaagagaaaacaacagtgattccgtgagtagtggcgagcgaaagcggaacaggctaaaccgattgcgtgttcaagccggcaggcgttgcgtggtcggggtcgtgggacctttctgacaggtctgccgatctgtcgaggagtgagaaagtcgcgtcatagtcgaagggtcttgaatggcccggcatagagggtggtacccccgtagacgaaatggcgtggcctcctgagggtgttcccaagtagcacggggcccgagaaatcccgtgtgaatctgccaggaccacctggtaagcctaaatactccctggtgaccgatagcggacaagtaccgtgagggaaaggtgaaaagtaccccgggaggggagtgaaatagtacctgaaaccgtgtgcctacaatccgtcggagccttacggggtgacggcgtgccttttgaagaatgagcctgcgagttagtggtatgtggcgaggttaacccgtgtggggaagccgtagcgaaagcgagtccgaatagggcgtttgagtcgcatgctctagacccgaagcggagtgatctacccatagccaggttgaagcgcgggtaagaccgcgtggaggaccgaacccaccagggttgaaaacctgggggatgagctgtgggtaggggtgaaaggccaatcaaactccgtgatagctggttctccccgaaatgcatttaggtgcagcgtcacgtgtttcttgccggaggtagagctactggatggccgatgggccctacaaggttactgacgtcagccaaactccaaatgccggtaagtgagagcgtggcagtgagactgcgggggataagctccgtagtcgagagggaaacagcccagaacaccagctaaggcccccaagcgtgtgctaagtgggaaaggatgtggagttgcacagacaaccaggaggttggcttagaagcagccaccctttaaagagtgcgtaatagctcactggtcaagtgattccgcgccgacaatgtagcggggctcaagcacaccgccgaagctgtgtcattcacgcatgtgccaggtcttcggatccaggcgtgtggatgggtaggggagcgtcgtgtggcgagtgaagcggcggggtgacccagtcgtggacgccacacgagtgagaatgcaggcatgagtagcgaaagacgggtgagaaacccgtccgccgaatgaccaagggttccagggccaggctaatccgccctgggtaagtcgggacctaaggcgaggccgacaggcgtagtcgatggacaacgggttgatattcccgtaccggcgaagaaccgcccatatcgaacccggtgatgctaaccacctgaaacctgagttcccttcggggggcttgggcggagcgtgggatccgatccggtagtaggtaagcgatggtgtgacgcaggaaggtagccaccgcgtggcgatggtagtccacgtccaagggtgtagggcgaggtgtaggcaaatccgcacctctcacttcaatgtggagtctgagacctgatggtgaccgcatcagcgggaagcagggtgatcctatgctgccaagaaaagcatctagcgaggttcgagccgcccgtaccccaaaccgactcaggtggtcaggtagagaataccaaggcgatcgagtgaatcgtggttaaggaactcggcaaaatgcccccgtaacttcgggagaaggggggcctgaggggtgaagccgcttgccggctagctcttgagggccgcagagaccagggagaagcgactgtttactaaaaacacaggtccgtgctaagtcgcaagacgatgtatacggactgacgcctgcccggtgctgg

SEQ ID NO: 11739 - DNA, 920 bp, Oryza sativa
  ref <308>: DATABASE ACCESSION NUMBER: AK109087
  ref <309>: DATABASE ENTRY DATE: 2002-08-28
ggtgccgcttgcaacatctcgaattctcgatcgatcgattcattgtttttccttcccgccatggcgggttcgttttcgtcttctccaaagctgctgctgctgcttcttcttcccgtcgtcctcctcgctccgctgctcgaagcacggcgtctgcacgtgctgccgccgctgatgttgccgagcgacggcgtggtcgtcggaggcgccgtcgaggtcgagggcggcaggtcgggtaacgccccgccatcgcctcgtccgcatggccgggtgacgccgctcgccgacggcggcggcggcggcgtgctgaggaggccgccaggacgcggtccgccgccacctggtccaggtggccatgtggggccgctctccggcggcgtgtcgtcgtcggccgggagatcgtcgacgaggccgctgatgatctccgacgacgacggcggcgtgtcggggaggcagtggcctgctcccccgccgccgcctgacccgaacaccccggtgcagccgctctccggcggcgacgggcggccgcggcagctcgcgccgccgccgccgatgggaaacccgccgcccaacacccaccgtcgacgcaccgatcgtcctccccgccggctgccggcggacgacgacatggccggtttgctactccgcgtgatccgcgacgccgtcgaatacatggtcggcgaactcggagcctgatatccatcgagaccgagaagaagatacgagagatccgagaattatacgtatatttgatttgtacgcatgctgaagaaaggcaagtacttacgtattaattaacgtataccaactgtatagtcgtatactcgtatgtatgtattattgtatttgtattagtatacagtgtacagttgtaagcctagctaagaggctagctgagtaaacgagatcagacagttgcatgc

SEQ ID NO: 11740 - DNA, 1193 bp, Oryza sativa
  ref <308>: DATABASE ACCESSION NUMBER: AK109088
  ref <309>: DATABASE ENTRY DATE: 2002-08-28
attatcggatcaggaggaccttatgatgcagagaacaatgcagctcgttctcagggtgaagagatcgtcgggtttactacaccaattctccactgcggcgaactcgcagaggttggccgggaaggtggccgtcatcaccggcgccgccagcggcatcggcaaggcgtcggcgaaggagttcatcggcaatggcgccaaggttatactcgccgacgtccaggacgacctcggccgcgccgtcgccgccgagctcggccctggcgcgacgtacacgcggtgcgacgtcacggacgaggcgcaggtcgccgcggcggtggacctcgccgtggcgcgccacggggcgctcgacgtgttctacagcaacgccggcgtcctgggctccatcgcgccggcgccgctcgcctccctggacctgggcgagttcgaccgcgtcatggccgtgaacgcccgcgccgccgtcgccgccgccaagcacgcggcgcgcgccatggtgccgcgccggagcgggtgcgtcctcttcacggggagcgtgtcgggcgtggtgggcggcacggggccgacgtcgtacggcgtgtcgaaggcggccgtgctgggcgtggtgcgcgccgtggccggggagctggcgcgccacggcgtgcgggcgaacgccgtctcgccgtgcggcgtcgcgacgccgctgtccatggtgcaggtccttgaggcctaccccgggatgagcttcgaggagctcaagaacgccatggcggcgtccatggagcagatggaagctggcccgttgatcgaccccgaggacgtggcgagggcggccgtcttcctggcgtccgacgaggccaggtacatcaacggccataacctcgtcgtcgacggcggcttcacggtggggaagctgctcaaaatccccaaggagtagacagtgatcaagagcagtgcaacaagacaagaaaaattgcaggatgcaaaaaaaaaaaaaaagaacgaataaggaagagagtctactttgtaccgtgaaatatagactccccaaatttacttttcgctcccaaataaggctgtgttctattggaacttcgcaagtaaaacgaagcgacgaattaacgtatgattaattaagtattagcttaaaagatttttttctttaaaaaaaatgtaccatttaatagtttgagaagcatgtctgtgtaaatgagcgaggt

SEQ ID NO: 11741 - DNA, 848 bp, Oryza sativa
  ref <308>: DATABASE ACCESSION NUMBER: AK109089
  ref <309>: DATABASE ENTRY DATE: 2002-08-28
tggctgcaaaataaaaaattcagactcaactctccttaatctcatcaaaaacacacacaaaagcacacgaaaatttcaatgggatcgaagctttcgtgcatctaccggccggagagtgacatcgtcgtcgagtcggaagctccggcgccgccgccgccgccggcgagggtgatcgcggccgacggctcgctgagggagctgccggcctctccctgcgtcgcggtggtctccgacgtgctcggcggcggcgacgacgcggcgtccttcttcgtgtgcaactccgacgcgctctacttcgacgaccgcccgccggcgctgtcccccggcgagccgctccggccgggggagctctacttcgtgctgcccagggcgatgctcggccggccgctgtccagcgccgacatgggcaggctcgccgtccgcgcgagcctggcgctcgtcggcgagaggccacagcggcggcggcgacaccggcaaggcggcggcaagaagcagaagaagaaggtgcacgtcatgccggcgcaagcgcaaagcagagacgacggcgacggcgacgtcgacggcgtgttcaacgagaagctgaacgagcagacgctcggcgtgttcgccgcgttcctgagtccggcgagaggcgccgcgccggcggcggcggcggcggcgaggtctccgctgaagagggcgttgagcttagtagaagaggaggcatagtagtgaggcagtaggaagtagtagtaggaatccgtttcttgttttgcgcaaagtagaatgaaccagtatatcatcctcaagtttggttgtactcacaaacaaaaaaaaaagagaggaagaaacaggacgaattttgaagt

SEQ ID NO: 11742 - DNA, 1233 bp, Oryza sativa
  ref <308>: DATABASE ACCESSION NUMBER: AK109090
  ref <309>: DATABASE ENTRY DATE: 2002-08-28
aacgctttcctgaatcagcacactcctacttgcagctagagctgagcaagccaaagctttttatcactcttggtggtgttcttagtagagcttttcgcaaagattgtgccatggatcttcggcgagttcattgcttgggttggctccttgttctactcctcttcagccatgaagctgcagggggaggaggagcagagcaggtagcaacacaagcgcatcacgacgcgtcgcggcggctctccgcgcaggtggcgcacggcacgccggagcgggacgtgacctcgccgctcgccactgtcccggtggataacccggcggcgaaccccaccgtgacgtcgacgacgaacccggcggcaatgccggggacgcagacgacgccgtcgctggcgaacccggtggccgcgggcggcggcggcggcggcggaggcgggagctggtgcgtggcgagcccgagcgcgagcacggcggcgctgcaggtggcgctggactacgcgtgcgggcagggcggcgtggactgctccgccatccagtccggcggcggctgcttcaaccccaacaccgttcgcgaccacgcgtcgttcgccttcaacagctactaccagaagaaccccgtccagaccagctacgacttcgccggcaccgccatcctcaccagcaccgatcccaatccattcacctctcgttgcaattctgcaggctcctcatcgtgcaagtacccatcgacgagcaccggtgcttcggttctgaacacgtcgacgccgacgaacccagctttcggtggctacgacaactctcctcctggattcggcaacaactcccctccgctgtacgggtccatgtcgcctccgggttacaacgacaacatcggcgccgccgcggccatggccggcagcaaggaaacactcctgtcgctggcgtgcgtcgtcgcaacggtttctctgaacctgtacaagtgagaatccaagctgctgtttcacgattcaaatctgtagaaactgcacggctttggtggatgttttggtactcgcacagttgccctgatgcaagcagaaagcagagaaatgaatgtgcagaatatgttttggtcagatgagctaggagaagcaggccggcaagattgatagatagatcgacttctcctagctgtagaaatagtagcatgtggtgctgtatgtagttactagtagtaatcagtaagaacattgagctgaacttttgcgttcacctacatat

SEQ ID NO: 11743 - DNA, 1381 bp, Oryza sativa
  ref <308>: DATABASE ACCESSION NUMBER: AK109091
  ref <309>: DATABASE ENTRY DATE: 2002-08-28
ctccatggctttccaccttcgcttcctcctcctccttgccctctagctactagctcacactgtcacagtcaccacacagctactagaagtaagatttagctagattattcattaatctgtactaattgatattgctaagcagctgcagcagcagcagctggttggggggaggaagaagaaggagagtgttcgatcggcggcggcggcggctcaccggtccgacatgcgcaggggttcaccgtggtacgactactactactcctcgtcgtcgtcgtcgtcgtcgtccccggcgcggagcaagcgcgcgcaggcgcagctcgtcgtcgtcgtctccgccgccggcaagaagctaccctggccctcgccgcggcgtcgcgggagccatgtcgtcgccgttcctgggctcttcttcctcttccgcttcgtcgcccctctcttacctgaccccgcctaggcctcctcctcctcctcctccccttctcatggggcagggatacgccgctgctgccaatggcggaattggcggcggcggcgtcgaggcggtgaacgcggcggcggcgccgaggcagggtggcaggcacgccgggcacccgccgctgccgaggccgccgccgaggcagtgcccgcggtgcggctcggcgaacaccaagttctgctactacaacaactacagccgcacgcagccgcggtacctctgcaaggcgtgccgccgccactggacggagggcggcacgctccgcgacgtccccgtcggcggcggccgcaagaacagcaagcgcgccgccggcggaggcaaggccggcgccacagcctcgacggcggcttctgcccatgtcgtcgcgccggcggcggcgccgccgacgtcgtcgtcgttccccgatctcctgaggcagatgctgatggcgccggctaccgccggtggcggaggcggctacagcatcgacctgaccgcgtggcagcaaatggcggcgttcgcggctccacctcaggccgccaccggcgatgtcggcggcgcggtcggagcggcgtcgacggcggcgccggacgcgaactgcggcggcggcggcgtgcagtactggaacgggtggctgcaagatgacatgcccggtctagatggttcatgttaagtaacccgtgcttgtattgatacgtatacgtatacggagctacggatatatataccgaatacgtatacgtatatatatgtgtgtgtatatgcatgtatagcctatgtatgcatacatgcatacacatgcgctatgaaagtatatacgtatgtcgtatgcgcatactaaattagcgtaacaagagcctatgactgtactagtgtagtttggattcaggttattaactcgtgggtatatgttgacctactgtagtt

SEQ ID NO: 11744 - DNA, 927 bp, Oryza sativa
  ref <308>: DATABASE ACCESSION NUMBER: AK109092
  ref <309>: DATABASE ENTRY DATE: 2002-08-28
aattttttcagcagcatctctaatagatacctactctattccgccaacatgcctgtcccaagctacggagccatgcctttgagcaagatgttcttgctcgtccgcgttcttcaggccatctgcatgatcgtcgtcattggcatcacatccaactttgtacagatgatcgtggtcactggtgttgagccaccgaaggagttcgtcggcaccctcagtgtaacctgcatcgctgcgctatacatcatcgtcagcgtcggttactactggtcatacgccaaccttggtctcctcgtcatgactggtgtcgactcgctccttctcatcgcctttatcgtctgcgccgttactgtcggcaagcccatgtcatttcttaactgctacgtcatcggcatgtcttccaaggaagtcgacgccaaatacgcctacgcttttgtcaccgcggccgcccagaatctcaaccagtcgggctccacccttgaccttcgccactgggccggcgtcactcgcaccaactgcttccaggccaagactgtatgggggatggctattgctctctgcatcttgttcaccgtctcctgcgctctcctgccaacactctggtacaagaacaaaaagcccgcccccaagactatctccgaggcatgatggataacgacgaatgcgtgaaaaaacgaccgttactagagcaatggaatgagcaaaccaaaattcggtctcatttgccagcttttgatttaaaaaaaaaaacacagtactccttcatctcataaaactttatgaaaaagaatgcattgcgggggcgtttcttagggttcttacattttttatcgttggcttttccatcttttttcggctggacattgagtgtccctaatcctaatggatattatatggaacttgttctaaaaatacaatatgatatatgac

SEQ ID NO: 11745 - DNA, 1590 bp, Oryza sativa
  ref <308>: DATABASE ACCESSION NUMBER: AK109093
  ref <309>: DATABASE ENTRY DATE: 2002-08-28
gagcttaggtgcacctcgaccctcgtcacgtacgcagtctatggacgcaaggcaacaagactacccgcagtcaggtttgagcttgccctacacaccctactctgagccgtcttctgaggctctacctgcagatcaagcatctgctgcgcaatacccgccgccaggacaagaccctcgctcttcgaacctcacccccacctccgactacagtctgaacccgtcgtcggcgcgatcaggttccttcccggactacatccaacgttcgtatcaacccggcgcgcaaggtcaagcacccggaggtatggcgcaacaacagaatccatcaattgccgccgccacgagcccgacctactctcaccaacagcaatactcgccttatactccacaccacgacatgcagcactacccgggtcatccccagacgcccatctatgcgtcgcggcctgagtgggctggccagtatccccagcctggcatgcactacgctcatcccgcgtcttctggtcccccagcgcctgccatggtctctcctgtgcaaaggcctccagccggcggacaccctctctctactgtgtattcattcgtcccaattcctggcgcgcagcagcacaagcgcccgcgcaggcgatatgaggagattgagcgcatgtacaagtgtggctggaacggctgcgagaaggcctacggcaccctcaaccatctgaacgctcacgtcacaatgcagtcgcacggacagaagcgaactccagaagaatttaaggagatccgcaaggagtggaaggcgaagaagaaggaggaagaggcacagcgcaaagccgacgacgagcgccaccgtgctgatgcgcatcagcgcgcgcaggaaggcggtcctccaggcgaagcccccgtctatggacagatgcgtcaagcagttggcgtgcccggacaaggccctcctcacacacagttgccgcccattggctaccaacctgcggcctctggcaacaacgctgctcctcagtatggcactcagagcccaggtcttcctgagggcatggctcattaccctcagtcgccctatggacagaacccccagatgtaccagcagggtcactaggcacactcacacggtcttcctgatctatagaattctttctgcttctcgccgagccacgtcggttacacgagatgcgccctctctatcaacgacttctgcgacacccgaactgtctaacgagttttcttcttggggttatttgcattcttgccgtggaagcatgtgacgtattcagcatcttttcgacccggttgcggtttgcattttcactggcggcggcggctgtattccttcagtgaacggtgttcatggcttgacgggcacgatgtacgatcgtgaaagaaagagacggctacttttcaaagggttccacaaaatgtcatcctgcccatagaactgcctcccacgtcggcttgtttctctgcatgttcttctgctctgttcatcctcttcggcttgggttctgcaaaattctgacacatgttctcatagtggactagaggcacaacatgcgacccggcgctcagaaacaattttatgctttgtactcttac

SEQ ID NO: 11746 - DNA, 1558 bp, Oryza sativa
  ref <308>: DATABASE ACCESSION NUMBER: AK109094
  ref <309>: DATABASE ENTRY DATE: 2002-08-28
taggaatataggatacacgcatgcacgggtgtgcactgcacccagctgcatatcgtcgtatatttcataacccgagaagcacccggagccacgggctggtcgctgcagcttctcctccacttcaccaaccagccgcggcgtgcggggaaactcatcggatcatacagatgcatgcactctttgccgtcgcccgtgacacagccttctcatcgtcgccggcggccgacgagcacctccccaacgagcacccaggcggtcacctctggaaccagagcgtccttagcagggaagaagagcatgggagcaacgacgacagcttcagggagagcctcgtttctttgcttgacaacacgagagactacgtgatggctcccgaagtgttcgagggcgtccccgtggcatgcgactacctcaaggggatggacagcgacggcatggccgcatcagctgtcgccgcctatagcctggacaacaacggccagcacgctagtgttagttcaatcgagcatggcatcgctagctcgccgctgctggcgtaccagctggggaagaacagcgctgtggtgcaacggagcatccagcagcaggaggttggatctcccatggccgcatttctgcagcaactgattcccactagtgttctcgatcagtctggtatagggtttgggggagtttgtctggacggctcagcactggaggcttcgttttgcatgagaacttctccggacgtcagctctttcagtggccacaggtcagcaaccgcagaagaattgatgtctacagacacaagggagcaagaaattacacggctggcaagatcttgtagtagcagtggaagtgatcgtaacaagaagaaactatcagaggtaagaggaggaggcaaagcgaagaagttcaagtcagagacttcacatagtacatcttctcccaagcatcaatcacccaaagtgaagctgggggagaagatcacggctttgcagcagattgtgtcacctttcgggaagacggatacagcgtctgttctgttggaaaccataacctacatcaaatttcttcatgaacaaatacagttattcagccaaccgtatatgacaaacagcacaaacaagggtcatattcactggggaggggaagggaagaggaaggcaggtctggagcatgatttgaggggcagagggctttgcttggtccctgtttcctggacctctcaagaatactgtgatagcatcctgccggagtgctgggctccggcgtacaggaactacttttaccgatgagccccatacacattagacagctcacagccttgtctcacttactgcccgtgcaacggctacgttgggaagatttactgtttacttactctatgtttttcagtccccatgttatatgtattgctgagtctgtagcctagaacgaataaaaagagtgaagtgtataggcggtctctaaacttataagagtgtcatatctaggtccctgaactcttaaaatgtattttaggtttttgaacttgtactgcgtgtcatatatgtccaaatggatcccatctcattcc

SEQ ID NO: 11747 - DNA, 757 bp, Oryza sativa
  ref <308>: DATABASE ACCESSION NUMBER: AK109095
  ref <309>: DATABASE ENTRY DATE: 2002-08-28
atcgtttcttgcactcatagctcatagagttagctaacaatggcacgcactaagcttgcagctcttgggttcgttgttcttttaagcattggactagccagtgctgcaagagtagaaagatattctagttcccaaggttccggcacaggaagtggacagggaggaggatatgtgaatggtgggggagcgggggaaggaattggggccgggtccggtagcagtaaccgttatggtgctcatgcaagtggcggaggcggaggtggtggtggcggttacagccaatacggtggatcgggatctggtagcggatatggcacgggctcaggctctagccagacctctcaaaatagatattatagttatggcgggtcatccagtgctgggggtgctggtgctggtggcggcgctggacaagctggtggttattggccatccaatggtcaggggtctggtagtggtacgggttctggctctagctacgctgataataattactatggaggaccatacgcaaatgctaatgctggtggcaatggtggtggtaacggtcaaggccaatatggtggccgtggcattggcgcaggtgttggatcgggatacggtgacgccaacccttaatttccttcgtaaaggaaattctagaaatgagcccaacacacctttgtttgttgtcatgtctacgatgtacaatttgttctcatttatttgtacctgttcaatgtattatgcaacaataaataaagggcttcattgattc

SEQ ID NO: 11748 - DNA, 852 bp, Oryza sativa
  ref <308>: DATABASE ACCESSION NUMBER: AK109096
  ref <309>: DATABASE ENTRY DATE: 2002-08-28
ggaatccattcagtgccaatcaggtaatcagtgtgagagtcttttcaaagcgaaggagcaaattagcttttgtgttgtagatcgagcaggctaggtatagcgagaatggagtaccaggggcagcatggtggccacgccagcagccgcgccgacgagcacggcaaccctgcagtgaccaccggaaacgcacccaccgggatgggcgccggccacatccaggagccggcgagggaggacaagaagaccgacggcgtcctccgccgctccggcagctccagctccagctcatcctctgaggacgatgggatgggaggaaggaggaagaaggggatcaaggagaagatcaaggagaagctcccaggcggcaacaagggcaacaaccagcagcagcagcaggagcacaccacaacaacgaccggcggcgcgtacgggccgcagggccacgataccaagatcgccaccggcgcacacggcggcaccgccgccaccaccgcggacgccggcggcgagaagaagggcatcgtggacaagatcaaggagaagctccccggccagcactgagctgctgcatgccatgtgtgtgatcggtgtttcgatccgacgatcgacttcgatcacaaacaacgaaggatctccctcctgaagaataataatattgtgtgtccttgtatatctgtgtgtgtgttccgggtaaacaataaagtcgtgatgcagccacggcatgtgtgcgtacgtgtacgtagcactgtatgtaagtgcgcgtgtggtatatggcgtgttggttaattttcgtatattatttggctcaaattatatattttaaacatctatgtgaaatctgtttatcgtgac

SEQ ID NO: 11749 - DNA, 1605 bp, Oryza sativa
  ref <308>: DATABASE ACCESSION NUMBER: AK109097
  ref <309>: DATABASE ENTRY DATE: 2002-08-28
actaattaatatttttaataatatacgaaagagagaaaaagactctattaaatcacttttaacaaaaagtaaaaaccaaaaaactaaaaaatgtctgctagcattggtatcaacggattcggccgtattggtcgtattgtgctccgagccgctttggagaagggcgttaacgtggtcgccatcaacgacccgttcatcccactcgactacatggtgtacatgttcaagtacgactcgactcacggtcgattcaagggcgacatccaccacgccaacggtttcctctacgtcaacggccaccagatcagcgtgttcaccgagaaggaccccacccagattccatggggcaagtcgggcgctgagtacgtcgtcgaggccgctggtgtcttcaccaccattgacaagtgccaggctcacatcactggtggagccaagaaggtcatcatcacggcgccgtcggctgatgcgccaatgttcgtgtgcggtgtcaacgagaagacgtacaacccgtcgatcaacatcctcagcaacgcgtcgtgcacaaccaactgcttggcgccgttggctaaggtcatcaacgacaagttcggcatcgtcgagggtctcatgaccaccgtgcactcgtacacggccacccagaagaccgtcgatggtccatcgaacaaggactggcgtggaggtcgtaccgctgccaccaacatcatcccgtcgtcgactggcgctgccaaggccgtcggcaaggtcatccctgacctcaacggcaagctcaccggtatggccttccgtgtgccaactgctgatgtctcggtcgtcgatttgaccgtgcgattggccaagcccgccaagtacgatgagatcaaggctgctgtcaaggccgcttctgagggcgagttgaagggcattttggcctacactgaggatgaggttgtctcgtcagatttcattggtgaccaccactcgtcgatcttcgacgccaaggctggcatctcgctcaacgacaacttcgtcaagctcgtctcgtggtatgacaacgagttcggctacagctgccgtgtcatcgatttgatcaagcacgttcacagcgtctcgcactaaatatctctctatttctctatctatctctcatatattattaaaaaaacaaatttatttaattttatcctcatttgccaaaatttatagttttaggttaataaaaaaagactattagattttattaaacgtattttcaaaaaaaaaaacaactatatatctttttttatttttttaaaactttaaagaatatatctcctcaatgtgctcacacttatctaattaatttccttctttttcttcttctagaagagagctagattaattaatgttgttgttttcactctttcatataatattatttatagatcaaataaccgcagcacgtcagtcgtcattttttgccaaacaaaaataagcgtttttatttatcttctagttttcgtgaattattatcattctgaatttttcgttttttaatcaagtaatatatctacaaagtaggttgaacaaaaaatataaaagactattttagaatattttggtgatttaataaagtattttcaaaaaaat

SEQ ID NO: 11750 - DNA, 967 bp, Oryza sativa
  ref <308>: DATABASE ACCESSION NUMBER: AK109098
  ref <309>: DATABASE ENTRY DATE: 2002-08-28
cacagctggcggcgggagggatatggcggagaagaggctgctgctgctgccggtggcgctggcgatggcgcagaagcatgggggaggaggggagagggtgtgggcgcggccgtggaggtgggccaagacggcgttcttcgtcgtcgccatgatcgcgtcgctgctgctcgtctgcgcgccgccggtgctcgtcgtgatactcgacctcgccctcccgcccgcgctcctctccgcgcgcctccgcggcggcgggggcggggacgacgcgtcgttcgtggcggccgtcgtcgcgcaggcgcgggcgttcgacttccgctcgtcgctcgtcgacctcctcgccgtctccgccgcgcgcgcgctgctcatactcggcgcgtacatggcgtgcggcggcggaggcgcggcgtacctgtgggtggtggcgacgagcgcggcggggtcggtgtcctacgtgctggccaaggccgccgccgccgtgctcccgcgccgcggcgtcgcgccggcaccggaggggaagggcccggagcccatgctcctgctgtcggttgcgctcgccgccgcgcacctcgccgtcgcgtaccgcaccagctgccgcgagcgccgccgcctgctcgtctaccggatcgacgtcgaggcggttaaaagggggccatcaaacaaagcagtgtagtgtctgagtctgacattgtgagaagatacacgtatacagatacacagatttttttttagtgattttcttctaggaaaatttttggtcttagttctgctttgtgatgtacactccaacgcatggcatgctgtaacaagtgaatcatacgtacattgtaaatatgaaacagtctcttcgtagttcggcctcctgaaaatgcatttgcaggacgagccgtgttgatgaactccttgttcagtcttctttcctgtcctactatttgcaatatagaagttgtgattgataatttgatatggt

SEQ ID NO: 11751 - DNA, 1237 bp, Oryza sativa
  ref <308>: DATABASE ACCESSION NUMBER: AK109099
  ref <309>: DATABASE ENTRY DATE: 2002-08-28
tgtgtgccttgtgcctttctctcactctctctctctctctctctctctctctctctctctctctctctctctctctctctgtgtgtgtgtgtgtgtgtgtgtgtgtgcgtgtgcgcgcgcgcgctgcaggcgtacttgcggcagcttgaggagcagcagcggcagcaggagcaggagcggctcaagcagcagctgctgcagcggcagatgcaggagaaatttgcggcagaggaggcagcagcagggcagctgccgggcatcccaggcagtgatgatgacgatgatgatgatgacatgtcagacatagaagagttaaaccctggcgcagttggagacgatgactacaaagcacctcctcacctcagcagggggagaggcaggggcagaggcaggggcaggggcagccggggcggcaggggtggcagggggcgggggcgaggcaggggacgggcggctgcagctgcagctgcagctgatgatgaggcggatgatgatgcagtagatgcgcagcagcggccgaagcgcaaacggagaacgaggcaagaactgttggctgatgctatgggctacactgggtctgcagatgagggaggggaagagctgttcagtgcgagtgagcagaaagccaagcggcagcggaaacaggccggcagcagcaacgcaggggcagccagcggctttgagcagcagcaggagcaagaggggcaagatgctgggctggcggcagctgctggcggctctggggacctcaccagtttggccgcaaagctgaaaagtgatttgaagcggcggctgtctggcgctgcagcagctgcagatgacggcactgctgctgatgctgctggtagcagcgcagctgttacacagcaggtgcttgagctccacacccagctggcagcagctcagcagcagatagctgcgctgcagcagcagctggacacttcggcgcagcagcgggcagcactagagaaggcgcaggctgaagcgatccagcagcgggatactgcatatgctgagcgggacaagagccaagcgcagtgcagggcgctacagaaagagcatgaggggataaagcaggtgctgaaagagctgcgtgctgagattggtgggccgagcgaagaaggagcagaggatgaggcaactgctgcgaatgcagtagacagctgaccttgctttggcagtcagctagctgcatgtacaggttctacacccacaaacagtgaacatgtttgctttc

SEQ ID NO: 11752 - DNA, 1470 bp, Oryza sativa
  ref <308>: DATABASE ACCESSION NUMBER: AK109100
  ref <309>: DATABASE ENTRY DATE: 2002-08-28
ctttttcagattggccggtgccttcggtggctaccagcctgttcaacatgtctcaccgcaagtttgagcaccctaggtgcggttctttgggcttcttgcccaagaagcgctgcaggcgcggtcgtggtaagttcaagagcttcccccgtgatgatgccagcaagccatgccacttgactggcttcattggctacaaggccggcatgacccacatcctgcgtgatgtggacaagcctggcagcaagctgcacaagaaggagacttgcgagccagtgaccattgtggagtgccctcccatgattgtggtgggcgtggtcggctatgtgaagaccccacgtggcctgcgcaccctgaacactgtctgggctgagcacctgagcgacgagtgcaagcgccgcttctacaagaactggtacaaggccaagaagaaggccttcaccaagtacgtgaagaagtacacagacggcaagaaggagattgacagcgagctggcgcagctgaagaagcactgcagcgtcatccgcgtgctggcacacacccaggtgcgcaagctgggcctgggccagaagaaggctcacctgattgagatccaggtcaacggcggcagcgtggctgacaaggtggactttgccaccaagctgtttgagaaggccgtgactgtggacagcgtgttcaacaccaacgagatgatcgacaccatcgccatcaccaagggtggtggtactgagggtgtggtgacccgctggggtgtgacccgcctgccccgcaagacacatcgtggtctgcgcaaggtggcctgcgtgggtgcctggcaccctgcccgcctgcagtggagcgtggcacgcgctggtcagatgggcttccaccaccgcacagagatcaacaagaaggtgtacaagattggcaagaagggtgaggacagccacaacgccggcactgactttgacgtgtccagcaaggagatcacccccatgggcggcttccctcactacggtgtggtcaaggaggactacctcatgatcaagggtgccgttccaggcaccaagaagcgccccatcaccctgcgccgcagcctgctggcccagactagccgcagtgctctggaggagatcaagctcaagtttgtggacacatcatccaagttcggccacggtcgcttccagacctacgacgagaagctcaagacctacggtcgtaccaagaactaagctgcctgcggtgtttttcaaaggtggtgaaccctggggcttgctgctggggctttcaaggccagcgccctctgagcttcgcatgggagcctggtgtgagctgagcaatggcttggcatcagctgcggctggtgcggcataggttgctggtggatgtggactgcaggtttgcttgtagcggtagcttgtgtatgcgttgcttggagcagtgcacgtcccatgccctcctgtggctgcattggctggtaactactcttgtatt

SEQ ID NO: 11753 - DNA, 1282 bp, Oryza sativa
  ref <308>: DATABASE ACCESSION NUMBER: AK109101
  ref <309>: DATABASE ENTRY DATE: 2002-08-28
cgattggcgtatttcgaactatggcgctaaaatcactgtttaccaagctcctcagagcgctgacgcgaccttgctcaatcccttcgaagacacgcagggcaggagctggggcagctactacagcgatgctctgacgtcagagctgcgacctggctggtatctcaatcctctgtgcggcgactactgtctaacgtcatcgcagatgacctttggtggcaaaggcaatctcagcacgtccacgtcagccaacgtgtccttctacctccctctgaacatgattgacgagagcacgatcaaggtgggcgactacgctgacgtgtccctgcacaatggcggcacactgggcaacgaagtcgtcgtcgatctgtcgcctggcgcggtcatccacctcacaggtggctctctgaacatggaggcacgtagtacaatcacaggggccggagacctcgtagtcgacgcaggcgctcacaacctcgccttctccatcaacgctcatatcaccatctctaacggttcgctgatctggccgacgggtcgcggtccgagtcagaccatcaccttctatggcggcctcatgatcaatggcacaggcagtctgcaggtagagccctacgccaccaccatcgtcatccacaaggaggtctatctcaaggaccaggctgtcatccagttccctttaattggtatcgcaccgcagccctcgccctacgacgagttagacgcacccgacacctttccgagaggaaacatgacgtcactcaactccttcatttgggaaggaggagagctcacaggcaacgtcgacatctatgctctgacgcagttgatccttgacggcgatcagaagaacatctcttcagtggcaaagcttatcaatcgcggtcactgcgagtggggaacaggtgatgtcatcgcttctaataacggagacttcatcaactacggcacgatgcaagtgcgcgtcactgccggcagctccttcacagccaacatggtctacaagggcagcgacgtgcccgtcgccaatggtggagatcctttcgctttggattatcacacgtgggatatggataacggcgccctagactacagccaatacatcagccttcgcacggagttcgtgtcaagagttccgaatggctggaactcgtcagaccaacaccaatcccacatattcaataactaacttcctgtggatagtgtaggtttaacttttctttggttttacgtttatttctcttctttctcaatttgactgtaaatagttgtggactatgtcttt

SEQ ID NO: 11754 - DNA, 1038 bp, Oryza sativa
  ref <308>: DATABASE ACCESSION NUMBER: AK109102
  ref <309>: DATABASE ENTRY DATE: 2002-08-28
aagcgaaaaaccgagtttgtatactcgataaattaagggctgtagcgttcctcttccgatggctgatttggtgaagctttacacggccgaagatgtggccaaacacgtcaaagacgcggacccaaactacgtctggaattttgcgtacggcgcgaatctcaatccgaatgcgctcacgaagcggcgtaagatttatcccgcatgctctgtggccggcgtgctgtacgggtgggagttgcgtttcaactgccgcggattccccgcgtttgagccgggttttgcgaatgttcagcgcacagacgtgccgaacgcgcaggtgcacggtgtactgcaccgtatgacgcgtgccgaagccgatcatctgatgaagaccgaaggcggtggcgggtacgacgatttgccgggctataagtggaccgaagtcgaagcggagacgtacaccggtgagcgcgtgaaagcgttcacactctgtatgtcgcagacgcatgcgggtctgctgccgtccaaccgctatctgacgctcatacgcaatggcgcggcttggcacaaactgcacccgcagtacctgcagtggctcaacgcatatccgggtaacagcgccgggtggggcgcgcgcctgtacctgttgctgtgcgccatcgtgctgctgccgctcgtgctgttgcttgtcgccgggttcgtgctgttccgccgttcgcacgcgacgcacaaactcgcatactacgcacagaacatcgtgtggtttatgcactgccaaacgtgtcgttccgataagagcgccggcgtaccggacaccttcacgttgccacagcgcgcgccctttccgtatcccgtgacggtcacgagcccgcaatggacggacgcagaacgcgcgggcggtatcgacgcgaagttgcgcggccgcgcggctgcctctgccgccgccggcgccgccggcgatggcggtgatgcgaaggcggcggaactggccgtcgcacagtccgtgcaggcgcaggggcagggcagcaaaaaggccgactaaaacacatttccacggag

SEQ ID NO: 11755 - DNA, 1250 bp, Oryza sativa
  ref <308>: DATABASE ACCESSION NUMBER: AK109103
  ref <309>: DATABASE ENTRY DATE: 2002-08-28
acaactccacactctggtccatactctagcaaagcacttgtgactgcagcatcatgaggacaacatctctctccggacttctggcactcgcctcttcagtcgaagctgggcttcgcttcccatgctcaaccttgacattccagcgtcttgatcccgctgggcaacctggcgccttcccatcctcgcatgtacatcacatcgtcggaggaaatgcgttcaacgcgaccatggaaggagatgttggcgagcgtgcgacttgtactacctgtcagatggctgaggatttttccaactattggacggccactttgtacttcaagcacccacagaatggatcttaccatcgcgtcaagcccgctcccgtcctgcctcttcttggaggatctaatggcgctgtaggtggacttacagtctactacacccagaacgatttgagcagggataacctggcacaaaacaaagtcaagtctttcccacctggcttccgtatgacagttggcaacccagctgctacttcaaaggaccatgctggccttagctatcagtgcatgtcctcacatgattcaagcggagcaggtagaggtcgcattaccaacactatgccaacgaccccatgcaccggcggtctcttcaccacccaccatttccccgcatgctgggatggaaagaacctcgacagtcccgaccaccagtcccatatgtacaacaccgtcaattccgagggcttcaacgccgcacccaagtgcccatcctctcaccccgttcgtatgccccaagtgactttcgagaccgtttgggacactgttcccttcaacagcatgtggccctccggcgcccccaacccctttgtctggagcttcgaaggcagcccaaccggctacgggacccacgccgactacatgttcggctggaagggtgacagcttacagaaggcgatggacaaatctgaatgcttctacgatggctgcggttcgatcaagaagcagcagatgaatgttgccaaccaatgcactgtcaaggacttcgttaatgagccaactgagggctggcttaaggacttgccaggaatggctatgcccatgaactaatcaggaggcaaagacggacggagaaggtgtctaggttgtcaggcgcatttgcaggctccattagaacagagaaactcacacgaaatcttgatttagactgcaattgcgttaggataatgtcatcattgtataagcagaagcaatgtattccatcaactttgc

SEQ ID NO: 11756 - DNA, 1034 bp, Oryza sativa
  ref <308>: DATABASE ACCESSION NUMBER: AK109104
  ref <309>: DATABASE ENTRY DATE: 2002-08-28
aagtacgcgtcgtccccctcccatggcgagcgccgcggcgtcggcgtcggcgtcggcggcgcaggagctcgaccgggagcagtacctgcaggagctgatccggggctccatgctggacccgccgtcgtcgtcgtcgtcccgcgcgggccgcgtgcggccgctcaccgacgacgagatcgggcggttctactgcgaggtctgcatggagtggaagctggtgttcgaccggttccgcgtctccgacggctgcccccacgcgttctgcgtcgcctgcgtcgtcggccacatcgaggcccgcgtcgcggcggggagcgtgcccgtgccgtgcctcctggcgggcgggggcggctgctccggcggcggcgtcatgcacccggagcgctgcaagaagctgctcgacatcgacgtgttcgaccggtggtgcgtcgcgctctgcgagcgcgccgtcggccccgcgcgcgcgcggtgcccctaccgcgactgcggcgagatggcggcgctcgagggcgaggcggcggccgcggccctgcccctgcgcgccgcggcgtccaaggcgtcctgcccgacctgttcccgcgcgttctgcctgcagtgcgaggagccgtgggacgaccgccatggcggcggcggcggcggcgacggcggcgcacggtgcgcgctgacccagctcgccaaggggcgcgagtggcggcgctgccccagctgccgcgccatgatcgacaagatcgatgggtgcaagcgcatgacatgcagatgtggcactgtgttttgctacgactgcggttcatcctttaatccgagaatgtattcatgcaagtgtactcctcgcaaatcttcacaatcggaggaggaagacggattcatcgaccttacttgctcagaccgtccgcttaatctggggaatcattgctagtaatgttctgtagcgagtcggcgatcattcgattcaacctgtttccattactccatctgtatatgcggagttcttgttcttgacggaaacgataatgatatgtcgcgatttctcatcgacc

SEQ ID NO: 11757 - DNA, 1337 bp, Oryza sativa
  ref <308>: DATABASE ACCESSION NUMBER: AK109105
  ref <309>: DATABASE ENTRY DATE: 2002-08-28
acattaaaaaaaatattttaaaagaaaactattcgcgatatttagaaactaatctttttgtgtaagccaaaaatgagcacgcaaggaaaagttattaagtgtaaagctgcggttgcttggggtgccaaacaacagctcaagatcgaagagatcgaagtcgatccaccgaaagccggtgaagtccgaattaagataacggccaccggagtttgccacactgatgcctatacactaggtggtgaagatagcgaagccgtctttccggttattctcggccatgagggagccggcgtcgtcgagtcggtcggtgagggtgtgacgtcagttgcgcctggcgaccatgttatcccactttatacacctcaatgcaagaactgcgagtactgccgtagtccaaagacgaatctttgcgtgaaaatcagagcgacacaaggtaaaggtctgatgcctgatggaacgactcgcttcagtattaatggtcaacggttgtatcactatatggggtgtagtacgtttagcgaatatacagttgttgcagatatttcggttgcaaagataaatccggcggctcctttagataaaatcggacttatcggttgtggaatcagcactggctacggtgcagctttagtcactgccaaagtcgaaaaaggttcaacagtaggtgtgtggggtctcggcgccgttggcttggccgttataatgggagctaaagcggctggtgctaaagaaatcgtcggtatcgatatcaaccctaacaagttcaagacagccatcgaattcggcgctactcaatgtgtcaacccgaacgatttccccgacaagcctttccagcagacgctcattgagaaattcgatggtggcttcgactatactttcgagtgcatcggaaacgtgaatactatgagatgtgccctcgaagctagccacagaggttggggtgtttcggttattattggggtcgccggagccggaaaagagatcgccacaaggccattccagctggtcactggacgcacttggaaaggaaccgcttttggaggttggaagagtgttgatcaagttcccgagttggttgagaagtatttgacaaaggagctcaaagttgacgagttcatcactcatacaatgccactcgccgaaatcaacaaggcttttgatctaatgcacagcggagaaagcttgcgttcaatgattcaattctaaagaattttatcgatccgattttgaatcacatagaacagaaaaccaaattaatataagttattaatgttttatccgtagatatatttctcttaaagatttgattagtctaataaacaaccaactttatcaac

SEQ ID NO: 11758 - DNA, 1899 bp, Oryza sativa
  ref <308>: DATABASE ACCESSION NUMBER: AK109106
  ref <309>: DATABASE ENTRY DATE: 2002-08-28
attttattttacaggcagcgacacatctgacactacgcgcagttatatatacacatcatgcctgttattaccgtagccaaaacagaattgttccgcgtactcggcgaagagttcactgacgatgaattcagtgacttgtgcttcaagttcggtattgaactcgatgatattcacgccgaggatggatcaaaggatattactaacgttcctgcgcacaaaattatgtacaaaattgagattccagctaacagatacgatctgctctgtatcgagggtctatcgcgagcactcagaatattccgcggcagagagagtttgcccaactatcacgtgtctcagccagcgcagatgcagcgcatggtgatcaaggagtcggtgagtgcggtgcgcggagtggtggtgtgcgcggtgctgcgtggcatgcagttcacccaagcagcgtacgacagcttcatcgatctgcaggagaagttgcacgagaacatttgtcgcaagcgcacgctggtcagcattggcacgcacgatctcgacacgatccaaggcccgttcagctacgaggccctgccccccaaagagatcgtatttgccccactgaacaagaccactgcggtgaatggcgagcagttgatgctagatctagccaacgacaatcacctcaagaagtacctgcacatcattcaacacttgcccacctatcccgtcatattcgatgcgcagcgacgcgtgctctccctgccaccgatcatcaacggcaatcactccaagatcaccctcgacacgcgcaatgtgctcatcgagatcaccgccaccgatctcaccaaggccctcaccgtgctcgacacgatggtcgccatgttcgcgcagtactgtgccgtgccgttccaagtcgagcccgtggagattgtgcacgagaagaccaatcagctccaggtctatccgcagtggggtcgctggcctaccgtcaccgccgatgctgcaaagatctgcaaacaagtcggcatcgaacaacagcccgtggccgatctgatcgccatgttgcgtcgcatgagtctgcccgcacgtgccagcgccacttctgccaccgaactcatcgtcgacgtgccacccacgcgcagtgacgtcatcgccgcgtgcgatgtgatggaggacgtggccattggctacggctttgaacgcttgattgcccgcaagaccattccgcacaccttgaccagtggccgtcaacagccgctcaacaagctcaccgatcagctgcgtcacgtgctcgcctgtgccagctacgacgaggtgttgaccttcggattggtctcgcgcaaggagaattttggttcgctgaacaagcccgacgacgcctcggcagcagtgatcgccaaccccaagacgcaagacttccaaattgcccgcaccacgctgttgccgggtctgctcaagacactgcagagcaacaagagcttgccgctgcccctgcgcgtgttcgagatctccgacgtggtgctcaaggacaccagtgtcgatgtcggtgcagtcaacaagcgcatgttgtgtgctgtcttctccgacaccagctctggattcgagaacattcacggtctgttggacacgatcatgattgccctcgaagtgccttggaaacaccgcgacgacagcaagaagagtcgcgtcaagacacacgagtcacatcaaggccctgcactcagctacgaagtgctgccctctgaagataacacctacttccctggcaagcgaggagacgtgtatttgaacgataagaagattggtgtatttggcatcttgcaccctgaagtattgaagaacttcggtctgactgtcccgtgctcagcactgcacatcgagattgaacacttcgttgattactaattaataaagcttaccgcactc

SEQ ID NO: 11759 - DNA, 1010 bp, Oryza sativa
  ref <308>: DATABASE ACCESSION NUMBER: AK109107
  ref <309>: DATABASE ENTRY DATE: 2002-08-28
acttcaccagccaactcaccagctcaagtctctttgacccttcggtctgtccattcgttgttaccaactaatactctcattaataatcaccttccgccaaccaccaaccaccaccttaaacttttttaagttcaaacacttctaatcagccaagatgcgttacaccgttgctgccttcgctgctttcgccagccttgctgccgccgtccccggctacggatacggagaggccccagttgtcactcctactcctaccccagcctaccccgcctacccagtcgagacccccaaggcccctgagtacccagcttaccccgtgagctcggctccctccaagccttcggttccctcgtaccctgagtacccagtttcgtcggctccctccaagccttcgtctgttcctggatacccagtctcctcggttccatccaagccctcttccgtccccggataccccgtctaccccccatccggccctgcctcctccaagcctgttgtgcctgtctactccaagcccagcaagcctgaggagtcctgcgtcagctccaccaccatcactgttaccgtcccctaccccactggaacccccatcgtcccaggtggccccaagccttccggccctgctggcaagcccccaggtggctaccccgttggcccatccggtggtgttccaggcaagccagtctaccccactggcactggtgttcccggaaagcccgtctaccccaccggcactggtgcttacaccaagccttccaccccagcccagttcactggtgctgccaactcgctcaacgctgctggtttcgttgctggtgttggtgctctcgctgctttcttcttgtaaatgtcaacttccaactaagcatgcctacgggtaggctatgactttacatgatgcattgcacaaaaggatcggtattatattccagtagatatccttggtgtcgcagagggtaattgtaattaaaacggggacggtgttggagacgtagaacttgaaaacctac

SEQ ID NO: 11760 - DNA, 1041 bp, Oryza sativa
  ref <308>: DATABASE ACCESSION NUMBER: AK109108
  ref <309>: DATABASE ENTRY DATE: 2002-08-28
ctctccatctccattgccgtcctagctagctagctaagctagtacactagctaggccatggcatggtggtgatcaagaaagcgagagaggtggagcggcaatggcgggcgggtgcaaggcggcgatcgggtgcgtggacgcgcgtgtgccggtgagggcgagctacgtgagcctgtacaagtggccggagtcggacgcggagttcgtcaggtcggtggccatggcgcggcgccacggcggcgaggcggcggcggcggcgccgccgccggagagccccgccgtgccgcaccactactactacaacggcagcggcagcgcgcggcgcggcggcggcgaggggtggtactactgcagcccgagggtggtggacagctactcgtgccggcagatctacctccgcagctacaccttctccaagaagaaggagacggtgccggagcgcacaatggcgtgcctcggccgcgtcagggaccgcggcgccgccgtcttccccttgttcatcccgcaccgcgccggcagcggcggcggcggcggctccgacgccggctctgtcaacagcgcgagcagcatcaccagggagacggcctccaccgccggtgacaggaagaggatcaggcggcggcggagcagcaaggggtgcgccgtggcgcggaggctgcaggaggcgtcgtgcggcgccgtgcgcgcgctcttccaccgcctcctcgcctgcaccaccagcgtcgaggtcgccgacgccggcgagccgacgtcatcacgctgaacactaggcgcgcgcatgcgagctagctgctctagctaagcttgtgtgtttcaccgtgttttttcgtgtgctatacagtaaattaaattaaaattcctcctctcgagttaagttaagtacagtagctagcaagcagtaattttatttatttccacgagtagtaattaaactagcaatatgtatgcttggacaagtatcgatcggctgcctacttgtattgtgaatttgtgatgtaagtcatttgtgtttatgttactctatttattaccacttgtcat

SEQ ID NO: 11761 - DNA, 1214 bp, Oryza sativa
  ref <308>: DATABASE ACCESSION NUMBER: AK109109
  ref <309>: DATABASE ENTRY DATE: 2002-08-28
acaattaatttgcactttagctttatgcaagcagttgctagctgcctagctagggtgattaactagaacaaaaagggtttaagcaccgaaccaccaaaaagctaatcaccgtacttaacgtacaacgagcaggtatacggcgctggtggagcgcgacgtggtgaaggccaccaacgacatcggccgcgtcctggccgacctcgacctggccgccgtcgccgaggaagaggtggcggcggcggcgttgagcccgcctccggtgacgacgccgccgccgccgcgcccttcgtacggcctcttctcgcgccgcttcgtccggcagcatgggagagacctgttcgcgtgcgcggcggcgtggttcctcctcgacatcccctactacagcagcacgctgttccagtcgcagatctaccggccatggttcccgccggcggcgaaggtgaacgcgttccaggaggcgttcaacgtggccaagttccaggccgtcatcgccgtcgcctccaccatcccgggctacttcgccgccatgctcctcatcgagcgcgccggccggcggcgtctccagatggccgggttcctcctcatggccgtcttcctcttcgcgctcgcgggtccctacgatggatactggcgcgaccacgccaagaccgccggctacatcgtgctctactcgctcaccttcttctccgccaacctcgggcccaacaccaccaccttcatcctgccggcggagctcttcccggcgcgcttccggtcgacctgctacggcctgtccggagcggcggggaagctcggcgcgctcgtcggctccatcggcttcctgtgggcgtcgcagcagaaggacggcgcggcggccgggcacctgccgggcatcggcatgatgtacgcgctgttcgttcttggcgggatctgcctgctcgggctggcgctcacctacgcgttcacgccggagacgatgacgcggtcgctggaggagaacgagagcagcgtgcaggcgcagagccaggtcggcgacggcggcagcgatgccggcaatggcagtgatgggctgcgcttccacgaactaaatgttctcatggaggcggcgaccaagagccctgtgtccatggcgagctcgcacctcagcatgtcgcctatccttccgcaccggatgtctctatgacaatgtaaattgaaccaaagtaactaaatgtttaaaaaagtgatcattttat

SEQ ID NO: 11762 - DNA, 905 bp, Oryza sativa
  ref <308>: DATABASE ACCESSION NUMBER: AK109110
  ref <309>: DATABASE ENTRY DATE: 2002-08-28
gacacttccattccatcacacaagccatttcctagtcaagaagaggcagagaagagtgaagagcagtgagcagtagctttgcaacaagagctaaaaaccagcagaagagtgacacaagagaagtggaagatggcgtctttacctcagcccatgggttactacccaacctccaactccatcatgcacgcgcagccggccaccacgtccaggggctcgttcggcccggtgttcaccgtgctcgccgtgatcaccttcctcgccgtcgccgcctgcgtcgtcggccggctctgcggccggcggctctccaagaagagggcggcctccgccgaggaccagttctacggcatcaatgccgtcggcggcgacctggagaaggggttcgagatcaagtacccggtgatgaagccgatggcgagctcccgcgccatgatccacgacatcgacgacggcttcgagatcaagttcaccccagggaaacctgcagcatggaagaacgacagcaagggagacggcaaagggcatcagcagcaacatcaacaacaccaacaccaacaccatccacagcagcatggcatgccccaacaccatccgcagcacggcatgcccatgcccccaggtttcaggtaccctgcaaatgtggtcaggcaagggcagataagaggtggaacattcatttctgcgaagcccagtacgtgattcatcatcaaggtagcttaggttcataacaaacttggatgtatctcatataggatacaacctcttgtcgcaatagtgttcttcatcttcactctagttttggggtggactgggcaaagatttgtactagttccaagcactactaccatattgtattttgtacattaaacccattgagcagtgaagaatatctcattctcaagtatgac

SEQ ID NO: 11763 - DNA, 2498 bp, Oryza sativa
  ref <308>: DATABASE ACCESSION NUMBER: AK109111
  ref <309>: DATABASE ENTRY DATE: 2002-08-28
atcgaattgctcactcccactcccacaccacactgacacttttgtccaacattctgctctcacatataccccgacagtagagcccagcagtcgacccaaccccacctaatttctctcacacacacaaccgccatcatgtcttccgagactttcgagttccaggctgagatttctcagctgctcggcctcatcatcaacaccgtctactcaaacaaggagatcttcctgcgagaactcatctccaacgcctccgatgccctcgacaagatccgatatgaggctctctcagaccccagcaagctcgactcgggcaaggacctccgcatcgacatcatccccaacaaggaggccaagaccctgaccatccaagactccggtattggtatgaccaaggccgacctcatcaacaacctgggtaccattgcccgctctggcaccaagcagttcatggaggccctgtcagccggtgctgacatctccatgattggccagttcggtgttggtttctactccgcatacctcgtcgctgaccgcgtcaccgtcgtctccaagaacaacgatgacgagcagtacgtctgggagtcgagcgccggcggcaccttcaagattgccgaggacaccgagggcgagcagatcggccgcggcaccaagatcatcctccacttgaaggatgagcagatggactacctcaacgaggccaagatcaaggaggttgtcaagaagcactccgagttcatctcgtaccccatctaccttcacgtcctcaaggagaccgagaaggaggtcgaggacgaggatgccaccgaggagaccaccgagggcgacgagaagaagcccaaggtcgaggaggttgacgacgaggaggaagagaagaaggagaagaagaccaaaaaggtcaaggagtccaagatcgaggaggaggagctgaacaagaccaagcccatctggactcgcaacccccaggacatcaccactgaggagtacgcctccttctacaagtcgctctccaacgactgggaggaccaccttgccgtcaagcacttctccgtcgaaggtcagctcgagttccgcgccatcctcttcgtgcccaagcgtgcacccttcgacctgttcgagaccaagaagaccaagaacaacatcaagctctatgttcgccgtgtcttcatcactgacgatgccaccgacctcattcccgagtggctcagcttcgtcaagggtgttgtcgactctgaggaccttcccctcaacctctctcgtgagactctccagcagaacaagatcatgaaggtcatccgcaagaacattgtcaagaagaccctcgagctcttcaacgagatcgccgaggaccgcgagcagttcgacaagttctactctgccttcggcaagaacatcaagctcggtatccacgaggactcccagaaccgccagtctctcgccaagctgctgcgattcaactccaccaagtctggtgatgagcagacctccctcaccgactacgtcacccgcatgcccgagcaccagaagcagatgtactacatcactggtgagtcgctcaaggctgtccagaagtcgcccttcctcgacaccctcaaggccaagggctttgaggttctcttcctcgttgatcccattgacgagtacgccatgacccagctcaaggagttcgatggcaagaagcttgtcgacatcaccaaggacttcgagcttgaggagtctgacgaggagaagaaggagcgcgaggctgaagagaaggagttcgagggtctggccaagagcctcaagaatgtcctcggcgacaaggtcgagaaggtcgttgtgtcccacatgctcagtggctcaccttgcgccatccgtaccggccagttcggttggtccgccaacatggagcgtatcatgaaggcccaggctctccgtgacacctccatgagctcgtacatgtcttcgaagaagactttcgagatctcgcccaagtctcccatcatcaaggagctcaagcgcaaggtcgaggctgatggtgaggatgaccgcaccgtcaagtccatcaccctccttctcttcgagacctcgctccttgtctctggcttcaccatcgacgagcccgtccagtacgctgagcgcatccacaagctcgtctccctcggcctgaacgtcgatgaggaggtcgagaccgagcaggaggccaaggccgactcgaccgccgaggcacccgccgcggctggcgagagcgctatggaggaggttgactaagcgcatcgccttacggttcgctttcgaaaagtttggttggcgctttgatatccccttcatgtgtcatggctttcctattccttgctgcttctcttgcatgacgaagcttcatctacgccggcgtcttaagagtggtggattttacgcttcacgagtaaatgcataatccgacatgtcctctaggtagattttacctttgggttgctctgagttacgcctcagtagctgtttcatgaatgatgaaaatgttc

SEQ ID NO: 11764 - DNA, 1419 bp, Oryza sativa
  ref <308>: DATABASE ACCESSION NUMBER: AK109112
  ref <309>: DATABASE ENTRY DATE: 2002-08-28
taataatagcctcaataatatgggtcctattggcgttggatcttcgcaaggatctaatggcctcacaatgccgcatatggacacagactcactatcatcattccaacacggctattacacgctcttcaaaggcgacatccgaatccactcggcgaaagatgaatgggtcttcaacgacatggagatcctaaaacgcatcgccttaccagcagtccgcatgggcttgcggttgcaccaagaccacttccagagcgagagcaacgacgaggcgagcctgtacgagaacgtgacgcggttcgaccgcgagtcggtgctgtgctacgagcgcgacccgctctggcgccgcgccgtcctcaacaacgtctcatccctcctctcgctccgacatcaattcaccgagtattcagaccagtataaagtcgtcatgttgagcaagaacttcctctcgtttcgcctcatcaagatcaacaaagagtgtgtgaggagtttctgggccggccaacaacatgagctcatattcttaagaaacaaaaaccaagagcgtggcagtattcaaaacgcaaaacaagtactccgaaatatcatcaactcgtcgtgtgatcaacctatcggatatccgatttatgtctcgcctcttattacctcttattcgtcgactcatgatcagattgccagggttttgggccctgagttgagtttcggaaagatttggacttttttgactaattgttttcaacgaattcgagaaaattgcacaaatgattgctcaggaagtgctcaaaatgaaaatctctacggccctgtggcctattcagccagatctgatgcctgcaatttcactagtgttaattccttaggaatgggtgctaatacaacaccgaacaacaatgcaaaccgtcaacaacaaagttcgatgaacagctcgtcgttgttggcaacaaacgactcgaagcaactctctcaaacagtgacgttcaacgtggcgagcagttcatccgaaataaaaaagaaacaatatcaagctcaagctcaaccacaacaaccaagaaaacccgacttttccaaacaacactcacacgattcatcgaattcaagattcttcgtctaatatatttaattcatagttatctatccaatactcatatatatatatatacatttgtataatttctgattcagatttttacaagtattataatactatattttaaataaacaattttttttctccttttgttttgctgttgcttctctattatatctatctcttgtattttattttcccttctttatttttatttaaaatcatttttattttataaattgtattataatgttatttatattatcttattgattatcttagtgtttactccgacaaacaaacaaaataaataatttttaaaaataaaactcttt

SEQ ID NO: 11765 - DNA, 1191 bp, Oryza sativa
  ref <308>: DATABASE ACCESSION NUMBER: AK109113
  ref <309>: DATABASE ENTRY DATE: 2002-08-28
acacatcaacagagcctcgagctccctttctctctctccatccatggccgatcgtcgacgccgtcggtcgatctccccatccgtagctccacctcccctatcctcgcgccaccggcttcgcctccatccggcgagtccgtttttcccctttcccctctccctccacctctaagtcaagccaccaccgccatcatccatgccggctcgaggtgagcccttgccgccgccgttccggctatatatctctccctctcggccagccaccgacctccccgggtgcgcgtcgctcgggaacacgcgtggccgctgtcgtcgaggccgttcatccaccggagcatcggcgcccctcctctcccttctctctgtttgctcggctggaagagaagaagaagcagaagaaggtaggaggaagaagaaagagaaaagaagaagaagagacaaagaactgacaggtgggcccctgtacagtactatttcataatttccctatttaattcgaattctattctttagaagtccatatctcctaaaccgtagatccgattccagtgaaacttggacctaaattcatctaaattcaaaatctacattttgatatcaaattttctattttaagattttatttgaatttattcaaataccgtttgaatttatatttgacttttcaaatattttcctttatcccaattaccctttagccactaaaaagctgtcggttggaactttacgccttccatggagacattcgcggttttctatccccgacgttgaaccgttggttgtaaagcccggcataaaccaaacccaaggtcaaagtgctgctcctggcaccccacgccttgatgcgtatagcggtcggagcttcactattccatcgacctccatagcacgccgcacagttagctctcggactctgtgtgatcctagccgctccgctgccacccacggttgtcgaagtaacacttccgccctactaaacctgcacctacctcctattccctctagccgatatgatgtctgctgacaccggctagagaagacactaaatctagtcgttatgttgccaactctagcaacaactagcaaacaaccaaatcctagccgataccctgctagtcaaatcccaattgtcatccaaatttcataccctctacaataccacttatccaccatactctcagcctcatagag

SEQ ID NO: 11766 - DNA, 1492 bp, Oryza sativa
  ref <308>: DATABASE ACCESSION NUMBER: AK109114
  ref <309>: DATABASE ENTRY DATE: 2002-08-28
aacctgtgtcagttcaggtggtagtagcaaacacacacacagctagctagagggttgatctcctaaattgctcttggattaatactggtgtgtagagcaggagaggagatcatcctctgatcaaactctaattaagctagcatctcatatcctccaagatggttcaggcattggtctttgctgtggggatcgtaggcaacatattgtcgttcttggtcatccttgcaccagtgccgacgttttatcgggtgtacaagaagaagtcgacggagtcgttccagtcggtgccgtacgcggtggcgctgctgagcgcaatgctgtggctctactacgccctcctcacctccgacctcctcctcctctccatcaactccatcggctgcctcgtcgagtccctctacctcaccgtctacctcctctacgcccccaggcaggccatggccttcaccctcaagctcgtctgcgccatgaacctcgccctcttcgccgccgtcgtcgccgccctccagctcctcgtcaaggccaccgaccgccgcgtcacgctcgccggcggcatcggcgcctccttcgccctcgccgtcttcgtcgccccgctcaccatcatcaggcaagtgatcaggaccaagagcgtggagttcatgcccttctggctctccttcttcctcaccctcagcgccgtcgtctggttcttctacggcctcctcatgaaagacttcttcgttgccacgccgaacgtgctgggattgctgtttgggctggcccagatggtgctgtacgtggtgtacaagaaccccaagaagaactccgccgtgtcggaggcggccgccgcccagcaggttgaggtcaaggaccagcagcagctgcagatgcagctccaggcgtcgccggcggtggcgccgctcgacgtcgacgccgacgccgacgccgacttggaggcggcggcgccggccaccccgcagcggccagctgacgatgacgccatcgaccacaggagcgtcgtcgtcgacatcccgccgccgccgcagccgccgccggcgctgccggccgtggaggtggcctgatcgatcagtgagagggtgacgtattgagctgcttgtactgcacgcgtgatgaccacgactgaccagagtgacctaattactgtgtgttagctgcagctcattctagctgaatcgcatgcatcttagctaattaattattatatatatctgcatgcttaattaattaagtcgcgatatatatgtgactgtatgtatctgttgccgcgttctttattctgagttgtaggatgattagaattttgctagtgggctaagtacatgtatgcacatgatcatctatcagctgctggtcgatgcgtgtatcgccgtacgtgtatgattggggacacgtgtactgcatctgcatgctagtacgtggcatctcagtttatggtactagctagacactgtactgctctccaatcaataaaagcccatgtatcaattgtttc

SEQ ID NO: 11767 - DNA, 1069 bp, Oryza sativa
  ref <308>: DATABASE ACCESSION NUMBER: AK109115
  ref <309>: DATABASE ENTRY DATE: 2002-08-28
agattagactgccagtttgcgtgcctaactagcatcacacgccaccggcccacaggtgtggtgtcgaagaagactgccccagtcttgcctgtccgagtgttggttgtccgccgggtgattgctacacggtttgatatctgcaaattgtcacaatgctggcaacacgcatcaatcgcgcacccttccaggcagccggcagcagcaggacgcacattcgcggtgccagtgtcattgtagcagccagtccaacaaaagcagcagattttcgtggtctagacaacgccgaaatcttgcagaaagtggcagagctgaagcgggagaacttgaggctggaatacatgcagaggaccaggggcaacatcatcaacccaggcgcggaggccaacccagaggcagcgaccccaaagcctcatgaattcaaggatgctcgtcgccgaattgcgcagctgctgccggtgctgcgggagcgtgagattgaggcaggcatcacccgcaaggacagcaggaggctgcgcaagcaggccaaggtggcagcaggctttggcgggttctaagcagcagcagcagaagcagaagcagcagaaggaggaggaggaggagcagtgccagtagcagaagcagaggccgtggtggtactggggttcgggtgttcctcttttaccatcatgtttggtacatgtgctggtgtaggctgcagctacacaagcttgcaccgcataccatgtggcagcgtcgcaaagcggcaagtatggaagtgttagcatacaccaggtccagcggcagcaatggcaagggcggcgtgggtggtgttgcactgcagccagagttcctgactgagcacaaagggaatgtttgttgcagcagcagtggacaagtgctgctcccttaccaggcctggggttccctacactgaccagaatgataaggattgcagggatttgagtcggggcgtcaagctgcctgatgcagcacagcattctggccttgcaacagaccgggcttggctgagaatggctggggtgtttgaccaggggcagtgacagcataggggttgtaactaagcacaagg

SEQ ID NO: 11768 - DNA, 1183 bp, Oryza sativa
  ref <308>: DATABASE ACCESSION NUMBER: AK109116
  ref <309>: DATABASE ENTRY DATE: 2002-08-28
accaaaaaaacgtagcgcgcggcacacggatcaacgtgaacgtgaacgagaccgagacctcgccgccggcgaccaaaaatttgtactaactgtgatggccacggtggaggtgttgacgtcggaggtggtcgccccggcggaggagacgccggcgggcgccgtgtggctgtccaacctcgacctcgccgcgcggcgcgggtacacgccgacggtgtacttctaccggcggaacggcgacgacgaggcggcgttcttcgcggcggacgccgtgagggacggcctcgccagggctctggtgccgttctacccgctcgccggccggctcgggctcgccggcggcggcgaagacgggcgcgtccagatcgactgcaccggcgagggcgcggtgttcgtcacggcgaggtccgggcactacgcgctggacgacctgatgaacgagttcgtgccgtgcgacgagatgcgcgacctgttcgtgcccccgacgccgccgccgaacccgccgtgcgcgctgctgctggtgcaggtcacgcacctgcggtgcggcggcgtcgtgctcggcatggcgctgcaccactcggtggtggacgcgaggagcgcggcgcacttcgcggagacgtgggcgagcatcgtgcgcggcgcgcccgccggggacgcgcccgtgccgccgtgcttcgaccacaagctgctcgccgcgcggccggcccgcgcggtgctgtacgaccacccggagtacaagcccgagccggcgccggcgccggcgcacgccgccacggcgtccacgtacgcgagcgccatcatcacgctgacgaagcagcaggtgggcgcgctgaaggcggcgtgcgcgggggcgtccacgttccgcgcggtggtggcgctggtgtggcagtgcgcgtgccgcgcgcgttcgctgccgccggacaaggcaaacctattccttctctataagtacatctccgaagattgggtcgacatacaacttaatattcaacaaagggataattgcatctatgcccctactttgaaagccaattgctgttttacccccactttttagggtttgcagttttacccctattttttgaatctgaaccagccgtctaccctcacttgtgacagccgtttggtaggtcccacgttttatgttaaagaaatacaaaagaagataaagaaaaggttttagggt

SEQ ID NO: 11769 - DNA, 1880 bp, Oryza sativa
  ref <308>: DATABASE ACCESSION NUMBER: AK109117
  ref <309>: DATABASE ENTRY DATE: 2002-08-28
actaaataatattttaaataatatacgaactaacccgatataaaagagaaaacatattagaaaaaccgaaaaacaaaatgagttcggcaaacggtaacggaacaccaaagtcgccactagtgagaaacggctctcaagcgaccgaaaatggtagcagtggaaagaagatcaaagcagtcgtgttgacgtcgacaggcagcggaagcgactactcgaacctgaagctcaaagacgaggactacccgactgttgagggcgtcgctggtaaggaggagttcatctcggtgcgcgtcaaagccgccggattgaatttcgccgagctcatgcagcgtcaaggtctctaccgaccctccaataagtgcccatacaccccaggttttgaggctgctggtattgtcgagcaagttggatcggccgtcactgatttcaaagtcgatgatagagtgatagtgttcaatggtagcggaatgtggaaagatgtggtcactgtgacccaaaagaacgccattaaaatgcccgacaatatgtcgtttgaggatggcgcttcgttcattgtcaactatttgaccgcgtatcaagtgttgttccgaatgggcaacttgaagccaaatgaggtcgttctcattcatatggcggccggcggcgttggcactgctgccgtccaactctgcaagaccgttcccggtgtggtcgtcattggcacggcgtcgtccgccaaacacgacgccattcgagagaacggagttactcatgcgatcgattacagcacgtctgattacgttcaagaggttcgaaagatctatccagatggagtcgatctcgttttggacccgctaaacggagagaattcgattaaaggattcggtttgctcaaaccattcggacgtattgttcatttcggagcggcaagcatctcgagcgagagtcgttcattggtgaacgccttcaaggcctggtggaaatgtctgacagtgaacgcgctcgacatcatgtcagagaacaagtcggtgagtggctaccacatgggctacttggtgccgaaccaggtgtgtcgcgatatcttgaacacggacattaagatcctgctcgacttgtacgagaagggtgtcatcaagatcaaggtcgactcggtctactcgtacaccaagatcggcgaggccatgaagcgcatgcacggtcgtcagaacattggcaagattttgctcaagccagactatgagatcgctcctccagctgctgtcgaacaggttcagatagtgacaactgtggtgtcaacaccaacagcgaacggatcggcgaccaagaacggcgatttgccgaacattaagccgttgaacgtgaacggcgagtcgacgccagctgccgaagaggtcaagaccgaagagaagaaagaggagaagctaacgaatggagatcaccacgaggaggagaagaaagccgaagatgtgagtgaggagaagacaaacacaaacggcgagactgagccggtcaccaatgagattaacggaaagcacaacgtggaagttgctgcccaagaagctgagccaacttcagcataaacttatttattcacctttccctataagaactatatcatttatcacttttttttttggatttggagatcttttagactttaaattgattataaataatatataattgtatctctctattttttgtttatttttattgagtagtgtttgttttaagtgttttctttttgtctctttatatttttctaatctgcgcataacattttattccatatattaagtaatctattattatttatttatagtatttattatatatttaatcgattttgtttaaaacattaaacttctgcagtatgatttttaaaaataaattttattttt

SEQ ID NO: 11770 - DNA, 2382 bp, Oryza sativa
  ref <308>: DATABASE ACCESSION NUMBER: AK109118
  ref <309>: DATABASE ENTRY DATE: 2002-08-28
gaatgctatgctctgtgacgtttaggcatcaagctgttcatcttagccgcaacatatcctcgcgcctcgcatctcaagtccggctggtgatatttgcctgctgtctttgctcagccttttttagattcatcacagtgcgatgaaccagggcggaggcggcatgggtggcatgggaggaggcatggggggcggaatgagcatgggcatgaatcccatgatgatgggatgaatcctatgatgatgggcatgggagctgatggcatgggcatgccaggaatgggtatgggtatgatgcccggaatgggcatgggaatgggcggtatggggccccagggaggcatgggcatgggaccacccagcggtgggccgggcatgggcggcgacatgggcgatggcaagttttacaagaccaagatttgccacaagttcatggagggcaagtgcaactatgggcccacctgcaagtacgcacacggcgatggagacttgcggccgtccggaccccctggacccagccagcctcggccacagggctcaggcaagattatgaccccccatgggccggcaatgggcggcccagggggcatggctgcgcctggtggcatgggcggcggtggcatgggcggcggtgccatgggcggcggcggcggtgccatgggcggcggcggtggtggcatgaacatgggtatgcctggcaagccacctatgggcccagggggtggcggcgacaagggtgcacacttccgcacacgcttgtgtgagcagttcatgaaggaggggcagtgcagatacggctccacgtgcgcgtttgcgcacggtcaacacgagctgcgtccatttggcactgcaggcggtgcaggaggcatgcagaaagccggtcctaggcccaatgccaatgcaggggcccaggcaggtgcgcagaaacggccgctggacggccaggggggaggtgatgcgcagaagcgtgcccgcactgagcctgttgcaccacctgagcaggaggctctgccagtggagggccagagcatggacctgaattcacttaagcagcggttccaggcactgcagcaagaggccaaccgctttgcccgtgacactggccacagcgtggcaatcttcaccgtgggcggcctgatttcaaacatggacgatgcggcagacttccaccaggacaactactgcgtagatgtgaagggcaaggacaaccagctggtggcacccggactcaaagtggcagtgctcaagtacggcacaggcggcgtagcaaagcagctgaccacacggggcgagatcatcaagtttgtgagcgcgcgcggcagcaaggccctcggcgagctgtacgcgcagtccaaggagagtgagaacgccagcgcgtgaggactgctgttgtgcagctgcggcggttgcaaggctgcaaggcacggcgtcaccagcagcagcagcggctactgctggagtgccaggtcgccggggcagcttattagctgggtgggtatgttgctgctgtctcagcagcatgcccgggcctagctggagaccacaagatgaccatgttttactgaccggagtgcagtggctgtgggcgcgagatgactgctttttattggctgcagtgcagcggctttggatgaaaatgaactgccggcatcgccccaaatcaattcctacttttcaagacttgctgctggtgttgtggtgctgaagttgcagctctgtgctgttgcgagcagcagtgccgagctgggtagcagctgtggccagttgtgagttacatggccgccttttcgcaatgttaacagagagcgctgctggttgcagctggctgaagactgtgtgtttaggcaggaagcagtgctgtcgtagactgaagttgggcgtaggcttagtcctatgtaatgctgtgggccacggcagtggtgccaaccgattgtacaactggtttgtaatatctgtaatgctgttgttatggtatggatgttgtaatttggaatcatgggcgggttgtgcatgcggtgcatgcggtactgttggattgtcaggtttgcattgttaaacgcagctggcatgctactcctgcaagcgcttggggattgcatatcgagctctcgtgggtttgtacatggcacaccctcaccacatttgcagtcggcaatggtattacaacagcgtgttcatcagtttctccacaggtacacacaggtgtttttccccctgcttgaacagggcagtcacacagctgtctttcacggcagtgtcgcaattccctgctttgtagttgggggctgagttcagcacagcagcgtaaccattctctctgctgttggcaggtcctgcacaccacagtacagcagtccagaaaacatcggtaaaaactgttgggtt

SEQ ID NO: 11771 - DNA, 3354 bp, Oryza sativa
  ref <308>: DATABASE ACCESSION NUMBER: AK109119
  ref <309>: DATABASE ENTRY DATE: 2002-08-28
aagcgaaaaaccgagtttgtatactcgataaattaagccgcggtggcgaccaaacgcgcatccaaacgatcagcgccggcggagggcgacgatgcggcggccctaatcgccggcgctgccgcagcagccggtgcgcgtgcgcctgtgccggcgcgggagcacggcgagtccgacggcgaacacgacggtgacggcgcgaagaacggcagcggcaaaggcggactgaaagcgaaacgcgcgaaaaagagcggcgccgggagtgacgcacaaccgcgcgtgcggatggcgtgcattccgtgcgctaaaggcaaagcgcgttgtgacggacatttcccgtgcgaacgctgcgttcggctcaaccgcgtgaaggactgcattccgcgcataccgcagtcggccgtcgccgcggctgcagccgcacagcagcacacggcgcagcagaacggctccggtgcggcggcaaacagcaacgcagcgctgctgtttgcactcgcaaacccgttggcggcgggcttcatgtacgcaccgcgcggctccgcgccggccgcactgccgcccgctgcactgcctgcggtgggcacgacgcttccggcggattcgcaggcgcagctgctggccacgctcctggccatcgctcacgggcgcgcgcagatgccgcttgcgattgtgccgactgctgcgatgacggcggcggcggcagcaccagcggcgtcagcaccagcttcagtctcctccgccgctgcgactgcgccattcgcgaggcgggccgctgccgctgcggccgcacccgcaacggacggcgtagcgcccggttcgggcgaagcagcgctcccggcggacgtgtttgcatctgctgccgctgcagcaccggcggagccgttcacgccatcggcgttgctcgcgcccaccacaccgggagcaggcgccagcgacctgttgacgctaccgccgagcccggggctgtcgctggatcagatcctcaacgccaataccgtcgatccggagggcactttcttctcagagcctgccgctgggccggtgcatacgacacagaacgccgctcacaccatcgcgcactcttacaacgccacactcgagctaatgcgcaaagccgcggcggcaaatggcgatgccgcggtcgacgccttcgcatcgcccgaatgcgcgaatgccgctgccggttcagcagctcctgcaccggtgcctgcggctgcgctggcggcgtccactgcggcggcggcacaagcggccactaacggcgctgccaaacccgcggctgctgtcgctgccgccgccgttccgaccgctgcggcggtgtctgcggcgcgcggtccgacgccaatccgtccgccgccgccggagggcgcggatgagaacgagatggtggtgacgcggaaggggcaaaaagtgcggcggtacatccccgacgccgtggcactgtctgcgtgttcgcaggcgactttggtgtgtggtcacatgcgcactctgacgcgttggctgacgccgccgctgtgcgcgagtctgatggtgacaatggacgcgtggatgcgcggtctgctcacagcgacgggctatggcgcgtacaacaaactgcggacgatggtggcgcccgaagagatctttgccatactccaaaagcacgcgcccaaattcctgtgggaatgggtaccggccgatgacgaccccaacgaacccaacgcaccgcacgcggcccatgcggcatccgacccactcagccctggcactaccgaccggagttggctgtcactcccgatggccatcatacgacacgaattccgcgatccgcaccggttcctgcacgccgccgcgatgcacgcggatatgcacggccttccggtgccaaaggtaagtgtcgccgtcaatcgcgctgcacaggagctgttgggttacgatacggacgcgtacatcgcggtgtatgggtacagcccggtgttcttcaaactcctgcacccggccgtatggcagatcgaagacgagttcgaactccgcactgtggcgctgttccgcgcgtgggcccaggaacacgcgcaaaacacggcaaaagctgcagctgccaaagccgcgcactcacccgcaggcgcgtccggcagcagcacgcacacgcccaactccacggccactgatgacagcactgcgacgccgcacagcaacggcagcggcagcggcgcgagcggcagtacggcggtgagtgacgacgcggccgctctgattccgactccggagagtttggccgttccatgttctccgcagttgcaaccggaaatgttcgctgctgtcagcgcgctgaagcgcaatatgctcgccgcaccgacgcgtttcggcaattatctgttttgcccgaactgctcgttgggtgccgcgatgttgggcgacgcgtttcagagcgccgtcaaacccgcggcactggcactggcgtccggcgacgcggatgaggacggtaactgctatgagcccgccactgcgcgcgccggttcgtacgcctctctgaagcacaacgggcctgaccgcccgcacaacgcgccgctctacgcgaagcggagcgaacgcgtggccgctgcggtggccactgtcgccgctgtggcctgtgagtgcgccgacaaaccgacgaacgggcaaaaggagcagaaggagtcagcgaaagctgcgtcggcggcggcggcggcggcggcggcggcggcggcggacagcaaaggcgagtgcgtacaaccaccaccggagcagactgtgctgagcggcacgtcacatccggcggactcgttctgtgatacgaagggcaaacgcgtgtacaccacaatggcgcggcagcgcgtggccgtgcgtttcacacgcgccgaaacgctgcccgccgccgcggccacctccggtgcgaccggtgcgaccggtgcgaccggtgcggctgattcgcagcagagcggttgggtgtcggagaagacgcagctcctgcacgtgatgcaccgcgacggtcacacgcacgtgccggtgctgctgacgacgcgcttcactctgacgatcagccccgtcgaccacatgcactgcacgcgcgtggaaatggtttatgttccgattttggacggactcatgtaacgccgcactccgctccacagcctccgccgcagctgcgccgaacaacagcacgcgttcacatctcatttgaggctttccgctgcgcttttcactgcttccgttatccgcactgcgtgtttgcacgtctgcccgctccgcacatacgcgtttcgggtcacttcagtcctccgagcactttgcgcccgcctttccgccgtcctgtcttcgccgtcacttccccaatccgcatgtgaacaccgtctgcgcaac

SEQ ID NO: 11772 - DNA, 3200 bp, Oryza sativa
  ref <308>: DATABASE ACCESSION NUMBER: AK109120
  ref <309>: DATABASE ENTRY DATE: 2002-08-28
ggcactgtgagtgcggcgtcctgcctgcatctgtgttgaacatatcctctcttggcaattgccgcctccatccttctgcagttgaccgagaccttgctctgtgccaatcattcacgcccaacacgtttcctcgcacaggcctatccgtgtactttgccgccctggacagatttggaactgccaccatgtccgactcggaaggctcttcgtccgactttgaactcgtttcccacgactcgctggcctcccgtggctcggattcacgcacaaaggcctgcaccaccacgtcgcgccgatccctcctcatgccgctgactcattcccagcatgcccagtcgccccccgtgaccgattccgaatacgatgctctttcggaatcctctgtggaccaggtcgatcacgaccacggacatggtcaggatgctgaccacatggaacgcatgtttgtgtcgaggcaatcacggggcgcccaacggtaaggccatgtccccgcattgttttcgcgtcatttgtcgtcgagctcggcatccgagtcatccgagtcgttggacttgcacgccaatcacagcagcctgtcgcactccaccgtgtcgacctcgtcaaacgagacggacgaccaggtgcaggccggtgtcggtgtgcatcttgacaaacaagctcacgactatccaatgcctctggtgctgccgttctccgccactgcggctgccaacctcatggaccacgacgatccatttccgagcacgttcccaatgtccgtcgctcatttaccaacattcacactcacgcaaatcaacagcggcggctaccatgctgatgagacagctcaacatcatcaagaacagtacaccttaccaggtgccgacacggatcccgatacggaagaccatgaccggctcgtggacccgctccaggcaaggacgggccaccacgcattcaaccaagaccttgtaacggacccgagactcgcgcagcacggagtcgcatcgacgtccgactcacgtggcggtgagggccttgaagacctcccgcgaatcgcttcggggcatgctcaagacaatgaaatggatgggcaactcgactcggtgattgacgtgaccccgcatcgttcgcacctgggtactctggccaatgtgagcgcggcagagttgccggacatgcttcccggacactgtgtctcagtcatgccggcgcccgctgtggccgcaggtgagacacatttgcgcttgacaggcaccaacacggcagactccaacggtctcgcacagctttcaacggaactcgacgacaattcgaccagcaccgcgccatctggcgcaggtggacccaacaccaccacgcaccgctcgactgcgcacaaatccgtcaccccgcctggctcccccacctcgtcgacccagtgtgaccgctcgccgccctcatcgcccgccaccgccacggaccctgcgttagcctcgaacgcgtccctgctcctcttttctggcggctcgccttgcccttgcccctcgtgcgacctgcggccaggaggaccgggctggtcgctgttccacacgccaggcccacgcaagtactcagcggccagcatgcgcaagtatgcagacgcgcacgcaacccatcagatgcacgtgcgtgtccgccacgcattcctcatgtcgacgcgcatgacgcacgccatcaccttggtcgccgggcttgttcttggttggctcgtgaccacgtgttgggtgcaggcagggatgctggatgcgtaccggcgcgaggtgcgcgggttgcacgcgcagctggcgttgggcgtcgcgcaagtgcagggcaccaaggtggctgtgaatcaggtgcatgcgagggttgctgcgcaaggaacgtggatcaagaccgaggtacatgagattcgggtccaggtcaaacagttggcgcacgtgttacaggcgtatcaaagggccgtgaagtatggcggaggcagaggcaggggcgttgcggacaggtttggcgagatcatgaagcgcgcggacgagtttttggggcgggtcggtgcgatgcatgaacactcagacaccgtcagaaaggagaaggtgaaggaggataaggcaaacgctgaggatcagcaggacgaggccatgatcgtcgaggatgtgcaagtgagagagcaggacgcaattcccatgggcgaagaggggcccaagccaccagttgacgcagatacccattttcatgcacccccgcacattgctgacttcaccgggaccgaccgccctcaatccgagactacgcacgattccaccgataccccgcctgcgaaccaggatgaatgccatgacaaccctcaagcggttgttgaatctcccatgtccacgattacgaggtcgattgcccacgttgcacgtagaattggcaggagcacgcgtaaagccgtcctggcatctgcccgcgcgctggacaggatgagcatgtgcgtgcaagagtggcgcgccagggccaatgccaagcttcaagggtggttggaagagagtcgggcggcaaaggccaggagggcgcatgcagctccagcatcagcgtatgttaaagtggctgcggaccaatctcaggcaagtgagcaagtcaagcaggagcatcaaagcacgcagaccaaggaggctcaagatttggaggatccaagcactagtcctgttgggtcggcagccaacgacgatgcgctctccgtcaccatgttgcgggaaaagttgcgccaggcacaagagtacttgcggtcggtcgagagacaggagccggctgagggccgtgtcatggacaagtgggaacggattcagtgggcgaaccgcatgtcggcggccaaggataccgtccgcgttgcgcgtgaggacttggaacggcagttgggcaccagtggtaatcgtccttgagccaacaggtcgtcattgttccttgtgcatttgtgaatatttcccgattgccttttcgaaggttttgagggcagatgccgtcgtcggtggttggcgggctgcagcagagtagtgttcctgtgtttttgctgcttcccctgttgtacctcttgtgccacccatcttccaattgatatgtcttgtcgcgtcgattgattttgtacatactattcatcgcgaccctccattcgtcctcagttgtttgtttggcaagatgtctgtgtcccaccacatttcaaagcaagaactgttctcggttgtatc

SEQ ID NO: 11773 - DNA, 1204 bp, Oryza sativa
  ref <308>: DATABASE ACCESSION NUMBER: AK109121
  ref <309>: DATABASE ENTRY DATE: 2002-08-28
gaaccttcactaacaggcgtgtgagcacctccaacgatgagactctaccagtacgctgcactcattgccccagcgcaggctgcgctacggtttggatgttcaactttgggcatccagcgtatcgatccgctcgtcgagccaggcaaagctccatcggctcacgttcatcaatttgttggaggaaatgcacttgctcctacgatggataaggatccaagtactacagctacttgcaccacatgtactttctcagaggacttcagcaactactggactgctaccatgtacttcaagcacgacaacggctcgtacaagcaagtgcctatcatgcagaactctgcccttcccaatggtatcaacggtggaatgaccgtctactatacccagcaggacttcttcaacaacgggaaccagaagatcactgctttccccaagggatttcgcatgatcgtcggtagccccacgaccaatacggtcgaagacgcgaagaagcacccaggtctccgcttcgtctgcctctcagacaagaacactcgcttccctgagcttcccgacttccctcctaagccatgcaaaggcggcatcatgacagtccaccacttcccctcctgctgggacgaaaagaacgtcgactcgcctaaccacatggaccacatgtacaacactgccaaggaagccttcgccgttgccggcccctgtcccgcatcccatcccgtccgcatgcctcaagtggcctacgagacgctctgggacacggcccagttcgctaacatgtggcccaaggatggcagcaacccattcttcctcagctatggtgacaacaagggctacggcactcacgccgactacctctttggctggaaggacgattcactccagaaagcaatggactcgaactgcatgttcaacgcgtgtgagaatggcaagccgttgaagagccagaatgtgcaggcgatgaacgcctgcgcgaaccagatgaagaagtccgtacctgatgagaacctctctggatggctgaaggagttgcctggccaggccatgcccctgtaaggtagtgatttgtattgaccgtgtgcatcatcggtggtatgagaccgtgtgggaggactgcaggtgtagatagtctggaacaggtctgctcgtgcctatgcttagataccatagccagtcgcttcggattgaattagtattacacatgctacct

SEQ ID NO: 11774 - DNA, 1511 bp, Oryza sativa
  ref <308>: DATABASE ACCESSION NUMBER: AK109122
  ref <309>: DATABASE ENTRY DATE: 2002-08-28
cttagcagcctcaaacggcgacctcaccctcgctgcttccctctactttgacgaacaccaggaacaaggccaggacgacgaacacgatcaagacatggccgacgacgatcacgctacaaaccctccagcccagcctgcagccggtggtggacgcaccctagatggctcccatgtccccgcacccgcaggcgcttcatcctcttcacagcaagcctcgagcagcagacaggcgccacagcggggtctgaggacgttgaaggacttgcaggcttcgggcagtggaggcggccatgcccctagtgagggagaccacgactcgaccgactcacaagaagacgagaaccaagacttcttcacgggcggagaaaagtcgggactggcagtgcagaacccaaatgcggccaatccgcgcgaccatatcaacaacatcctcaagcgagcaagacagaatgctccccgtcccggtggtgacgacgagcggcctagctcacatttccgcggcactggtacgacgctcggtggcgacgacactccctctcgcaccatccccgatcccaacgccgcctcgggtgcccctcctgtgctcgagcgtgcccaccgcgcgcttcacctctggcgggatggcttctcagtcgacgacgggcctctgttccgctatgatgatcctgccaacgcgcgcactctggagctgatcaacaccggccatgcccctctgcacattctcaatgtcgagcccggccaagaggtggatgtcgaggtgcacccgcataaggacgaggactacaagcagccaaagaagaagtatgttcccttctcgggctcgggccagcgcctaggcagtcctactcctggtgcgagctcaagcagtgcctcgactgtacctgccacctcgagttcaagctcagccacgccatcggcccccactgctcctcaagtcgaggtcgatgcttctgcgcccaccatcaccctgcagatcagacttggcgatggcacccgtcttcaatcgcgcttcaacaccacccacaccgtcggcgatgtctatgactttgtgacccgagctagcccagcaagccaacagcgcgagtatgcactcatgacgacgtttccttccaaggaattgacggacaaggctcaagcacttggtgacatggccgagttcaaacgtggtggcgtcgtggtacagaagtggaagtagtggcacactagcgacatcggtgtatggtgggacaagcattggttgacagcataccccacggatggaggatcgagtcgtgtatcggcctactgtgctgtgtgcgagtttaagtttaacttttggctggtgacgtaacggcaaggaaacacccgtccgtggggaaccggatgcgcagcctaccgtgaatcgtgaatcacggccaacaacaagaatgggaacaggaacagtccagtggtagcatgcaatgcctagtccagataccatttgcctgcggcagcaagcgagaaatagaaacacaagagcacagcgaagcatt

SEQ ID NO: 11775 - DNA, 1738 bp, Oryza sativa
  ref <308>: DATABASE ACCESSION NUMBER: AK109123
  ref <309>: DATABASE ENTRY DATE: 2002-08-28
acgcctcacgaccagcgagttcgacaaccaaaagtgtgccttgtcttcacccacccgtgtggataagcacgcttaagctcttcgaatcctctctcacttttcacccccgaaaggtctgcgagtttcgagagtttccagagctccccaactttccatgaacgaagcgtcacactaacctgtccactctttacgagaacccagtcactcgctctctctctccgtcgctcgcttcaccatgttcggaaaacgctctttcgctagctcgaaggacaaggaccgttcaggcaagatcaccaagcagccaaagagatcgatgcgcgaagcttccaagcacaaggccatggccgagaagctggatgctcgcagggacagccccatgatgggcggagcatcgccccaactaaccgcggccatcgtcacggtcgtcgttggctccgaccagcgcatgtttgctgcccacgaagacgtcctctgccactctccctactttgcggaactgttgcgcagccagttcttcgagtcaactaaccgccgcatcgatctcccgacagaagagcctgagatcttcagttgcatcctagagtatctgtacaagggagactactacccctgccttgtccacgacaagcgccgccaaacctggatgctcgaaggtgcaattgcatcccccgacccaaacaaacctggcgaccgcgcacccgctgctgtcgagcctaccctcttccactctggcgtgggagacgtcattctccgcgacacagcaatctactgcgctgctgatcgttacggccttgaagagctcaagaagctctccctgcgcaagcagggcctgcagagcgggatcgaggttggaaccatcttgcgcagtgcccgctatgcctacgagaacacgccagatagcgactcgcgtctgcgcgctcattacctcgctctgattatccgcagtcgcaaaacctttaagcgtagtggaaccatgcagatggagatggagatgggaggaaagctgttttttgacctgttcgtggcaatgtgcaatcacgtcgatgatcttgtggatgcgagcccctctgctcgcggcactcccaggaccatctaaagacccgattgcacgcccgctgcttcccgtcattgaacacgcccgacaaatgccacacaacacggagtccctaatcaagttgaaccccccgaaactccgcctcacctcaaattgccgacaagcgaccctaaaacgtgaaaatactaaaaaaaaaaacacggaaccggagtagtacgggttgattcccctctctttccctgcttttccatcggcgcatgaatgttgttgcatcagtcatcctctctcctcttatgctactttagtccctttccgtggtactttggtcactcccatctcctctcctcccaataaaaaaaaggaataatcgcccatcagaccccccctttttttgtttacggtattacgacaactgcacactctactctcctctcctgcttgcgggagagagtacattgacgaaactgggtttctttcctttgttctaggggacgaagtgtcttgttgtctacatgcgtggggcctgtaatggagaagaaggttgaaggaaacatttttcctttgctcgttctttcgttctttttgtctcaaagcaaagcctggtaccgtttctgctcttgaataggtcagactgcggaggaatatcttagcggtggcaataatgagaaactttcggccgcctct

SEQ ID NO: 11776 - DNA, 978 bp, Oryza sativa
  ref <308>: DATABASE ACCESSION NUMBER: AK109124
  ref <309>: DATABASE ENTRY DATE: 2002-08-28
ctactggctcctcggcgtcctcgctcgctcctctgtactgccgccacgccgctgcatcctcgccgaagccgccttcttctccgtccgccgccggagccgaggtccccttccgccgctgccggatcctaccatccgtcgcggccggcgctcctcctcctcgctcgctcgctcgctccggattactgccgccgcgccgccgcatcctcgccggagccgaggtccccttctgccgccgccggatcctaccatctgccgcggccagcgccgagggaggccccatccgccgccgccgccaccatcatcgccgcctcattcccacttcgcgttgtgcctccctccgctgctaccgcatcggctcctgtcgctgcttccgccgctcccgtcttcgccgacgcagtcagtgcctccctctaccgccgcctgggcccccgcctccgtgccgtccgggagcaggagtttcggcggggtcgtgcggtcgccgtcgcgccgccacagatcgagactcgctgtcgccccgccgcaaatgcctctggatctcgcctccgctcccaccacagccacgtgatcttctctcccaccggccttccactagctgcctgcacctcctcggtcgggtagccgccgccgacccctgcccttcgctgcccagctgtcatcacggccggtcgtccaagccgcgcgccgccatcgccagccatccttcttacactcaaagaatgtagcgtatcttagcagatgccaatgtgaatgcagtgacatatgtaggcttcagtaattaggaggaaccaaatagcaaagaaggctcctaagctcctggtgcatattttcagttatttcattttctggatctagcttgattgattggcttgaacattccatttttccaggtgacatatatgaggttatgctcctataggttgatttcatatttttttcccctgtgaacgcaactgacctctcggtcaatagttcttcctt

SEQ ID NO: 11777 - DNA, 1089 bp, Oryza sativa
  ref <308>: DATABASE ACCESSION NUMBER: AK109125
  ref <309>: DATABASE ENTRY DATE: 2002-08-28
acagcaagaggacaggacacggcgcgggtacaatacaatacaagtagcctccacttcttgcttgcgtcttcttgtccctcccttgtcatccagaggagatcgaggaggtgttgtgttggtgtgtgtggaggatggggaggacgccgtgctgcgacagggaggcggtgaagaggggcccgtggtcgccggaggaggacgacgcgctgcgcgactacatcaaccgccacggcaccgccggcaactggatctccctccccaacaaggccgggttgaggaggtgcggcaagagctgcaggctgcggtggctcaactacctccgccccgacatccgccatggcgccttcaccgacgaggaggacgccatcatcacctccctctactccaagctcggcagcaagtggtcgaccatcgcggcgcagctggagaggaggacggacaacgacgtcaagaaccactggaacaccaagctcaagcgccgcctcgccgccgccgccgcctgcacgcccttactgccgctcccggcgccgccgcccctcgccgccacgcacacgtcgccgtcgtcgtcgctgctgctcctcccgccgctcgccgtaccgaccgtcaagaccgaggcgtacacctgcgacgacttcctgcagcagctgctgccgaccgccaccgccgccacggcgctccgggatcccttcgccgacggcgccgccacggacggcggctcgacgtccgcctccgccgcgtcgtcggggtccaactggtcggcggacaccggcgtcgtcgtcgtcggtggcggcggcggcggcgggctgttcccggaattctgcatgagctccgacgacctcgccggcgccgccacggcggaggacgaccacttcatcggcggcggctactactaccctctcgatctgagcttgtcatcatcactagtgtagtgaactcgtgcgtttcaaagatcaaacactagtgttaggatcagtacatgccacatctccgcgtgttcctgcgagattggtcgatcgatcaaacatcgcgtaattacaagaagcgtgtagtgtacttgaacatgagaaaattcatcaggtgcaaagttagatc

SEQ ID NO: 11778 - DNA, 851 bp, Oryza sativa
  ref <308>: DATABASE ACCESSION NUMBER: AK109126
  ref <309>: DATABASE ENTRY DATE: 2002-08-28
gagagagaacagaagaagcgcaagagcattggcatcaagagcaagaagaagcatcaccacaaccaccaccaccaccatcacctctccgatggccactactcgtcgccgtcgtccgacgcctcggcgagccctgactccacagtccgcaccaccaaccccgctccggcgccgccgcggcggccgccgccccctcccccgccgcctccatcatccatcttctacaacctcttcaagaaaggcggcagcaagagccgccgcatccactccgtcgcgccgccgcagccgcctccgccacctccgcccaccacgcgccgatccaggaaaccgccacagccaccgtcccgccccgctcctcctccaccgcctccgccgcagcagcagccgccgttttatcccaggcgcgctgtcgtctactacacctacccgctcccgccgccgtcgccgccgctgccaccgccgcctcctcctccgccgccgccaatgtcggagggggaagaggaggcgcctccttccgtcacggcgtcgccggcgccggcgtactgcgcgagccccgacgtgaacgcgaaggccgacaagttcatcgagcgattccgcgcggggcttacgctggagaagatcaactcgtaccgcgagaagtggcagaggcagatccaagacgactcatcgtcggccatggccgtggccgaggaggagggagagttcatggtcatcggctccctcttcgacgacgacgacgaagaggatatcatctccttgccggagacgccggcgaccgcaaccgccgtcgccgtcggcttctaactactaaggtagcgacgtgaggtgtggcactgaccctgaaaaaaaaagag

SEQ ID NO: 11779 - DNA, 935 bp, Oryza sativa
  ref <308>: DATABASE ACCESSION NUMBER: AK109127
  ref <309>: DATABASE ENTRY DATE: 2002-08-28
aacgaagaaagaagaaaaattaaattcaaataaacttaataataaaagagagagagaaaacactaaaaatgttgaaattggcactttcgctcgtgttcgtggtcggcctagccatgtcggccgaagtcgaagagttccgatgggagaccatcccagttgccgagaacgcctcgcagtgcatctaccgaccagaggtccgcaccttgggttgccgtggtgtcggcggcctcgtcgagtgcccagcctcgctcgagttcggctcgctccaattcgaagtgttcggcatccgacgtgatgcggtcaagtccgttgtgagcccagtcgagtcgcgcgtcttcgagttgtacccacgcaagttggacaaccagacctaccagaactacaccgtcgtcgtcgacgagaagccagtcgagttgttcttgtacttcggtgagaccagcacctcgtccggtatccgtgtcactgatcgcaagtgctacactcgattgatcgatgttgttttgggcgtctcgaaggctcgtcacgtcgtcagcgttgtcgagggaaccgtcactgagcaagtcgagctcatcggtgaggtcttggtcgctgagaagccagccaacaagcgatggttgggattcggcttcccatggctcggatggggtttgggtctctggggttggggtctcggatggggtctcccattctggggctaaatagctctttttaagcaattttttccacttacacttgtgtgattttttctataattttctatatcaaatgtatcagtgcctcttttttagttcaaatcaatatgtagacttagaatttttatttatactatcgaataattttatatccaatattaattaataataataatatgaatttttagcaatttatttaatttataattagattaaattcaataaaatttaacttaaaactat

SEQ ID NO: 11780 - DNA, 970 bp, Oryza sativa
  ref <308>: DATABASE ACCESSION NUMBER: AK109128
  ref <309>: DATABASE ENTRY DATE: 2002-08-28
aacacacactcaaattccctggcaggctcatctgtttgttgggagagagagaagagatgagtaatattgggatggggatgggggtgatagaagctgggcgatttatgagaatgagttcagaacgacgagcgaggcacttggtgggcatgggtgttgtgctgacgttgaacacgtcgatcctaatactgggtagcgccacccgtgccccgacgcattgcacccgtggcgtcttcttgtggccctgtatcgcgatcggcctcttcttcatggtcgtcttcatcttgggcctgtgcggcgcgaagaacaacaacgagggtctcttcttctgccacctcctcggcgtgttcatcgccatcctcgccctcatcggcttcatcatcttcggttacgtggccatcggaccaggcatcgacctcagcgatgtgaaggcacgcgagtacaatctggacgactacaagagcgggtggctcagggctcgtgtggacgacgccgcgtactgggcaacaaccagcgcctgcctccgcggcgacaggggcgccgggtgcaaggccatgacgaaactggtccgtgacccacactccggcttgttcgtccccgacggcggccgccggcacgtcgacatgtcacctatccagtctggatgctgcaagccaccatcatcgtgtggattcacatatgtcaacgggacgacgtggacaccaacaccagcagcagcaacaaacaacgtcgactgcagcaggtggagcaacgaccaacaaaagctctgcttccagtgcgattcatgcaaggcaggcttcctcgaccacaccaggaaggcctggagctcggctgccttctttcccattttctgcttgatcgcggccattctttcatgctgttcaggtttaaaatatggaggggttctccatgaataagttgttatcttactttgtttatttttatcatgtttaggctttgagccaacaacctt

SEQ ID NO: 11781 - DNA, 1325 bp, Oryza sativa
  ref <308>: DATABASE ACCESSION NUMBER: AK109129
  ref <309>: DATABASE ENTRY DATE: 2002-08-28
ttcacttcatcgtcgccggtcgacacaccaccaacccaacgttaattccagctctacttgctcaacacaaacttcaccaaatcaacactcgataatcgcgcatactcgcaattcttcacgaatcaacacagcttcttcagcattacttcgtctatccattagtttggccaggacgaatcgaaagaataccatcataattcaactctccaagaaagaataatcaacacacatcacaatggccgctatccagctcaacttcactctccgcacttccgccaactgcaagaccgtccaccttctcggctcctgggacggctaccagggtcagctcccactctccaaggacaccaagaagtctggaggctggactggctgcttcaagttcaacggcgccactctcaagcagggccaacgttactggtactactacatcatcgacggctaccacgtctcgcacgaccccgccaaggaccacaccaccgagcccaccaccggccgcaagctcaacatcatcgacatccccgccgccaagtcatcgtcgaccagctccgaccgcaagtctcgccgcgtctccgccaacatcgccaagggccgttccctcagccccgagcgcatcgttgcccccaagccccagcgcccaggtgagacccgccaggtcatcaacacccagtacgacaagaccaccctcgaggagctcaaccgccgctttgctgcccagtccgtcgaggacgactctgaggatgactccgactacgactccgatgtcccatcgcttacctctcgctccaccaactcgagctcgcccagcagtgtcagctctggtagcagctgctgcacatgcgagcgctttggcattacccgcgccggtaaccgcgtcaagcttgactgcggaggttcgcgatgcggatactctgacgactcggaggactgctcttctgaggacgagtacgtgtacgaggagaagacgacccgccgccagggcatcgtcgtccgctcgtagattgcctacccaactcacctcactgtcaacaattgcttaccccaccttggacaccattgtgtttcccacacccattctttctgtgcatattatgattacgacattttttccttttcgttcttacaacaagatccgctctttggatatgattatttattgctgctggtatggaggtcctggaggtttactcaggggaaggatacagcgagccactctttttgcgctggctatggacatcacttattgcccgatgtcagatcatgcgacaatgcacgctcatgtagaattagatctaatcaaatggattcgcatggctcgtgcgcgg

SEQ ID NO: 11782 - DNA, 1380 bp, Oryza sativa
  ref <308>: DATABASE ACCESSION NUMBER: AK109130
  ref <309>: DATABASE ENTRY DATE: 2002-08-28
ctctctctcactcacagcgacaggggaggagtgccgcgcaccggcggctggcgggggatggccggtgaggcgggcgtgtcggcggccgccgagggaggaaggcttggtcaattgagcacagccgcgcgcgcatgggcggcgggggaagagatgggcgtcggcgacaacgaccgaggagctgggcacgggcggtggccaaagggggaatagctgggcgcgggcggctgccgccgggggaagagatgggaggcaacgacagtgggcgaggagttgggcgcgagcgcccgctcctcccgacgggatcctctcttcctcgtcggtgtcgtcgtccccctcgtccccgctggatcccgccgtggcgcagtggccatcgtcctggtcgcccgccgcgccgccgctccattcgtccgcggcgtcccacctccgcgacctcccggcggatcccgccgccacctccgccgcgccacctgtctggatgtgggaaaaaatggaatcgaccaccaccgcctccaaggggacctcgtcgtgggcagcggccatcgtcgatctcgccgcccctagtgccctccatgccggtgcacgaggccggggttgttggcctgcagaatgcggaggccagacgacggcgtggtggaggaccagcttcggtacagtatagttcagttcagttgaggaatcttgtcgtggagaccgacgacgagcgtggtggcggcgagctggttcaccgtcaccaccaccgtctccccgaccttcccctccctaaccactatctccaccttcgcctgcataccatttcacaattaaaaagatgatttgcttctttctttgttttgagttgagccaactaccaccattgattgatgggtttacctccgcgatgccgttgcagagctccctgaaggcgagggcgagctggaagccgccgaggcgtaggctgcgcaacctcgctggcgggcagacgtgcaacagcgtgatgtagtcactggcgcggatgaagttttggatggcccactgcagcgtgccgccatcgccgatggcagcgactgatggcggcgtcgtcgagatgtgatgatggccgtagccgcgcgccgccctgaacccgcgcgccgccacccgggagccgccgtcgccggccgcgcgcggcgtcgcctgtgcgagagcagagagcgagagggaggaaaggagaagagaaaaaaaaaaaagagaagagaggaaagagagcaggagctgacagggacaccctgccatgtggggtccacgtgggtctcacgctgactcagccgtcacgtgagacaaaaccgggtcaaaacaagttaggggatgtgttgtatcggttttatggttgggggacgattttgtaactcggtgacaagttgaggg

SEQ ID NO: 11783 - DNA, 846 bp, Oryza sativa
  ref <308>: DATABASE ACCESSION NUMBER: AK109131
  ref <309>: DATABASE ENTRY DATE: 2002-08-28
gtagtgtgcaggtgtagctaagttagcagtagtagtagtaacttgtatggcaatgcctatggcggcggcggcggcacgggcttacggcgttgccactcctcccggcggctacgtctcgtttgcgtgtgctgccatggcgacgacgcgcaccggcgcgaggagagcggccgccgccgtcgtcgtcctcaggcacgcgtcggggggtggtggtggccgtggcccccggggcggcggcgagcgggaggaggagcccaccgacgcgtcgtcgtcgtggttggttgacgaggacatggccacgctgcggcggcgcatccgcgaggcgagggaggcggaggaggaggagggctatggcggcggtggcggcggtgggctcccggcggagtggacggagctggagcggcggcaccacgggagctacgtcgccggcgtccgcggcgcggtcggcctcctacaggcgctcctggtgagcgcgcggccgggcctcggcgccggcctcctcgcgctgctgctgctcggcgtcccggcctccgtgctcctcgtgtccgcgcagctgctcgccgtcgcctccgcggtgctctccggtacatgatcgcgtcgcgtgtgcgctttgcgcttgcttgcttgcaaaatagtacagtatagggtctaattcgtgaaatttactgtcacagtccaatcagaaactgcatatgccacctgaagctagcgtagcttgttagattcgctgtggtggaatcccgggttcaaattatagatttgtcacggacgctcgcatctatggttaattaaatcagtatgatggtatgcctaacggatactcgcatttacagctaattaagtcaaatg

SEQ ID NO: 11784 - DNA, 966 bp, Oryza sativa
  ref <308>: DATABASE ACCESSION NUMBER: AK109132
  ref <309>: DATABASE ENTRY DATE: 2002-08-28
ctctgtccgtactcaccaccaccaacgctgtgcaccgcacaagcaagcacacgtacgccacagagcacacacagccaaggcgagagagcggccatggcgccgagcgccgtgcaggcgatgtcgtcgagccacggcgccgcggcggcgatggtggcggcggggcagaggcggcggctgacgcggctgctgctgaacgtgacggtggagcagagcctgtggcccgtccacgtcgtgatcggcgcggactgcaccgtggccgacctcgtccgcgccgccgtcgacgcgtacgtgcgcgagggccgccgcccgccgctcccttccgccggcggcggcggcgacgcggcggccgggttcgagctgcatttctccaagtactcgctcgaaagtctaaggccggaggagaagctggtggatctgggctctcgtaacttcttcctttgcgcacggagaacacctgctgcttaattttcaatctgctttcgtttttgttaagcatctgctttctgctctgctgcttaggacttgtttagttccaaattttttttttgtcaaacttccaattttccatcacatcgaacattttatacacacgcaacttttctatcacatcgtatcaatttcaaccaagcttctaaattttaaaatttcagtgtgaactaaacacgaccttaattgattcaagcgagcagagcatgcaactgatcacctgctcgtcacgagctgctgcatcacgagctcgtgatcatacgtgttgtgcttgacatgccgtcggctagctcatcgcgacgtcgcctctactgttcatctttgatggatcttcagagccgtggagagactgaacttgtacttttttttttccttttctcttcttttctgaagatcatgtttgtactgctagctgttggagtgcaggaaaaacataataataccctgtttagatgggactaaaacttttaagtccctatc

SEQ ID NO: 11785 - DNA, 1507 bp, Oryza sativa
  ref <308>: DATABASE ACCESSION NUMBER: AK109133
  ref <309>: DATABASE ENTRY DATE: 2002-08-28
aaaaaaaaaaattgaaaactctgggcgcaagccgcggggactccgcggctagggttagggaggagggggaggtcctccgccacccgccgccgccgccgccgccggccgccgctgccggccgccgccaccgcccctccgctcgatcatctccgccgatctccgccgatctccgccgccttctcccgtgcacagagggtagggtcggggggaagaagggggaggtcctccgccacccggtcgccgccgccgccaccgccctccgcaactcatcggacgggtgaacgctcgatcatcgccgccgatctccgccgccttctcgcgtgcacagagggttctgcggctagggtcggggggaagaagggggaggtcctccgccgcccacctctccaacgcctgaagggggagtgtgctccgccaccgcagcccccggaaatccgcagctccggccacgccaccgcatcgcccccccgcctccgcccctaatcccacggccagcatcctcactgctcgtcctccaccacggccatcgcgcgtggcgtctgcagttcggctgtcttgttttctctgtcgccgccccaggcccccagtttgcttgttgctgtcgagacatcaccagttcgactgttgcttcgcctgaaggctccatggctgaccatcctcccacagtgttcttaaatgagctggagaaatgggtgtccgtcaaaagtagagaatcaatcttgtctgtcaggtttaaaccccatgctgcagaagtcaagcgtactctggatgccctggaggttgtacctgctctgaagagaattgaacggagcaaggtggtagggtatgcgacttgctctgtcgtagctgagaatgggaattcactttacctcttaacatgtgcgcacacgattgatcatgtttacacagcaaccaaagagatctccgttcaggacatcaaccgcttgttcgatactgaagtggtctgcgatcaccaacaaaacaacggtttgggcggagaaagaaaatttactgaagccattgtcacccgtgtggattgcaagaaggatatcttgttggttctcgtggacaaatcaaaactcctaaatctgaaagggaagcaatgcagattccaacatcctccattggttgcaagccagaacttgccgtgctcgctagagtaagtggtgatgatctcgtggccgccttgtatgaacagggcaacatctgtagggcgcatatcacatccttccagacactatgacgatgtcagtaacaccaatgagtatggctataatatgaatttaattgaggtggatatgatggtagcagagggtagctcaggagcaccgttgcttaattgcagagccaattttgttggtctacttcaaggaggtggtaaggaatgtttttcatgctttgtttcactttctgatatatgtaagaagctaactgagtggggaatttttcctcgagagaaggtgattcaacaaaagaaatcacagaagtgacaactgattcatcattg

SEQ ID NO: 11786 - DNA, 1422 bp, Oryza sativa
  ref <308>: DATABASE ACCESSION NUMBER: AK109134
  ref <309>: DATABASE ENTRY DATE: 2002-08-28
ctctctcgctggcaagcaaactccaattcattcatcaaccgccgtctcttccattctcaactccaatcctcattccatttccatattccgtctgtctgtctccaagtcccatgaagccgtctcccgccgccaacctggacgtccgcgtggagaggcctaggccaccgccggtgcaccctcaccggccgggaagtctcagggcgcgcccctactaccgccgatggacgccctggatcgtcgccgccatcgccctctcctgcgtcgtcgtcttcctcgtctccatgtatgtcaacgattgcccccgccgcaactccggggactgcgccgccggcttcctcggccgcttcgccttccagccgctcaaggagaatcccctcctcggcccttcctccgccacgttactgaagatgggagctctagatgtaactaaggttgtccatggtcaccaaggatggcgtctaattacatgcatctggcttcatgctggagttgttcatttgctcatcaatatgctatgccttctatttatcggcattcgacttgaacaagagtttgggtttgtgaggattggtctggtttatctcatctctggtcttggtgggagcttgatgtctgccctcttcatccgatcaagtatctctgttggtgcctctggtgctttgtttggattgattgggtccatgctttctgaactcataacgaattggtcgctctatgcaaacaaggtggcagcactactaacactagtgtttgtaattgtggtgaatttggctcttgggatacttcccagggtagataactttgcgcacattgggggccttatatccgggttccttcttggatttgttatgtttattcgtccacagtttgcatggattaatcagagaagagtagcacctggacaacaacctgctcctgtgaaacgcaagcacaagacataccaatatatactgtggttagctgctgccattatgctaattgtcggatttacagtggctatagtactgcttctccgaggatataatgcaaacgaccactgctcttggtgtcactatctcagctgtgttcctacgaaaagatggaaatgcaactcatcaccaacatattgcacggtaatgcaacaagcgaatacattaaacttgacatgtgaaggcaaaacgtacaccggagctaccttatagcggatgccacgcaagataagatcaaccaactctgcaaccaactttgcagttagcagaatcttggttccctccctgagttgatctgcttgtaaaaatactactactagtagtatatacatttttcattcttcgtgtacatgaatacatcatgtttgacagacagagaatagaaaagaatttgctgtacatatgaagaaaagaatactacaccgattgaatctatgcagagtgccatttatat

SEQ ID NO: 11787 - DNA, 943 bp, Oryza sativa
  ref <308>: DATABASE ACCESSION NUMBER: AK109135
  ref <309>: DATABASE ENTRY DATE: 2002-08-28
aataaattaaaccttgatcacaccacagcacaatcaatggaccctaaggcattaaagatatcgccagcggacttggtattcttgcccccatttaccaagccaattaacaactcaattaaattgacaaacactagcaccgaagcactttcatacaaggtcaaaacaactgcacccaagcgctattgtgtcaaacccaataccggaacgatttcaccaaacgaaagcgtagaagttacaatcactctcaattttacaaaagatccgcctgccaatccaaaagtagccgacaaattccaaatccaatgcattcctgtgactgacacaaccgctgatcttaagaccttgtggagtcgagtgccgaaagaacaagtgctcaagtacaagctgcgctgctacttgtcagccaaagagaccgcagaggagcacagcacgcgcgagactatcgatcagtctgagttcgaggacgcatcggagcacgaggacaaggaggatcaccctacagccagcagtgttactacccccgtagtggcgcaaccagtgccccaacagctctccacacccgtcattgagcccgtcaaacccacaccgacaccagtgacacctctcgccactaacaaagtacagcccgtgtctgatacgaacaagggacaattgtcaccgcgtgccaagtacaagctcgaaattgagaagcaacgcctcgaaattgatcgtctcaaagcagatctggacaagtatcgcaacaacgaatcaggcttacgtcagcgcaaggtcggtggtggcgcagagagcagcacggccgatcacggtgcgacatcgagtgccagtcacgcgaccccagtgacgggcaagatgttgtacattggtctcgcgctcttgttcttgttcggtgtgtggttcggtcgctggactaagagctcttaattaaacactctgtttgacacgt

SEQ ID NO: 11788 - DNA, 1410 bp, Oryza sativa
  ref <308>: DATABASE ACCESSION NUMBER: AK109136
  ref <309>: DATABASE ENTRY DATE: 2002-08-28
acaattgttatattaataacatatacgaaaacaacaaaataatttagaaatctaagaatagaaagagtctatctgaaatcatgaaaaagtcgatcataagcctagcactcttgctcgtaatagtagcgagcgaagtgtcagcactaagtctccgcgagccattcattgttaacttgtggaacaagttcaagaagtcgcacaacaaagagtatctaaacgaagagcacgaagagtatcgattcggcatattcaagacgaatctcgagcgcatcgagaagcacaacgaggagtactcgatgggtctacactcgtacgcggtgggcgtcaatgtgtttgccgattggaccgctgaggaattcagacgtcatatgttcggtacccgacatggaaacaccacctcgaaatcgtccggcacattcatcaagctaccaaagtcggtacagatcgacgatgcggtcgattggaggtctgagggagctgtgacgcctgttaagaatcagggacagtgtggttcgtgctgggccttttctactactggttctttggagggtgctcattttagacagaccggtaaactcgtctctctatccgagcagcagcttgtagactgctctggaaagtatggcaatgagggatgtaatggtggtctcatggataatgcctttgagtacattaaggcaaatggaggcctcgacaccgaagagtcgtatccgtaccacgctcacaacgaaaagtgccacttcaacaagaagacaatcggcgcgacctgctcaggctacatcgacgtgccatcaggcgacgaagacgcgctaaagcaggctgttgccacagccggcccggtctcagtggccatcgacgtcaccgaggacaacttcatgttctacaaggggggcattttcgtcgacgactcgtgctcgaacggccgtgagtcgctcaaccacggcgtgctcgtcgtcggctacggcagcaactcgaccaccgacttctggctcgtcaagaacagctggggcacttcgtggggcgagtctggctacatccgaatggccaggaacttgaacaacatgtgcggcattgccactgctgctagctacccgcttgtaaaataaatgtgtccaaaaacttgaatactgtcttttttccattcatatttgcaacttttttttcttcaatttttctcttttagattgttgtacatttaactagttacttagtaaaagtatcaaaatctgatgacatttaattcgtatatttgataatctgactttaaatatctgattttttttgttcttcgttttttttacaattgttttaatcatttgtttaattggatctgtatttatataattcaatttttacactacataatattctcaattatttgtctcaataaataaaatttaataaatgttt

SEQ ID NO: 11789 - DNA, 1160 bp, Oryza sativa
  ref <308>: DATABASE ACCESSION NUMBER: AK109137
  ref <309>: DATABASE ENTRY DATE: 2002-08-28
actgttgataccccaggtacacctttttcaaaaggaccgtaacactctttttctggtctcctaccccacggtcatttgccattaccacgctctttttctctaatatacctacttaatacgcaatcatgtctttcatccgcaacaccattgttctgggcgccctatccgctctcaccgcagctcaaaccactcctcccaagctggacgcaagctgcgccgatgtagtcatcttcatggtccgtggaaatgacgccccttaccacgacggacgcacctttccctttgtcgaggcgacctgcggcaagctgagggccgaaggcaagacctgcgactacattgatgtccagttcgatgtcactcttggtggagactactgcgctcaggtggctgagggtgcccgcaatggtatctctcagatcactgctttcaaccagaagtgcccttgctcgcacattgtggtcaatggctactctgagggtgcccacgttatgggcgatgttttgggaggacctggtgattgcacctttgtgtccaacggtcttgacaatacctcgtctgctggcaaagctattgccgcggctctcctgtggggtgatgttatgcacaccgccaaccagccttacaacgtgctcgacggcgccagcaagcagaagaaccctcgttcgccctctgacctcgcgcgtctgaaccgctacgctcctgttctccgctcctactgtgcagctggcgacccagtctgcgccggaggcaacactgttgctgatcacctcaactacttccagctctacactgacgacgcctcgtcctgggtcgtcagcaagatcaacaacgttgcacctctgtgccctgcatcgagctcgtctgcggtacccactcccactgcttctgtctccgcttcagtcatcggcggcaacactcccactgctactgtctccgcttcagtcatcggcggtaacactcccactgctactggagcggcaactgtttacccgacttctcctgcagtcgttgctcctttcccccgcccaatttcctacgacacgtgcgtcctcaaggtccacgtcgagtactgctacgagtagagtgtaggacggatggataggggagggggtgttagtggtagtttgagcgtgtgcgtaatggaatgatttgattacctg

SEQ ID NO: 11790 - DNA, 906 bp, Oryza sativa
  ref <308>: DATABASE ACCESSION NUMBER: AK109138
  ref <309>: DATABASE ENTRY DATE: 2002-08-28
catatgttgtatccagtagctatattagtactaaaatacctattgttggttgtatactaattcttaagggcaaatgcgtcttttttacaaaaaaaattaacggccaactgacggtggaccgacggcaatggcataaaaaggaggagaaatttgaactggtagcataaaagagagaagccaattttaagtggtatataagagagccggttaatttagagtggcatataagggattctctcttctcttaactatgcaaattccattcaaatttagccaaaatccccgaaatttcggttgtatatatcgcaaaggactaactgcaggctgcgtcgtcgtcttcctcgcgatcgttttcacttttttttcaggccatctgtacgtgaagagtgacgtgtactgcttcggcgtggtgctgcttgagctgctcacggggctgagggctcacgacctgaaccggccgagccaccagcagaatctggtggagtgggcgcggccgtacatcgccggcggcaagaagctggcggggctgatggacccgcggctcgccggggactacccggccaaggcggcggcgcgggccgccaagctcgccgacaagtgcctctgcggcgaccccaagagccggccgtccatggacgacgtcgtcgtcgcgctccaggagatcgagtccgtcggcaccgcgcggccggcggcggcgaagctgccgccgcgggcgccgccgcccgctgcgcaccggtcgccgcaccgtaatccttattccaagccgcgatgagctttgggattatctgcatactaacatagatttgaaattgaattgaattgaattgtattgattcttttttctttctacggcgcgtgtcatctttaaacaatctcactttgcaaatgattatactcctctgatcc

SEQ ID NO: 11791 - DNA, 1451 bp, Oryza sativa
  ref <308>: DATABASE ACCESSION NUMBER: AK109139
  ref <309>: DATABASE ENTRY DATE: 2002-08-28
acatatgctatccgaccaattagggagctgccgagctcacagcttggatctgaggaagcagtcagtgaactgtctgctgagggcgccgcagcgtcccacaccatcagctcactgcgcctgtcatccacctccataccagcactacacagctacgaggttcgccttgtgttggaatactgcgacaagggctgcctcagggaggcactcgattcaggcgcgttcaagctgccaggtggaggggtgaactaccttgctgtgcttgacactgccgctgacgtggcgaaggccatgctgcatctgcactccctcaatgtgctgcactcagacctcaagtgccagaatgtgatgctggcgacaggcaacgctgatggcaggggtctggtgggcaaggttggtgactttggcctgagcctgaagatggactgtacagagacacacatcagccaggtcttccagggaacaatgacgcacatggcaccagagattatgctcaatgggcgtgtgtcgaaggcagcggacgtatattcttttggcatttgcctgtatgagatgtacactggaggcatagcatttgacggcataccgcgcgcgctgctcggccaccaaataacacgggagcacaagcggccagtgttccctgacagcacaccagagccgtacaagcggctggccgagcgatgctggcacgcagactgggatgccaggcccaccttcagcgaggtgctctctgagctgatggcgatgcgtgcagctaaccctcgcagcacgcctcctgtgcacatcgtgcggcggccgccactggagttgtcttcaatcaatgacatcttctggggaggtgggggaggtgccaacagcgacaacaatgtcgtcaaaacattaggctcctcggtgcatgcaggcagtccacacacgccacatggagcggagcctggtgaccacagtgtgcagtctgtgtacctggagcacagcctggacgaccatgacctcattgtgatgaggaccatgagcgattggagcgatggagggtcaggggcacgcggcagtgccagcaacagcttaggcactgcgtacagtggcaagaggacaacaccattaccacagatagctgaaggggaggccggtgagcatgaggctcctggggggcctgttggtgatgtagcagccgccacacaacaacatcggccgcatgagcagtgacacccaccatctggtttgcctttacggggctgattctgagccacaactgttacctcacaacttctgctcaaagccacgtgcagccagatattccaagattaggcattacgcagcagcggacatacctgatgtatgtcgcctgatacatgggaccatgcaaaagtattgcaggtgggggttagcagcagttgctcttttgcttcttgctgcggttgctcttgagcagtcagccttttttttaactgagcagtcac

SEQ ID NO: 11792 - DNA, 498 bp, Oryza sativa
  ref <308>: DATABASE ACCESSION NUMBER: AK109140
  ref <309>: DATABASE ENTRY DATE: 2002-08-28
ggtatgtcgttgagaacttcggaacctacgatccctcttcgcaggcccagaactccagcaccatcactgccgacggctccacctacaagatcgccacctcgacccgtaccaaccagccctccatcgacggcacgtcgactttccagcagtactggtccgtccgccagcagaagcgctcctccggaagcgtcgacatggccacccacttcgccgcctgggagtccaagggtatgcgcctcggcacccacaactaccagattgtcgccaccgagggttacttctccagcggcaacgcccagatcaccgtcaactgcccttaaagcggtacttggccagaaaagcactaccgtgtctggcagcgtgcacgggcgctcctgtgatgacgaaagtctgccgttggcgcgcgcgccgctctggatgttggtttctgttgtgtacatacttttttcttcctgccggcttgctggctctatctaagtgaatatatcggtctttacc

SEQ ID NO: 11793 - DNA, 1399 bp, Oryza sativa
  ref <308>: DATABASE ACCESSION NUMBER: AK109141
  ref <309>: DATABASE ENTRY DATE: 2002-08-28
gaggcacagctaactcaacgcaaacaaatcaaacgccacgcacctctcgctctcccactgaagttgtgtgtgccaccgcaccgtgtcgttccctctccttgcaacggcccacgaccagccgccatacgcagcatacatggacttccaccacggagacgccgacgacttcgccctcgagttcatccgcgagcaccttctcggcgtcgacggcgccaccgccacggccaccgagccggcggacctcgaggtcgtcgaaccggcggcggcgtacccgcctatgtcgtggcaagagcagcggcagcaggagcagcatggttgtcacgtagaactaacggacgagcacctggaatccgcacccgctgctgaggcagcggcggcgttccgaacggcgcccgcgcagccggcggccgaggtgatgatcaagttcggtggcgagccctccccggtgaggccgtcgtcgtcgctgaccatatccctgccaccgagctcgttcggcagctgggcgtccgcggcggcgccggccgcggccgccgtggaggacttccgcaagtaccgcggcgtgcgacagcggccgtgggggaagttcgcggcggagatccgcgacccgaagaggcgcgggtcgcgcgtgtggctgggcacgtacgacacccccgtggaggccgcgcgcgcgtacgaccgcgccgccttccgcatgcgcggtgccaaggccatcctcaacttccccaacgaggtcggcacccgcggcgccgaactgtgggctcctcccccgccgccacccgcgcactccgccgccgcctcgacgacgaacaagcggaagcggcagccgtcggaggaccccgacgacggcgtcgaggtgatcggagtggtaagcaaggccgtcaagaccgaggcgccgacgtccaactcgtcgtcactgtcgtcgtccctgacgtcgcgggacacgacgccggccacgtcgtcggcgggggcggagcacgccggcgcggccgccgagagttcgccggcgacgccgtcgagctggagctgggagcagtactgggaagcgctgctcggtggcctcccgccactgtcgcctctgtcgccgcacccggcgttggggttccctcagctcaccgttaactgagaaaattaaacaatgattagctgacgtgggcacagaaataatgcgtttttttcccgttgttaacgacgtcatgtgtacattggaactttttttgggagcttaacagaaggggcgtatagacaaacatcagaaagtggtagtcgtgtttacttttttttttctttcgagttgagaaccttgagatcaatcgatgcttgtaaagaataagcagagggtgctgtttggcatttgatatgacaatgtaaacaaatagtacaagttactttgtttactgag

SEQ ID NO: 11794 - DNA, 1083 bp, Oryza sativa
  ref <308>: DATABASE ACCESSION NUMBER: AK109142
  ref <309>: DATABASE ENTRY DATE: 2002-08-28
aaaaaactcttccgctccagaggcttcacagctttctcctcccgtagagccaagccaaccaagcgggagcagcatggctacggccacgtcgacggcgacgagcgtggcggcggcgctcctcctctcgctcctcctggcgcgcgcgcggggcgacgacgactactcggggttcgtgtacgccgggtgctcgcaggggcgctacgcctccggcacgcagtacgcgtcggacgtcgactccgtgctcacctccgtcgccaacagcgcgccctactccccctacgccaacttcacctcgccgacgtcgaactcggtggtcggcgtctaccagtgccgctccgacctcccggcctccgtttgcaccggctgcgtccgctccgccatctccaggctctcctcgctctgcgcctgggccaccggcggcgccgtgcagctgcgggcctgcttcgtgcgctacggcaacgacacgttcctcgggaagcaggacacggccgtgctgttcaagaagtgcggcggctcgccgggggacgccggcggcgccgccatgcgggactcggcgctcggcgcgctcgtggccgccgcggcgcccgccgggggaggctaccgcgccggcgggtccgggggcgtgcaggccatgtcgcagtgcgtgggggacctcggcgccaaggcctgctccgactgcgtctcggccgccgccggccagctcaaggccggctgcggctacgccacggccggcgaggtgtacctcggcaagtgctacgcgcgcttctgggggaacgggggcggtggattcagcagcggcgccgccggggacgcgtacggatctgggcatcgcgtgtccggcaaccggttcgttctctccgtcgccggcggtttcttcacttccttggcctatatatttgtactcatgtagttactgaattacagttgcagtatgatcaatgatcgtgaactagactactagagtgcctgtgtctgtgtgctttatgcgtggtatgtaaccactaatcagcatatctgcatatgtgatgcgatgcaggtttactccttgtgcttgaacaaattaaacttgatgctttctaactt

SEQ ID NO: 11795 - DNA, 2420 bp, Oryza sativa
  ref <308>: DATABASE ACCESSION NUMBER: AK109143
  ref <309>: DATABASE ENTRY DATE: 2002-08-28
atatgcatcaacaatactagcctaatggagaagctggcagtaaccactgacattatctgaagaaattacttgccggttacagcaatgaagagaagctgaacccagaggagtggtactgagaacacaggtgccaatacaatctttcatcagtttgaagccagctgctgccgttgcatcctcttcatcaccaaaaatgtaatcgaagaactcctcgcatcctcctcctccgccattgccgtcggcgaggagactcctcttcctcttcacccttctcggcgtcttcttctcgaccggctccacctctccgaggtcgccgaacgcggcctccttcgccagccattgttggagaagcatcgcccttgcctccttcatggcgggatcatcagcgcatcccctgaagtgttcgtccgctcttcggcatacggcgcggcacctccggacccgctcggccttctccgccgcgttcccggcgatggcggcgccgccggagcacgccgtggcctcgaactcggcgtagctcacccacacgttgaggtgttgtgttttgccgagaagcctctcgtagagctgcctcgctctgtcgagctcgccggcgtcgatctcgaactggatgtagtccgtccacactagctccggggcgtccagcgccggctgagagacggcgaggtcgtatacggatcgggcgcggtcggtctcgcccagcttcttctccaacgcggcgtagcttctccatacgtggctgctgctcggagcgtgctcgatgaacttctgggacagaatccggcaccggccgacgttgccgagctggagctcgatctcgatgtacctcctggatagcttcggccggggcgcgacgccgatcgcgttgccgaggagccgccgcgccgcggcgaggttcttgtcacggatctcgagctccgccgccatgacgcagatattggagaaggagaacttcttgtgtgggatcgtcctgaggcactcccggtacacgccgcgggcgcgcgccacgtcctccgcgtcgagctcctcgaagagggcgtagttgatccagaggtagatgtaccgccgccaatgccgcttctccgccgccgccgccgccggtggaacgttggcgacggcgcgcctgtagaggtccctgatccggttcgcgtcgccggtgttggcgctctcctccagcctgatgaggtcgaaccacgcgtcgtagcacagcgggttcgtggtcaccgcgcgctcgtactgggacctccgcttggtgacgatgctgtcctcgacgccatggcggtcgccgaaccgcttctcgagagagaggagcttctcgcgcagctcctcggcgcggggctcgggcggctcgccacggagcgcgtgctggtatattgcacgcgctcggtccggctccccgcaccgctcctcgaagtcggcgaacgcggcgagcagcacggcggtgtcgtcgttgtcgccggcggcggcgagcaggctcccggcgtgctcgtacacgcggggcgcgcggtccaggttcttcagtttcgtctcgaactcggcgaaaaggatgaacgcgtcggcgcacgggagagcagcaacatgccgctcgtgcacggctctggcacggtccagctcgccgtggcggagctcgaacgcggcgtacgcggcccaggcatcggcgccggggcgccaagacgtccacctatcgaacactacgcgggcgttgtctgtggcgccgaggagatcctccatgcggaggtactccgaccagatgcggtcagcgcgcgggaggatcgccacggcgcggtcaagtacgttgcgcgcgtgcccgacgcggccgccacgagcctcgaactgcgcatactttatccacacaccatggtcgcggtacgccggcgcgccgccggccagcgcgcgctcgtacacggatcgcgcgcgggcggggtcgccgccgccgccgccgggggactcctcccaccgcgcgtacctcatccactccgacgacgcgtcgccgcatcctccgcgaccgctgccggctcggcggacgatggcctcgaaccgtgcgcgtcgctcgagccggtgctcggcgagctcgtcggcatcgacgatcctcctcttcttggactccgccggcaggcagacggtcaccgatccatcgccgtgcagttcgcgggcctcacggatgagatgctcggccgtgagctgcacgggcgccggtgctttgttcttgacgcggcggggggtcggcagcatcgccaataactggaactggatacaggtggagaagtgccgatgagttgtggtgtcctattattataggccgccgaggaaggccaggccggtacacaatggaaatacgaatcgggcccggtcctttgttcctttggatttttttcgtttttagatttttttttaatatttacagaaataatctatcgacc

SEQ ID NO: 11796 - DNA, 917 bp, Oryza sativa
  ref <308>: DATABASE ACCESSION NUMBER: AK109144
  ref <309>: DATABASE ENTRY DATE: 2002-08-28
atcacccagcttctactctcggcctctcagtctgcctattcaaaacaatcccacagcttcggatctttgatcatcactcccatctccaacatgaagtggcttcttgctcttatccccgccgtcgctgcggctcccgctctccctgagttcaacgccgatgtgcccccagctggctcggtcctgatcaatagcgtcacctatggaggcactggctgcccccagggctccatgagcgcccagatctctcccgacaggaccattgtcaccctcatcttcgactcttacatcgcctcgatcggccccggaatcgctcttactgagcagcgcaagaactgccagctcaacgttggtcttacctaccccggaggcttccagtactccatcctgtctgccgattaccgtggctatgctgctatccagaagggcgtcaagggtaccctcaagtccacctactacttctccggtcaacaagctcagacctccaccgagtacactttcgagggcccagtcaacggcgactacaccaagcacgacgaggcggacagcacgtccatcatctggtctccatgcggcgcctccggcatgctcaacatcaactcccaggtccgcctggaacagtccaactccagcgccactggtctgctcaccaccgactctactgatctcaagttccagcaagtcgtgtacgttcagtggcagaagtgcactaaatagatcaagatctagtcgtactgatatgggaaaagcccaagcaaccagacaagttacattactgtgcgcgggccctggaggatcaacaccaggaaatttgcatggcggcgctgcggcaacgaggagctataggcttggtgaaatcttgaatcattgcaaagtatttgatagtcttttttgttcaaattcagagatgcgcatctccc

SEQ ID NO: 11797 - DNA, 1074 bp, Oryza sativa
  ref <308>: DATABASE ACCESSION NUMBER: AK109145
  ref <309>: DATABASE ENTRY DATE: 2002-08-28
aacccactctcgcttttctctacctgctttcaagaaacaacaaagacactcgctgccttctgtaccaataagccaactagctgtattacttcactgtttatacacaacaacaaacaacaaaaaccgtcaagatgaagtactccatcgtcgccgttgccttcgccgctctcgccagcgcccagtccatccaggacattccctcctgcgcccgcccctgccttgaggactccatcaagaagaacacccagtgcgccgtcgaggacctcgcctgcgtctgcaagaacttcaactccatccagggcgatgctactggctgcgtcgtgaaggcctgtggtcctgacaccgccatcaaccaggtccttcccgccgcctccaagctctgcgccaaccctccctccggtggcgctgcctcttctgctcccgctgcggcctcctctgctcccgctgctgcttcttctgctcccgctgctgcctcttccgctgccggcgccgtttcctctgctgccgcccccgtgtccagctccgttcccccggtctcgatgcccaccatcgtcaccacccccagcgctgtcgtccctcccaccaccgcgaagcccaccgccacccccgtccccaccgccggtgccgctgccctcggctccatgggtggcctcgccgctctcgtcctcggtgcccttgctctgtaaatagatgcaatgagcactctggggaagaaaacgggagtggaggcagcttcttctggccgctcaatgttcacttatcgtttccaatcttgagaatcgatagcggacacatttgagggtagagaaattcttttctcttcttacgcggaacgtcttcaacctagtcaatgacctcacacgtgtcaaacttatttttatcatgagatcctatgacgggaagacaaactaggagggcatggtgtgtgttttgcgttcttggatacttatatttagtcggggaggaattttggagaacgagaaggagagcgagccttgaatggttcaggtgtaattaggaaacgagatccgggcccaagttgctcaggaataataccatatacctttgccaacc

SEQ ID NO: 11798 - DNA, 1184 bp, Oryza sativa
  ref <308>: DATABASE ACCESSION NUMBER: AK109146
  ref <309>: DATABASE ENTRY DATE: 2002-08-28
ttctcacgcgtacacgtagtggcagaatagtaccacctcgagaaactcggcaactcgcccgccgccgccgccgccggcggcgaggatgaggtacggcgaggtggtgcacttcagccacccgcaccaccggctgcggctggagcacgccgacacgccgttccggtgcgacgggtgccgcgaggtcggcatcggcgcgcgcttccgctgcccgttcgccggctgcgaccacgacctccaccgccagtgcgcgctcccgctgtccccgccgccgccgccgctccgccacccgttctacccgcgctgcgccttcgtcgtcctcgcgcgggcgcccggcgcgccggggacgcgctactgcaacgcctgcggccgcgacgtcgccggcttcgtctaccactgccgcgcctgcggcttcgacctccacccctgctgcgccacgctcccacacgtcctcgacgccgccgccggggccgcctccggcggcggcggcggaggcgcgaggctgtacctgcacccgaaggcgacggcggcgtgccaccggtgcgggcaccgggggcggagctggacgtaccggagcagctgcaagagctacagcctccacgtggcgtgcgtcatggacatgctcgtcgagagctggaacggcgtcggccgccacaagggcggcgtcgccggcggcggcaatgtgtacgacggcgtgacggtggcggggagcggcgggtacagggtgccggtgatacgcggcgcggcgaagagcagccacgcgagcaggggagggtcctactggggaaggaaggggaaggtaaagcggtgctgcgagatcgccggcttcgcggcgcaggtggtcatctccgccgtgctcggcgaccccaccgccctcatcgccggcgtcatcggctcgctcatcgcgcggtgaccggcgccgccgccgccgccttcgcgccgcggcggaggggggtaaaaaaaaatgtaaattaactaccacgtatacacacgtacgtagcccacgtggcagaatttaactcgtgcaataacattaacccgtgtacacgtcatctaatcgcatcggagccgcacaatgttgatcggacggcgtggacgtggatcgcaatctgcttgcgatccaagcccggaagggtgtaatgtgtaagagattaagattagtacagtataattcagggttgttaccc

SEQ ID NO: 11799 - DNA, 1982 bp, Oryza sativa
  ref <308>: DATABASE ACCESSION NUMBER: AK109147
  ref <309>: DATABASE ENTRY DATE: 2002-08-28
ctcccgcctccccactccgtccaccccgccgcaccgacactctcctccgccatggatcgcgacccctccgtctccgacgaggacgacgacctcgagaccctcgtcccgcagaaccacgtcaagccgccctcctcctccttccacgtcgccggcctccgcgccgcggtccctccctccgccgcctcgctcggccgcgtcctctggtcccgccgctacctcctcctcttcgtcgccctccccgtcctcttcctcgtgctcttcgtatcccttggcggcgcgtcctcccttcgcctgcccgcctccatccgcctcccctccgccgccgctcccgccgccgaccccgcggcgtcccggatgcgcgacgccgagctccgcgcgctctacctcctccgctcgcagcgctcgggcctcctcgccctcttcaaccgtacggcagcacccaccaacggcagcagctcgggctcgaacgctgtctcgtacgccgatctccacgacgcgctcctcggccagatcaagatcaaccgcgaggtccaggcggcgctcctctccgcgcaccgcactggcgctgcgggcaatgcgacggaggatgggttggatcttgatctgccggctgacgggtgcaggaggagggaattgccgtccaaccggcggaccatagagtggaaccccaagaaagatcgattcctgttcgccatctgcgtctccgggcaaatgtccaaccacttgatttgcttggagaagcacatgttcttcgcggcgctgcttggccggatcttggtggtgcctagccagaagctggattatcagtacgaccgggtgcttgatatcaaccacattaatgattgcattggaaggaaggttgtaattacctatgaggaattcacagagaagaggaagaaagtgagcattgatcagttcatatgttacgcggcatcacccccttgtttcattgatgaggatcatgttaagaagttgaagggattggggatttcactgggaaagatccaggcagcttggccagaggatgcgaagctgaaggagccaaagaagagatttgtggaggatatcatgccaaagtttaccacggatgctgaggtgctcgcgatcggtgacatgttctatgctgatgttgaggaagagtgggtgatgcagcctggtggcccattggctcacaagtgcaatactttgatccagccaagtaggcttattatgctcactgcgcaacgctttgttcagacctccttggggggcaactacattgctttgcattttcggcgacatggcttcctgaagttctgtaatgtgaagaaagagagctgcttcttccctatccctcaggcagcagaatgcattcttcgaatcgttgagaaagctaacgccccagtcatatatctgtctactgatgctgccgagagtgagacaagtctcctgcaatccttggttgtgttcaatgacaggcaagtccctcttgtgaaaaggccagagcaccacaactctgagaaatgggatgccttgttatacagaaatcacatgggtggagacaatcaggttgaggccatgctcgacaagacgatctgtgcgctgtcgaacgttttcataggtgcatcaggctcaaccttcacagaggacatcctgcgtctacggagaggctggggttctgcgtcccactgcgacgaatacctctgccagggtgagctacccaacttcatagcggagctagactgagaaaatgacatcctagaagaagaattgacagctacatccccctttttttccccactacgatctggtggcatgatacacattctgtaaattggcgtgtacatcctagtgtaaaagagcgatgatatttgttgtaccggtacccccattgatttgttcggtgttgttacacggttaggcaatagaaagagtttggtttttgcgcttgctcagtgttcatactctgttatactgtgagacagcttcatagattcatagct

SEQ ID NO: 11800 - DNA, 1878 bp, Oryza sativa
  ref <308>: DATABASE ACCESSION NUMBER: AK109148
  ref <309>: DATABASE ENTRY DATE: 2002-08-28
agtgcgaacctccacagtttcccgcaagctcctggagagcaggcacgcccaccgagcccctttccctcgtcatctgtctacctaattaatccacccccagaccagaatcgcatcccggtgtcgacgcaacaaaccacgcactgcgttaccgctatcccgctctttgcactcgcctgcatcattgcccgaccccaggacgcaggcgcatagcaaatgaccgcagtcttctgaaccccggccgccgacacctccgcttcaaccaccaccgcccgaaatggccgtcgctcggcccgtgagggcgctgggcctcgccgctcttgtcatgtggttcttcttcctctaccagatcttcaagcccgcacccatatcgtcggatgagttcttcaactttgccagggacccgatgcacgaccccagcggcgaacccgaaggcctcctgcggcgcgtttcacccggatacgccccgaacgccaacccctcggagcggattaatgcgacgctcctggcgctggtgaggaacgaggagctggagggcatgctgcaggccatgggcgacctggagcgcacgtggaaccacaagttcaactacccatggaccttcttcaacgacgtcgacttctcggaggagttcaagaagaagacgcaggcggcgaccaaggcggagtgcagatacgagcgcatcccgaaggagcactgggaaatgccctcgtggatcaacgaggacctgtacaaggagtcgaccaagatcctcaaggagaacgggatccagtacgccgaccagatctcgtaccaccagatgtgccggtggaacagcggcctcttctacaagcacccggcactgaaggacacgcagtactactggcgcgtggagcccaaggtgcacttcttctgcgacgtcgactacgatgtgttccgcttcatgcaagacaacaacaagacgtacggtttcaccatcaacctctacgacgcacccgagtcgatccccacgctgtggcccgagacgctcaagttcctggccgagaacccgagctacaagcacccgaacaacgccatggactggttgaccgacagcaagcaccgccccgagcacacccagaaggccaacggctactcgacctgccacttctggagcaacttcgagattggagacctgaacttctggcgcagcaaggtctacgaggactacttcaatcacctcgaccgcgccggcggcttcttctacgagcgttggggtgatgcgcccgtccacagcatcgccctcggcctgttcgaggacgccagcaagatccactggttccgcgacattggatatcagcatatccccttcttcaactgtcccaactctccaaagtgcaagggctgcgtcaccgggcgcttcactgatggcgagaagtggctgcacaaagaagactgccggccgaactggttcaagttccacggtatgaactaaggttgccagcacgcatgccggcttctgtgttcgcctgcaacatgcttcgatctgacggctacctgcccaagccgcctatcttctcggcccggatgccacggcgcaatcacagccgagccgaggaaggcccatgtacggttttggttttctaactagagcgtgggccccctgtgtggataatgagggaaaacgcacagtacatagagatattgggatggatccaagctttggcttttgtggttttcttgtcatcctttttcggtgtaaggcgcttcatggggaatttgtcggtttgctgggcagcatgagggggggttatgacgatataaattgtagtaatttgatgcgggtgactcgacaaagcgccgacgcctgcctggccttgctgctacggaattcacgagagaggtttatgtcttatcgtagtt

SEQ ID NO: 11801 - DNA, 833 bp, Oryza sativa
  ref <308>: DATABASE ACCESSION NUMBER: AK109149
  ref <309>: DATABASE ENTRY DATE: 2002-08-28
atctcaagcagcctaatcatctccagctgatcaagagctcttaattagctagctagtgattagctgcgcttgtgatcgatcgatctcgggtacgtagcaatggcgtccaaggcgttcgctctgttcctggccgtgaacctcgtcgtgctcggggtggcaagcgcctgcggcggcagcccgtcgtgcccgacgccgacgccgtcgaccccgacaccgtcaacgccgacgccgacgccgtcggcgttcgggaggtgcccccgcgacgcgctgaagctgggcgtgtgcgccaacgtgctgggcctgatcaaggccaaggtgggcgtgcctccggcggagccgtgctgcccgctgctggaggggctcgtcgacctcgaggcggcggtgtgcctctgcacggccatcaggggcaacatcctcggaatcaacctcaacctccccatcgacctcagcctcatcctcaactactgcggcaagaccgtccccaccggcttcaagtgctaagcagcgtgcatatgcaatgcctgcatgggttgatcctacgtacggtgattagttggctttgacgactcttgatttgatttgcttgctgctctgtttatttgctactacgttacgtacgtactttgcatgcaacgcaacgcatgatcgatcgtgcatgctggctgtttgtacgtatcacggtaccagtttggattctctctgtactctctcctttgtcttctttgtagtactcttattcccgctatccgtacgtgcgcatttgttgtaagggccggtgctagcttgtgtgccggtaccaacttctaataaagctttggtttgcaacttcagat

SEQ ID NO: 11802 - DNA, 949 bp, Oryza sativa
  ref <308>: DATABASE ACCESSION NUMBER: AK109150
  ref <309>: DATABASE ENTRY DATE: 2002-08-28
tcgctacctcgctaagctaagctagctctccttcaacgccacgtcgacaatggcggaccagccgcagcagcagcagccggagccggagccggagatgggggcgcagcctcagcagcagtgggagggcgcggtggaggcgcggctgccgtcgacaccggccgccgcggcgtggccgcaccttgccgccttctgctcgctgcaccgctacaaccccggcatcgacgtctgcgagcgcgtcgccggcgacgacggcgtccccggctgcgtccgctacgtcgcctcccgcccgccaccaccacctccgcgagctaaggatggtggtgacgacgacgacgacgaccagcagccggcggccgccgccgccggggtggagacgtgggcgcgggaggagcttctcgagagggacgacgcccggcgccgcctcgtctacgccgtcgtcggcagcaacttggggttcggccgctacgtcgccaccatgacgctcgtcgacgacgacggcgaggacgtggatgtcaacgctccggcgccggcggccgccgccgccgcagggtgcaagctcgtgtgggcgttcgagtgcgagcccgtgaaggggtggacaagggacggcttgctcgcctacctcgacgccgccggcaagggcatggccgagcggatcgaggccgccgccgccgccgccgtcaccgacattgccgtagaagacgacgccgccgccgctcgcagctagaagaataaatcgagtaaacttttaattacttttcctgcttaattagcctcttctaatgatttgtttggttcatctagatatcaagtcacattttattactctttaattcatcgtgtaaaagtctaaaagaacatatattagaaggtagtgttcgtttgctagtcaatgtgtacgtggacgatggtgaaatatttttccatatgtgagactttttaggttgctgac

SEQ ID NO: 11803 - DNA, 666 bp, Oryza sativa
  ref <308>: DATABASE ACCESSION NUMBER: AK109151
  ref <309>: DATABASE ENTRY DATE: 2002-08-28
taagaagatcaatgacctttgtgggattaaggagtctgacactgggctggcaccacccagccaatgggatctagtatcagataagcagatgatgcaagaagagcaaccgctgcaagtggctaggtgtaccaagattataagtcctaatactgatgatgctaaatatgtgattaatgtaaaacaaattgcaaagtttgtggttggcctaggggataaagtttctccaactgacattgaggaagggatgagagtgggtgttgatcggaacaagtaccagattcaaattcctttgccacccaaaattgacccaagtgttaccatgatgacagttgaggaaaaacctgatgtgacatataatgatgtgggtggttgcaaggaacagattgaaaaaatgcgggaggttgtccccgcatccacgcgagcttctctcttctctcgcattcgcacccccaccttctctccacgactccacctgaagcgcctctcgccgccgccggagaagacgcgcagcggcagcagcggcggaagcggcggggagccatggcgccggagccggaagacgacatcatgaacgagaagaacccccgcccgctcgacgaggacgacatcgctctcctcaagacctacgggcttgggccatactccacaagcattaagaaggtggag

SEQ ID NO: 11804 - DNA, 1321 bp, Oryza sativa
  ref <308>: DATABASE ACCESSION NUMBER: AK109152
  ref <309>: DATABASE ENTRY DATE: 2002-08-28
aaattcagcaattccccgtctcgtgccaatctgttctttccgtcgcgccccatcgaccggaccccgatgatggccggcggcgacctgcgcagcctgttggccgtcgttgccgcggtggccgcggccatgtcgtacgttcgcttcgtggcgcgccgcctccgccctggcctgccccgcctcgccgcgttcgtgccgctgctcgccgtcctccccgtcatcccgctcgcgttccgcgcgctccatctccgcgtcacctccgggttcttcctcggatggctcgcggagttcaagctgctgctccttgcctcggggcatggcccgctcgacacgtccctcccgctgcccgccttcgtcgccatcgcctccttgcccgtcaggcgacgcgcgcagcgcgattccgagaacgccccgcgcccgggccttggcctcgtcacctccgccgtgatggccgcgctgctcgccaccatcgtgtcggtctacccccacaaggagcggatgaacgagtacgtcctgctgatgctgtactcgctgcacgtctacctcgcgctggagctcgtcctggcgttcgccgcggcggcggcgcgcgcggtgatggggatggacttagagccgcagttcgaccggccctacctgtcggcgagcctgcgggagttctggggcaggcggtggaacctgtcggtgcccgcgctgctccgccagtgcgtgagccgccccgtgcgcgcgcgcgtaggcggcggcgtcgccggcgtcgccgcgggggtgctcgcggcgttcctcgtctcggggatcatgcacgaggcggtgatctactacgccacgctgcggccgccgacgggggagccgaccgcgttcttcgcgctgcacggggcgtgcgcggtggcggaggggtggtttgctgcgcacaaggggtggccgcggccgccgcgcgccgttgcgaccgccctgacgctggcgttcatcctagcgacggggttctggctcatcgtcccgccgatcacgaggaccgggactgacagggtggtgatcgcggagagcgaggccatggtcgcgttcgttcgggacgccggaagctgggccgccgcatccgtccgatcggctttgaccggccactcctagtttgattacgacgggtcactggcgcatctctcgttcagttcacggtacaaatttgtatattgatttttcgttagatttggagctacagatttttcatgtagctttagatttatgtatatagaaagaaaaaaattatttgattagtgctgctaaatttaaaattagaaattcatgatgaattaatacaaagttatactcgttctat

SEQ ID NO: 11805 - DNA, 1513 bp, Oryza sativa
  ref <308>: DATABASE ACCESSION NUMBER: AK109153
  ref <309>: DATABASE ENTRY DATE: 2002-08-28
attatctcgtgtctgagaagccgagctgaagaatcagaggggctctgaagattctgacagctaggtttgaatcaagatgcatctcaccggccgaattgattgctgttgatcaaacgccttcttctctgacgaaatttctgatcgatgctttggtagtcggagaagttctgcggcggcgatgcagtcggaggaggtgaaaatgcggttcggccggtgtccgtactgccgcgccatgatctaccagaaccccaaggccgtcatcttctactgcagcagatgccgcactccgatccgaggcaagaacccggagccgacggatgaggcggagtacgcgctgagcaggctggagatcctctccgccgacaccgcgtcggtgttctccgacgagccggaggacgccgggtcggaccggcgcgccgacgaggtccggccgttgtcgaggcggacgaggcggccgtcgagctcgtctgactggacgacgacgacggattcggagcggagcgaggaggcgttctacacgccaaggaacgcgcaggaggggcggccatggcagtcgccgtcgccggtgagctcgcaggagctcggggcgtccggtggtggtggtggcttgcctcgacctcccgatgagccaggcgccgtcgcggcggcgcgcctgatggacccggcgtttcacaaggagctcctccacgcgctggacaacctccgcagcttgatcgtcaccatcgagcagccgcgcccggcgagcggcggcggcgggagggccctgacgcggcgcgattcgcggctcttccgccggctggagtcgcagctggagcgggcgcttccgccgcaggacaccgcttccacgtcggcgtcgtcatccagctgccgcggcgacggcggcggcgggcgtccgtcggcgcccgcgcggcgggagggcaccgacccctgccgcccggtcctgggcggcgcgccattcgtgatctgcggcaagtgctcggagcttctgcggacgccgccgccgccgcggccacggaggaggaggtggaccaccaggatacggtgcggcgagtgcaacgaagtgctcgagctgtcccttcccgccggcggcgtcccggctcagcaccggccgatcaggacgtgctcggcgccgctggtctccgaccaccaccggccactgccacgacggctggagtgaggcgaagagcgcgcacggtggccatgatcgatttgttgatggagggctcactgctgagctgaaagggggaaaacctcacgctaagatggatggatgggattgaggttctccgccatcgaatgcacgttgcctttgtcattaacatgtgggctcaggaatcatcgggctcacatgttagtgacaaagtcacatgacttcgacctcgaaggatgctgatctggattgttgatggaagttttgaatagttgtttttgaagaatgattttttttctttttgttattattagtcgctaacccagacgttacaaatgctacgaaattggctatttttgaagc

SEQ ID NO: 11806 - DNA, 1192 bp, Oryza sativa
  ref <308>: DATABASE ACCESSION NUMBER: AK109154
  ref <309>: DATABASE ENTRY DATE: 2002-08-28
aaaaaccgcaccaaaccatcgagctcagccgcggcgcgcgcgcggcgacaccaccaactcgctggctcggcgtcgatcgccattgcttgatcaagctcgatcgcgatgagcggcggcggcgcgccgcctggggcgccggggatgatgacgccgggcgacggcaactccgtcggcatgttcagctccgaccgcatcggcgggttcggctacggcgtcggcgtgtccgtcgggatcctcctcctcatcaccaccatcacgctcgcgtcctacttctgcacgcgcgcgcccgtcaccgcggccgatgcagcggcggcggcgggatcgtcgcggcggcaccgcggtgggggtgggggcggcggcggcggcggcggcggggccgggcacgaacacgacgacgtcgagctcggcatcgacgaggcgacgctcaaggggtacccggaggtggtgtacggccagccgaggaaggaggcggcgaaggcggcgtcggcggcggcgacgaagaagggcggcgcaaccacgtgcagctgctgctcgatctgcctcgacaactacggcgacggcgacgtgctccggatgctgccggagtgcggccacctgttccaccgggagtgcgacgacccgtggctccggcagcatccgacctgccccgtctgccggacgtcgccgctgccgagccccttgccgacgccgctcgccgaggtcacgccgctggcaatggcgaggccgtcatgacacgtggaggttctttgcttggttttcattttttaaaatttttttcttattcatataaaactaaacttgaggatgaaatttgtgtattctgcaaaatggaatgcataaaagaattcctcaagatagggactagaaatttcctcttggtaattgggtgtaaatttgggttcagagtagattttcttttctgatataaacaaagtttggcataggattctctttggaattaggattcactttggatttttggagggagattatgtatggattacaaatttggatgaaccttctagagatctaatttttatatcatcaagcttagtgcagaagaacgaagatgagtgtaaacaaagtaagaagtaggaacatatttgcagaatgctttatatatgtaaaattctatcatgaatatctgtaaaattgaagatgcacatttcaaaaggaatagatccttttaatt

SEQ ID NO: 11807 - DNA, 1275 bp, Oryza sativa
  ref <308>: DATABASE ACCESSION NUMBER: AK109155
  ref <309>: DATABASE ENTRY DATE: 2002-08-28
ttcattcttcgtcctccctctctctctcccccctcatccctctctttctcaccccctttctcctcccctttggaggaacacaacgagtagggacccagccgccggcggcggcgggcaggggccggggcggcgccggagctgcggaggaggaggaggatggactggtcgaaccttggcggggaggggccggtctctcatcgccgagcgcgtggcgggcttccttcctcggcggcagtggcggcggagcgtgcggaggaggatggattggtcgaaccgcttccttccccggcagtagcgcagagtagcgacgccgtttgccgcccgccgaccccgcccgagatgctgtggtgggaaaggagtgtatggaggcggagtaatgttcgcggcggatgaggagctcgagctccgcgacgtagaggggcgccgccgccacagctggggacgcgcggtgcagagcgctacggagtccgggagggaccgacgggcgggaggatgcgatcaagctcgtcgtcctcgccggagggggccatctcatcgggtgaagcctcgtcgcagaagttgccggcagaccccgtcgtcgtcgtcatttatggaggcatccaacgaagctcacggctatcgccgccactcccgcctctgccgccgctggttcccgccgcatgccgggagagacagacccacatgtcgcgcgcgccgacggctcccttgttagaaattaatcttgttgtttcttaatttcagcatgtttatctatacgcatgtgtgtattgcatggcctggcgagctagctatatgtacgtgggtgctgcatggcttagtgagtagtggttggcagggagtagtgagccaataaagagccaggagatgagagcacatgtatgtagcttagttagttagccatgcataattgtgggctagtgattagccgagtcttgcacaagattaggagtaggaagtggtcagtttgcatgcatgcaggttagttggttggtgcaagcaacgacgtcggcgaggactcagtacttgtgaagttgcggccaagtaaacaggacgtgggcgtcgtgtgtggctcgagaagcggaacaaccagcttcgtgtgtgtatgtgctgtgctcattgtaatcatttagttaagagaaaaaaccagtgaaaagggcacaagttgttttggtgccgcaaagatcctgtgtgttcgcttctgtgtttgtgtttcttcctcgctgcctcgttcagaaagtgtagcttgtattcgcgtgagttgctttgattcccaac

SEQ ID NO: 11808 - DNA, 889 bp, Oryza sativa
  ref <308>: DATABASE ACCESSION NUMBER: AK109156
  ref <309>: DATABASE ENTRY DATE: 2002-08-28
atagaggaacaacgaaagatcaagagagagagagagaggcgaaatcaaggcccttttcttttcttgcgatttccaccatcgccgcccaaagcaaaagattagataagcttaatccccacaaaattataaggattgttagacaggaggagtaatcgatcagagaggggagagggaagagagatcgatcgatgaagtcgccgttgctgaggctgaagggcttcggccaccaccagcagcacagggagaggaagtcgcggcagccgcagccgcagccgacgccggccaagctcgacgagctcgccgacgccgcccaggtgcgcgagtccatcgacttattgattaattgattgatttattgatttcttcctctcctcctcccatctatctcctgtttttttttttttttttgggatttctgtgatcaaatcggcgtcaaaatcggatcttgggaggagccctatgcgaaattgcgatttttagccaccccccgcgttgttttccaggtggagtgcgctgttctttggttggtgcactcgtttattgattaggtgtggatgctcaaaatgattttactactagtagtattttggttattcaatgcggctggaggaacagagctcgaactgtttaaatagaaattgatccatcaattttcgtttttaattattttctgatggtcattggtggtcgtttagaataatcaaagctttgaacttgccccgtgttgattcaagcgtgcagaaggactaaacttttatttaatccaaaccagggtgtgaataaccgccggaaaccgcgcggttaccgcggttaccgcccgtaccgcgggggtacggttacccgtaccgcgcggtacggtttaataaaattcatccaaatttaaaaattt

SEQ ID NO: 11809 - DNA, 1032 bp, Oryza sativa
  ref <308>: DATABASE ACCESSION NUMBER: AK109157
  ref <309>: DATABASE ENTRY DATE: 2002-08-28
cttgcatcaggtgcccagccgtttcggttcaggaacggcgggttcaacgggaagccggtgagcgcaaggcgaagagcctcgcgcaattccggcgctgcccccgcaacggtcagcgaggagcgtgctgcacgacacgccactgtgcccctctcgggcatgggaaggcgcggcaggcttgccacggtggattcgtccgccgcggccactcgcaagcccggataccggcctgacgcaatgggagccggcgccgcgggggtggcgcgcgggcggcgtcggggcctgtccgtgcccgcaccgcgctgcgcgcgcctcttcggcctggctgtgttcaggctggtccgcacggggtgtgcggctggaggttctctcttgcgttccgtttccaccattcggccggcaggcgctgccgcgctgctgctgtccttcgccctcgcgcccgccgcggcgcagatgatcgtcatcaccggcgcgcgcgagccgctcgccgtcgagcggctggcggccgacgtcgtcgtcatcgacgccgacaccatccgcgcttccaccgccgactcgctggccgacctgctgcgccgcgaggccggcgtgcagctgtcgcgcagcggcggccccggccagagcagcggcttcctgctgcgcggtgccggcaccgcgcagacggcggtcttcgtcgacggcgtgcgcatcggctcggccacgctcgggcagccgtcgatcgagtcgatcccgctgtcgagcgtcgagcgcatcgaggtgctgcgcggccccggctccagcctctacggcgccgacgcgatcggcggcgcggtgtaggtcttcacgcgcgaagccggtcggcaggcgcgtgtcgacgcccatgcggcgctcggcggccatggcagccggcagggttcggtcggcgccagcggcggcggcggcgcctgggacttctcggcctcggtcgcgcgcgagcagagcgacggcgtctcggcgctgcgcccgaacgacgccttcggcaacttcaaccccgaccgcgacggctaccggctcgac

SEQ ID NO: 11810 - DNA, 1145 bp, Oryza sativa
  ref <308>: DATABASE ACCESSION NUMBER: AK109158
  ref <309>: DATABASE ENTRY DATE: 2002-08-28
gagatttcgaggcccatgttcctccgcgcactcgcatctctcctcgaccggaggctctcggcacgcggcgcgcaggcgcggcgatcggcggcggcggcggggactaggccagcgaagccacgcgctctccgcaccctcagggatctcggcgtcggccatggcgccgtaaaaggtgctcttgccttgacgagttcgttggctggattgctgctcggattcctctatttcaagcaagatagagatgactcagcttgggagtataccaggaaggaggaggagaccgtaaagtggagggacgtggtcgagccatccgtcatggcaaggttcacaaggaaagatggcaccttcgcctatcctgagtactacggttacctccgcgttcagatgaacggggggaaaccaaactatgaccagaaatgttccgacaaggtggaggaggccatcgtcgatgctgatgccgccgacacagacgaggatggcaacaacgcggtggatgagccagccatgaaggcaaaattcgaagactggatgaaggagcatggccggatatacataaccaagaaagagaaggctcatcggtatgagaatttcaagaaggctatgaagggcatcaacgagttaaacatcaagcgcggaatgcgaagccctttagctgcccctaccgaattagcggactacaccgatgaagaggttgagcgacttggtatcactatggctgatgattcagactgggatgagtaccttgatcacatccacactgcgattgctcggtatatggctactataaagaggatcagatcttttgttttggaagccagcaattatattttaatctatgtgttcccgtgataaatgctgctttagaattagcgaattagcctttcgatatccaattggtgaaaattgttctggctattggtcgttatattcgagaagcagataccaactagtttgatctgatattctggctagttgtaagtcatcattgcacagcaatcataggctcatagcgaagtagaaactgtacagtaattagtagatgtgaataacacttgtgctgtttggattttgcctcagtctttgtagtaccatagtctaaaatcctaaactgcagctccaaatgcaaatgatctacttttactgtg

SEQ ID NO: 11811 - DNA, 1476 bp, Oryza sativa
  ref <308>: DATABASE ACCESSION NUMBER: AK109159
  ref <309>: DATABASE ENTRY DATE: 2002-08-28
aggcacctcacattacattatcccctccaccccgccagatgcccgctactacgcatcgacaaatcgacacaacatggggatggatcaaccagctttcgactcatatttctcacaaacaatgactaccccaaccatgatggcctcggggcccatgacccctcccacatccgactcagtccccaccaccatcaagatggaggacctccaggtccccttcagcacaccttcaccggcacccacatcggaaggctcatcatcacaatcacaagcaggctcgacgcctgcacccaccacctcagacgccaagccggtaaagaagcgaaagtcgtggggccaggtgctccccgagcccaagacgagcctgcccccacgcaaacgtgccaaaacagaagatgagaaggagcaacgacgcattgagcgcgtgaagcgcaaccgcctcgccgcccacaactcacgtgagcgcaagcgacaagagtacgaggtgctccaggccgagaaggaccagatggaatccgatctccaggcctacaaggagaaggtctccaagatggaggctgaactcgccttcttccgccaaaagtaccctggcgaggctcccgagtccctcgtcttcgacctccccctcacaaacacaaacaccgacaccatctgccccgcgcggacctcggcgtcattccctagccctgtctccatggactctatggattcaccccgcgactcatcatgtcaacctgagacgccagcctcgtcatttgaggcgcccactcccgaattcgactcgacacaatatcctgccgtgatattgtgcgacctgcagtgtcggtcggattcggtttcaacagtgggctctcccttggcggcgatcttggcctatctcactttgttcaacctcaccctacagtcgacgaaaagcctgttgtcctcgacaaccttttcgacttcgaccagttccctgaaggctctccagcttcaatggaaccctctttcggcatggctgaatctcatgtcgatatttttggctcgaccctcttcggccacagcccccactcagccacttttggctttcctgacggctttgacgcaaagttctcagacttgcagagtgcctctggcgcaacttcggttagcgacggggctctcgcagctgagctctagcgacgatactgtcaacgaaaggtccagtaaggggatgagcgaggctgggcctgttgacggcgtccttgaatcacgactaatgaggtctccttggcttagacaattaggggggcgtagaacatcactggtacaggaaaatatgggctgtaggttaacaaggcgtcatacggagtcgcgagggatggtttcagtgtagcaacagcttctttttggagatggtttttggtaatgccttctaaggaggcttttgtggcagacaagatagttacaccaagggctggtgcctttcatgcagtccaatacaaccatgatcattcttcc

SEQ ID NO: 11812 - DNA, 1304 bp, Oryza sativa
  ref <308>: DATABASE ACCESSION NUMBER: AK109160
  ref <309>: DATABASE ENTRY DATE: 2002-08-28
attttttaaatttaatataaacttttttgtaaaaataatataaaccgtaaatatatagcacttgaaaataaaaatgaagcgaattttatgtttgttggcattcgcaacgatcctatcgttggcgacatcgactaacttgtcgtctctcgtcgacaagctgctcgacaccgagtggcatttgttcaagaagcagcacgcgaagagctacgagagctcggaggtcgagctcgtgcgtcgtctcatttgggagacgaattggcgattcatcgacgagcacaacttggagttccgacaaggcaagcacttgtacacgctggccatgaacaaattcggcgacatgaccaatttggagtttgcgcgcacctacaacggcttcaactcgagcaagacgatgcgcaaagtggccggtcgtccgttcgtgccgcccgcgaactttcgcgcacccgactcggtcgattggcgcacgcagggctacgtgacaccggtgaaggaccagggtcagtgcggctcgtgttgggcattctcggccgttgcgtctctcgagggccaacacttcaaggccgctggtcagctcgtctcgctctccgaacaaaatctagtcgattgttcgaggaaacaaggcaacatgggctgtgatggcggcttgatggatcaagcgttcacgtatatcaaagtcaacaagggaatcgacaccgaagactcttatccctatcacgcaatcgatcaaaagtgtcagtttaatccggcaacagttggcgcgaccgatacgggcttcacggacgtgacaccgggcagcgagagcgatctagtggccgcgatcgcttcggtcgggcccatctcggtcgctatcgacgcctctcaatcgagctttcaattctactcgaagggaatctactcggataagtattgctcgtcggaggcgctcgatcacggcgtgacggccgtcggctacgggtcgctgggcaccaacaaggactactatatcgtgaagaactcgtggggcacgtcgtggggcgaccagggatatattttgatggctcgtaacaagaacaatatgtgcggaatcgcaacgcttccgtcatatccgattgtataataaataaattacataataacaacaacaacaacaaaaaagaaaatgcgcacttgaaaaataaaaacaaaacaaaacaacaaaaataaactctaacatttttgttgtttttgttgtctttattgatttttttttgttttgttttagtgttagttttatttttaaaatacatttttgttgaaattcaaataaataaaaacatatacactat

SEQ ID NO: 11813 - DNA, 1606 bp, Oryza sativa
  ref <308>: DATABASE ACCESSION NUMBER: AK109161
  ref <309>: DATABASE ENTRY DATE: 2002-08-28
gtattgaactcttctcagctcaaagccttacaccacaacacgcagctgttctcgctgggcttctcttcttgcgctgcggtgatcgatcgagagcttgggatggcgctgctggcgcggagggcgcggaaggcggtgatggcgaaggcgccggcgccgctgctgcagaagaggggtggcggcgcggcggcggagctggcgatcccggcgcacttccggtgcccgatctcgctggacctgatgcgcgacccggtgacggcgccgacggggatcacgtacgacagggaggggatcgaggcgtggctggacaccgggcgcgcggtgtgccccgtcacccacgcgccgctccggcacgaggacctcgtccccaaccacgccatccgccgcgtcatccaggactggtgcgtcgccaaccggtcccgcggcgtggagcgcatccccacgcccaagatccccgtcacgcccgtgcaggcctccgagctgctgttcgacgtcgcggagtcggcggcgcggcgcggcgcggcggggcgcgccgccggggcggtcgccagggtccgggcgctcgcgagggacagcgagcggaaccggcggtgcttcgtgtccgtcggcacggggcgcgtgctggccgcggcgttcgagtctctcgccgccgccggggaggcgggcgttctcgaggacgtcctggcggcattggtctgcatgatgccgttggacgaggaggcggccagggtcttggcctcgtctagctcgatgggttcactcgtcgccattgccaagcacgggagcttggccggaaggctgaacgctgtgctggcgatcaaggaggccgtgtcgcgggacggagcgttcgtggacctggcggatgacaaggtcgacaaggtcgtcgacgcgctggtcgtgatcatcaaggctccgatctgcccgcaggccaccaaggctgccatggtcgccacctaccacctggcgagctccgacgagcgcgtcgctgcgagggtagcatccacggggctcgtcccaacgctcatcgaggccctcgtagacgccgacaagagcgtgtccgagaaggccctggcggtgctcgacgcaatgctcgcctcggaggaaggccgcgcgagcgcgcggggccacgccctcgcaatgccggccctcgtgaagaagatgttccgcgtgtccgacgtggccaccgagctcgccgtgtcggcgatgtggcggctcggctgcaaggcctcctccggcgacgaggaggccgccgcgacggggtgcctggtcgaggcgctgcgtgtgggcgcgttccagaagcttctcctcctcctgcaggtgggctgcagggacgcgaccaaggagaaggccactgagctgctcaagatgctcaacaagcacaaagggttgggggagtgtgtcgacgctgtggatttcagagggctcaataggctgtcatgaattgagatcagtgttcagaatcattgtaaaaatagttgcgagcagctaggaaatgcagattgtaaaaatagttgatggggatttttgcggatgtgctttccatgctagattgtaaatctaattgcaaaaacaagtttcctactttcctcactgtaaatattttgcatgt

SEQ ID NO: 11814 - DNA, 1944 bp, Oryza sativa
  ref <308>: DATABASE ACCESSION NUMBER: AK109162
  ref <309>: DATABASE ENTRY DATE: 2002-08-28
actaattaatatttttaataatatacgaaacgacgctaagcctaaaaaagcttaaaaacttgctactctatataaaaaaagactaattaacaaaaagagagaaaaatgagagaaatcgttcacattcaagctggccaatgcggtaaccaaatcggagccaagttctgggaggtcatctcggacgagcacggtatcgacccgactggcacctaccacggcgactcggacttgcagttggagcgcatcaacgtgtacttcaacgaggcgaccggtggcaaatatgtgccacgcgccgtcttggtcgatttggagccgggtaccatggactccgttcgttcgggcccgttcggtcagatcttccgcccggacaacttcgttttcggtcaatcaggcgctggaaacaactgggctaagggacactacactgagggtgctgagttggtcgactctgtcctcgacgtcgtccgaaaggaggccgagtcttgcgattgcttgcaaggatttcaattgacccactcgttgggaggtggtactggttcaggtatgggcaccttgttgatctcgaagatccgcgaggagtacccagaccgtatcatgaacacattctcggtcgtcccatcgccgaaagtctccgataccgtcgttgagccgtacaacgccactttgtcggtgcaccagctcgtcgagaacaccgatgagacgtactgcattgataacgaggccttgtacgatatctgcttccgaacgctcaagttgaccacgccaacctatggtgacctgaaccatttggtctcggccaccatgtcgggtgtgaccacctgcctccgattcccaggtcagttgaacgctgacttgagaaagttggccgtcaacatggtcccattcccgcgtctccacttcttcatgcccggattcgccccactcacttctcgaggcagtcagcaataccgagctttgaccgttccagagctcacccagcagatgttcgatgccaagaacatgatggctgcgtgcgacccacgtcacggccgctacttgacggttgctgccatcttccgaggccgcatgtccatgaaggaggtcgacgagcagatgttgaacgtgcagaacaagaactcgtcgtacttcgtcgagtggatcccgaacaacgtcaagaccgccgtttgcgatatcccgccacgaggtctcaagatgtccgctaccttcattggcaactcgaccgccatccaagagctcttcaagcgagttagcgagcagttcactgctatgttccgccgaaaggctttcttgcattggtacaccggagagggtatggatgagatggagttcactgaggccgagtccaacatgaacgatctcgtctcggagtatcaacagtaccaggatgccaccgctgatgaggagggcgaggctggcgaggaggaggccgaacaagcttaaacttctttctttccccaccctacttttcttctttctttttttttctcaaaaaaaaatactactacaaaatttctattattttttattctcttatctttttaactttctttcttaaaaaggaaaacaacacaatatatggacacattaaatacatattttatatacttatatatatttagtaataatcctgttttattatatattatcggctactcaatatattatatagcgtgcgcgattgattgatattttatttcttattttttagaattaaacaaataaaagagagtgatatgatggaatattttactacttatattataaaataattctaatattataaattctaattctaataatatatacaaatatattctaatataataaataataaattcgtttttatattcagtcgttttttattattgttctctctttcatctctcaaaaatcaaaattttttaaatgaatatgtttcaaaataaacaaaatgtgacaattttt

SEQ ID NO: 11815 - DNA, 769 bp, Oryza sativa
  ref <308>: DATABASE ACCESSION NUMBER: AK109163
  ref <309>: DATABASE ENTRY DATE: 2002-08-28
gacgaaaaaacaaagccgaaaaggggaagaaagggggggcttcagcgagagctcatcttcttccttccttacctacgtgcgattcctcttctcttccgcgccatttcttgatccccgtcatggcaggtgatattgtgacggccattgttttcgcgctggccgccgcggtgctgggcggcccggaggcgctccgcctgttgcaggacgtcgccgggaagaaccccgccgccgacgtcgccatcatcgtcggcgccatctgcgccgtcacctccgccgtgctcggcgccatgctcctggtgcgcttcatccgcgtcgcgggcgacgctcctgaccgggccacggagcgcttcgcgcgggtgaccctgacggtggccttcgctgccatcttcctcgtcgccggctgcctcctcgccgcccccgccgccgacaagttcgccagctccgcctgacgcgcggggggcgcgcgctcggccgcccggcggattcgggcgcggctgcaactacgagaagtcgagaagctgcccgcgccgccgacctgtggtgcgccgtgcgcggcgagccccggtgctggtagcctggtacagtggtactactcgacgttttactacggctccatcatctgtgtgtgtgtgtgtttttttttttttgctgtttttctgtggtagtcttgtgatgttaatttgcgaatgtgagtgatattctgagatcacttgatatgattcttgaataagctcaatcaattggaacagagttataggattttgtgaag

SEQ ID NO: 11816 - DNA, 895 bp, Oryza sativa
  ref <308>: DATABASE ACCESSION NUMBER: AK109164
  ref <309>: DATABASE ENTRY DATE: 2002-08-28
aaaagcatcaggggaattgcagttgatctcggtactagaattatcatcagcgagattaccccagttcgtgttaattaattagcaggtactagcgaggttgcagagatggccgaaaccctgaagcccgtagccttgctgctgctgatactcaacctctgcatgtacgtcatcctcgccatcatcggcggctgggccgtcaacatctccatcgatcgcggcttcatcctaggcccgggattgcggctgccggcgcatttccacccgatgttcttcccgatcggcaactgggcaacggggttcttcgtcgtgttctcgctgctcgccggcgtcgtcggcatcgcctccggcctcgtcgggttcagccacatccgccactggaactactactccctgcagccggcggcgaccaccggcctgcttgcctgggcgctcaccgtccttgccatggggctggcgtgccaggagatcagtctcgacagacgcaacgcgaagctgggaaccatggaggcgttcacgatcgtcctgacggcgacgcagctcttctacgtcctcgcgatccacagcgggagccgcggccccgtcccggtggagcggacacacgccgtggcggccggctactgatcgatcgccggcgattcgattcgatcggcgtacgtgcgtgttggatggatgggcatcgccattgtgcaaaggtgaagacgcagacgtacgcacgtaagggcgtaacaagtattcaaacgggggccatgcatgcatgcctgtcacgattcacgcgcgagttgtggtttgtgctttaataatttccttttgaaagtacgattctttgagtggaactggggtgatgaaatggtgatgattcgtttgtactggaatattcctttggatttgttgattg

SEQ ID NO: 11817 - DNA, 556 bp, Oryza sativa
  ref <308>: DATABASE ACCESSION NUMBER: AK109165
  ref <309>: DATABASE ENTRY DATE: 2002-08-28
aacaattcaacattcaatcgtccatgactcatccgcacggaatggagagcaaaaaccaccaaaacaaacatcacatatccacatcctccatgtaacctccaccggcgcatccttcttgaacagaaaatcaccagccccaaattaaacagttcatgagtgaatcacccccaattgttgagccaaaccaaagcagcagcagcagcagaagcatcatccgtggatgagctagggatgaagggggggaatcgagctactcacggttgagctgtagcctctcggatgcgacgccgccccacaccagggcgccgaggctgccgttcccgatgggcgccgcgtccgtgaagtacctcgacggcgacgcaaacaccacctccagcggccgcgcctcctcctccgccgtcggccaccccgccgccgccgccacggcctccgcctccgccggccgccgcacccacacccactcgccgtcgccgtccatcgggaacgagccgagccgagccgactagccgacgagcccccgcagcctgtagcggcggagcaaacggccacaagttat

SEQ ID NO: 11818 - DNA, 580 bp, Oryza sativa
  ref <308>: DATABASE ACCESSION NUMBER: AK109166
  ref <309>: DATABASE ENTRY DATE: 2002-08-28
acacactcggcggctgcggcggaggcggcgggagggaaccagcgatgcaggcactggcacgggcggcgcgggggatcctgccggcgacggcggcggcgcctgcggcgcgagtgcagcaggcgcgggggattgtggtacatgtgaaggacggcaacctggagcgcgcgctgggggtaatggcgcgcaagatgcggtcgagcggcatcgagaggctgatccgggcccggagccagatccaccaccacgtcaaggactcggagaagcgggtgctcgcccgcaaggccctcatgcagcgcgtccgctcccaggagctcggcaagaagctccgcgacatcctcatcaagaagatcaggggccagtgagtgcatatttcttgaggtggcaggaggattaccggtactccatggtcattttaatccatacccagcggtgaactgtaggaaatgaacggatgttttcttatttggatccattcatatataaaaaaagaactcccacttttgctgtcttgtatcaaaaaagtggtaaactgaggattttatcatggcataatatttagtatctctgattggactatttg

SEQ ID NO: 11819 - DNA, 422 bp, Oryza sativa
  ref <308>: DATABASE ACCESSION NUMBER: AK109167
  ref <309>: DATABASE ENTRY DATE: 2002-08-28
ggataagaactgatcatgactgttggatattgagatcatgttgtgggttctaacagagtagtgcttgtaagtaacgacggagggagtatttaaaaaggctatctttcttggcttttgcatatgggatgcatttctgttgacggggcatgcactgcaatcagtccggctctcaacttttcatggtcaacaacctgacgacacaattgtgtgactagagaagcgtgttagtgggtagaagttcaaattttacccgtgctaagttgtgttggttgataaatgattgttttttttttctcaaataagactgttagtttgttgccgtcttgcagacttgtacttttatcatccccctgcattaggaaagggtgaataaacatctgtagtaatacataaaatgaataatcttttcaggggtttcgttc

SEQ ID NO: 11820 - DNA, 556 bp, Oryza sativa
  ref <308>: DATABASE ACCESSION NUMBER: AK109168
  ref <309>: DATABASE ENTRY DATE: 2002-08-28
acagccaccgcctcccccaccccaccccgatcccctccccgccgtacgggcgcagaaggaacccgtcttctagaaggaggaggagggctacctctctctctctctcttctgccatggggagcttcgcgaggaaggagcaccagttcctcgccgagcttggcctcgcgccgcggaaccccgggtccttcgcctgcggcgcctggggcggctcgggccccgtcgtcacgtccaccaacccgacgaacaaccaggcgcgtctccccccacacgatccgctcggttctaggcgctcgatttggtttgggccgccctggcatttttggggtgtgtgtgattgtggtggattttgatgggggatttttttttgggtgttttgtggtttaggtcatcgcggaggtcgtggaggcgtccgcgcgtgagtacgaggagggcatgcgcgcctgctacgatgccgccaagacctggatggcggtgagtttcacttgacttgctgtgttggagtgctgatatcaattcgtttggatgatgaagtgctcgtactatgctcttgtgtgtc

SEQ ID NO: 11821 - DNA, 689 bp, Oryza sativa
  ref <308>: DATABASE ACCESSION NUMBER: AK109169
  ref <309>: DATABASE ENTRY DATE: 2002-08-28
aaaaaaccctagccgccaccctcccactcacccccaccgccgccaccgccgccgccaacccccaaccatgcagcgcgccgcctccctcgccctccgccgcctcgccgcggccgccccacgcccaccaccggcgcatctcgccgttgggcccgccgctccccgcctggcagcggcggcgccgccatccgccgccgtggcgcgctttctgctccaccccgcgggcgcgacccccgcggcgctgcacgcgcggagagggtacgccgccgcggggcggaaggcgaaggcggtgagcgagagcgaggacgaggacgaggacgatgagtttgaggccatgggaagcgacggggagttcgacgacgacctcgacgaagactccgacgacgacgacgaggtgtccggcttcgaagatgacgacgacgactgcaagcccgcgaagaagcgtgggaggcactgaatcgctcacctcggctcggctcatgtattgtttgtttggtttctcaccgatttctttctttagaatcgaagaatgaattcgagatagagcgaaaggaaaattaaacaataattagtagtaataacatgggaggtgattgggtttatcatgttttgaagcagagaattgctgtaatttttttttgttcctttgtctgaaggagaccgaagctatccgagcatgtcaacttcgtaat

SEQ ID NO: 11822 - DNA, 927 bp, Oryza sativa
  ref <308>: DATABASE ACCESSION NUMBER: AK109170
  ref <309>: DATABASE ENTRY DATE: 2002-08-28
gatttccagcgccgccgcccgccgcgccgccttctctcgcctctagggttccgccgttttccgcggcgcgccaccgccgccgcggcgccgcccgtcaccgcaggagccggcaatgaagcgtccaccgccacgcgaagacggcgctggaagcggaggaggagacggggccaagaaagggaaggggaggtggggcggcggagggaggaggcggaacgagcagcggctggggagcggcggcggcggcgccctgtccctcgccgccttcgcctacgccaagtccaggaacaccggctacaacccggccctcatcaagaagcagaaagagttctacaagaatgctaaattgattagcaagtacaagaggtcaaagaagcaacaaaatcagtcaagcaatcctccaccatttccaattccaaaggaaggaggtgatgatgcaaacaatgcatcaaagctgcatagcaagaagaagaagcgcgttgcaccaagcttaaacgaagagtatgagaaaaaacgggcagaggatgagaaggcaaagaaggagcgggaagcgataattcaggcaaagagggaggagcgggagaggtctgaagcaaggcggagagatttaagggagaagatgttcaagaaaacaagatctgggcagcctgtgatgaaatacaggatccagcatctgttggagactgcattagaaagctcaaacaagtaaatgttgctacaaaaatgctgtactgattgctataagcaaattttgtagatcaatgcagtgacctgtttgtttcaactggcttctgtaactctagcactctaccatgtaaatctttggtgattttcatttccatgctgatggtgcacgcacttttggtttctctctcatacgatgcaagatgattggataataaagaaacagagatgactggattgccagtg

SEQ ID NO: 11823 - DNA, 739 bp, Oryza sativa
  ref <308>: DATABASE ACCESSION NUMBER: AK109171
  ref <309>: DATABASE ENTRY DATE: 2002-08-28
aagccgcgcggatcgatcgcttctagaagcttccgcctccgccgcgggccatggacgcgcgaggaggccaccaccgcgacgaggaggaggaggcggccgcggcgccgctcctcgccggcgccgcgccgttgggttactcgggccaccgccgtagccacgccggcgacctgcacgtcctctccgccgcgttcctcttcgtcttctccgcctactgcgccgcgcagaacctcgagagctcggtcaacaccgagggcgacctgggcacggtgtccatggggattctgtacacctccttcacgctcttctcggtggccgcgtcgcccgtggtcacgtggctcggctccaagcgcgcgctcgtcgtcggcaccagcggctacgtcatcttcatcctcgccaacctcgtcccgacatggtgcgtgcggccgtacgctcgccttcgcctacggatcccatggttttgggttttgacgccttcgcctacggatcccatggttttgatttttgacatggtccgcatggtatcgctggtgcctaattgggcgtgctggtttggatgcctcacgcctgtttgatgaaatgcctagctagaccgtgttgatatgatgctccttttgctcagacacgggtactactgttgttaatcgatcatatggttttaatttggcggtgcagtgtagctcgtctcaccagtctactgtaagtgtttggttgtgcacggaatgcattttcattttctgat

SEQ ID NO: 11824 - DNA, 707 bp, Oryza sativa
  ref <308>: DATABASE ACCESSION NUMBER: AK109172
  ref <309>: DATABASE ENTRY DATE: 2002-08-28
ggagagaacgtgacctagccgcctcgagcgccgccgccttgcggcgcaccgtcgccggcgttgctccccagctccgctcgcgttgaagccacctcgccaccgcacgcgtcgccccggcgccgcttcccctgcccggcgtgcgccgtcgacaccgctgccccccccctcccctcgcgcgctccacgaccgcccggagacacgggcggggatggtgtcgtcgatctcgatgtaccgcgggaacctccaccgggccggggccgacaccgaccaccgctggccggcgccgcgccccaccatcaccccgtcgcggttccgcagcctgctccgcagccgcactctctccctcgcccgcctcgacggcgcggcgcgggccgactccgcggcctcctcctccacctcccgtctcgcggatggagacgcgggggtggacgaggaggagcaggacgaggaggggatggagatggaggaggaggaggaggaggagcaggagcaggagcaggaggaagaggatgggcaaaatgagcagcaaccccaagaggcgggggaggaacaggatgagggggcagtggaggatgctgatatggatgatgccggagaggtgctcgtcggaggtgaagatgcccatggcaatggtgatgctcaagaaggtcaagacgaaagcgaaggcttcgatcctaatccagaggggagttgtcttgatgtaattg

SEQ ID NO: 11825 - DNA, 556 bp, Oryza sativa
  ref <308>: DATABASE ACCESSION NUMBER: AK109173
  ref <309>: DATABASE ENTRY DATE: 2002-08-28
accggatccaattaagtgtcatctcctccacaaattaaaggtatgtggaacagcagcggtagatccttcagcggcagcagctactccaattcctccactgacacctacggatcaggaggacggcagcagcagcagcagcagcagcagtatgaagcggccgccgccggcgacaagacgtcggcgaagcgccagccgccgccgccgtcgcgcctgaagaagaccagcggcaggaacgacgacgccgccaccgccgccgtcgtcggctacgcagcatccggcggcggctacggcggcagcaccaaggccaacgccggcgctaactacggtggtggtggtggttacggttacaacggcggctacaacgccggcagcgtcaccctctacggcgccggcgtcggtactccgtactacggcggtggcggcggcggaggttacaccggtggtggatccgtgccgtacggcggcggcggcggcgtgccggccgggtactggactccccagaacggcgcgaggtcgccgctgtacatcaacactcgcgaggtccacgtgtacgggg

SEQ ID NO: 11826 - DNA, 1008 bp, Oryza sativa
  ref <308>: DATABASE ACCESSION NUMBER: AK109174
  ref <309>: DATABASE ENTRY DATE: 2002-08-28
attctcccatcgcctccctctctcctggtggcttttcctctacttcgccactccaccttccctttgcctctccccatacatagcagcaaccgcttcgggtggtcgaggtggaggtgactggctttgggctgcaacagcggcaggcttgggcggtggcggccatgggagtagtggatttgccgctagaggcaataggaggtgcggatccattggcggcggccttgggaggggcggatccgcggccgaggaggtcggggacggtgatgccggatctaccgctagaggccatgggaaggcatccaccggcgggggccttgggagaggcggatctgccaccggggaggacggggacggtgatgtcggatctagcactagaggctatgggaggggccgatctgctgccgaggaggtcgggcacggtgatgccgggtctaccgctagagaccatgagaggggcggatccaccggcaacggtcttgggaggggcagatcctctgccgaggaggttggggacggtgatgccggatctacggctagaggccatgggaggagcggatccaccggcggcgcccttgggaggggtagatccatcgccgaggaggtcggggatggtggatccagcgttgtggaggttgggaacaacgtctaggtgcatgcataacatgtggtagtttaaaaacatttaaccatatcttctcattaatatgcgatgcaaagacgtgtgagatgaggcgacataatgatagaggcaagtttataaggtgatctcttcttccacctccttcgtatactatactccacaaacttgtgaatggttccttcctcttcattgtttggcatcgcacttgtaatgcctatctcactatcaacacctccggtgatctcgttatcaatgagaagagaggaaagaagggaagattattgctcacccgtcctaccatgttatagaggtaaaattactttgattttttttactctttagtagatgtgtttaaaatagttttgatc

SEQ ID NO: 11827 - DNA, 743 bp, Oryza sativa
  ref <308>: DATABASE ACCESSION NUMBER: AK109175
  ref <309>: DATABASE ENTRY DATE: 2002-08-28
gatccaaatcaataccgaactctctcgatccctttccttaaaaaacaaaagaaaaaaaactctcccgatcccctccgccgccggcaaacccacgccctcgcggcgccgctctaggtccccagcccgccgccgagtgccagccatcccactccacctttgcctcgtcgtctcaatcgccttcgtcggccgtcgctcggctctcttcgctcggtcatggagcaactggatccaccgcctccaagactccaagttttgaatcaaggagtacagcttcaggaccacaagcctggcgtcctagccgccgtcggcctccgcacgacgggtgaagtcgtggatctgcaaatcgacaagctttgttgacttggtcgacaaccacttctactgtatatgtgtagacaaggtgtgtatgtgcatctaaaatccaaatccttttgctccatttgcttgatttgcaactccaactccacgaatgtgcacacgagcaggagggcagcgtatagctcgcgagctaaacgggctagctcaagctttcaaacgagccgagccgagctagccttttagctcgttaggataacgagccgagccgagctagctcgttatcctaacgagccgagccgtgtcgagccgagctggctcgatatccagccctagtgcatgcataactgcatctccacttcatatttgtagaatgatccttgtaattcttttaaagttcataatagtaccttcagtcaattatgtgc

SEQ ID NO: 11828 - DNA, 675 bp, Oryza sativa
  ref <308>: DATABASE ACCESSION NUMBER: AK109176
  ref <309>: DATABASE ENTRY DATE: 2002-08-28
acattgcatcgcactacgcacatctacacgatacccaagcagcaaagctagaaagaaaaaccatggcgtgctcgggcagtttcctaccgataatgctcctgccgctgctcctcgccggcgccgcggtggcgggcggcgccccgccggggcttgggctggcgcagcggctggccgacggcgtggggcagcagcagcagcagtgctgggaggttctgatggagatcaagtcgtgcacgggggagatcctcctcttcttcatcaacggcgaggcgtacctggggcccggctgctgccgcgccatccgcgtcatcgagcagagctgctgggccaccgacgccatgctgtccgtcatcgggttcaccccggaggagggggacatgctcaagggctactgcgacgccggcgacgagcacaagccgtcgccgccccccgcctcgccggccgtcggctacgtcgccgtcggagagaacgccgccgtaccggccggacggaagagcctggcgctgcagcaccgttagttacacaccgcactcacactgccacgtgtgatcacgtccaggtttaagctcgggaattgactgggttgacgttgtagcccgagttgcgaaattcctcgtgcttttgacgagatcattatatataaataaaaagaatgttttccgtgtgttttagctc

SEQ ID NO: 11829 - DNA, 908 bp, Oryza sativa
  ref <308>: DATABASE ACCESSION NUMBER: AK109177
  ref <309>: DATABASE ENTRY DATE: 2002-08-28
acggaggagcagatacggtcgctggagtccatgttccacgcgcaccacgccaagctggagccccgcgagaaggcggagctggcgcgcgagctgggcctgcagccgcggcaggtggccatctggttccagaacaagcgcgcgcggtggcgctccaagcagctcgagcacgactacgccgcactccgctccaagtacgacgccctccactcccgcgtcgagtccctcaagcaagagaagctcgctctcaccgtccagttgcacgagctaagagagaggctgagggaacgggaggagaggagcggcaacggtggtgccgccacgacggcagcaagcagcagcagctgcaacggatcaggcagcgaggaggtcgacgacgacgacgacaagaggaacgccgccgcggggtgcctggacctcgagccgccggagagctgcgtgctcggcggcgcgacgtgcgccacgccggcggacgtgtcggtggagtcggatcagtgcgacgaccagcttgactacgatgagggcttgttcccggagtccttctgcgccacgccggagctgtgggagccatggccgctcgtcgagtggaatgcggtggcttgaaagacagagagtagtatattaccctaggttaatttgtgtgtacatgtagcttaaagtacgtggatcacgtctcctcgactgatctgccgtctcccttggacagagagggaaaagagggccgtggcaatgacgtgtggggccggtttgtagattggggttgcaagaggaatctcgttggagtagtggtggtggaaaccttggaagcaattaagccaatggactttgtgttttggatggtgctaaaatggagaaaactagatcgagctcattggaagagttgcataggaattcaagcatcttttgtggtc

SEQ ID NO: 11830 - DNA, 695 bp, Oryza sativa
  ref <308>: DATABASE ACCESSION NUMBER: AK109178
  ref <309>: DATABASE ENTRY DATE: 2002-08-28
tccaaattcaaaaggttacactaaggtgagactaatcacggtgaatctggttgaccgcccgtaaccgcgggcacggcttttcgaatagttttgctctgatcagaggtgtacaattgtacccacaagacacagccccacgacacgttttcgtgcgccgacatgccaccacgacatatcggaaagaggccgtgacaggacccttcgcataacccctctctagccaagcacaccacacctcaggtttcacccccgtccccagcgggccacgggcagtcccctctcgtgcctaggtgaatccggaagcgacagaggccgtcgcagggcccgccccgctccatcacgcccacccttgcctggatgcgtcgactagaggaaagctacactacaagcccagccgttgcccacgctggcttgtggtaagtacgataagttcttccagggcatcccgcgaaccggtccttaactgccatgggtgcgaccagcaaaaccatgcacccacagcccaccatgtagtttattttaattaacccacgccaaagcggtggcactaatccaacagaaccattggaaccaacagtctaaacattattatgcttttccccattgtgaactagttgaactaagcatgtctaagcaattcctagtccaaactctaatcatgttataccccaagctaacaagggagcatggtattc

SEQ ID NO: 11831 - DNA, 501 bp, Oryza sativa
  ref <308>: DATABASE ACCESSION NUMBER: AK109179
  ref <309>: DATABASE ENTRY DATE: 2002-08-28
gatggcagcgagcggcacgacggaggcccagagcacggccctccccaacgcgcggcgacggcggcggcggccgtcaccggccgcttcggacaaccagaacgccgtccagacctccgccactccggcgaggaagatccccacgagcgtgaggtagtaggcaagcacgtggcgctggaagagaaggccatgaggtggcttgtaaacaagcgtacctgcagccatggcgagggtgagggagcccactcccaagagctccttcacgaactgccccggcggcggcgtgccggagcggtactcttcgccagcgactccggcggcttcggcggcgccgatctcaagactgtagctaccgacctgctgcagcatctccagattgtctctaccgacctgcatcatagtcagctcacgtactggccgaactaatcaccacctgatctcaaatgcttcggtactgtgaggttgagacaaccattaatcttattatatagaagtcttcccact

SEQ ID NO: 11832 - DNA, 532 bp, Oryza sativa
  ref <308>: DATABASE ACCESSION NUMBER: AK109180
  ref <309>: DATABASE ENTRY DATE: 2002-08-28
ggcgagagaacagaagccgcgtattcgacgggctagagcagcgagagaaagaaaccctagaatgcatggcggcgatagatggcggcgggagtaggttggactggcgacccgatggtggcctagatcgggtagccccggcgaatcgtcaacggcggcgggcgcggcagtctggatgcgacggctgcgctgcattggcggcggcggcgattcgtcggcgatggcgggcatggctgtctggatgcgacggctgtgctgcatcggtggcggtggcgattcgtcagggtcggagggcaacggcctcgatgcgacggcggcgctgcatcggcgggaggccggcgatggttggatgcggatgaaactgatgaaattcaaggataagcgagcaaccttcacaactggatggaatgctttggttggagccaatcttttcgagcaagctgatgtttgtgtgtttctgttcactgaagttccgatgtaatatgtgttccgatgtaatatgtctatcagtcaattctagtggtatggtttgcat

SEQ ID NO: 11833 - DNA, 602 bp, Oryza sativa
  ref <308>: DATABASE ACCESSION NUMBER: AK109181
  ref <309>: DATABASE ENTRY DATE: 2002-08-28
gacgccacctctcccaaatcatcgtagcaacagcgacagccaaaaaacatcatcaaaattcttcggggggagagagtttgatggaggagaagggtgcggaggcgatgacgcagaaggcgccggagaaggaggcggcggcgatggcgtgctaccggaggacggtgggggaggaggcgacgttcaaggagagatccaaggacctgttccggcagttcaaggacgcgccggcgggggatcactgggtctgcctcaagaacaaggtccgcgccgccggcgagtacgccaccctccgtactcgccagggcatcaccatgttcggcgagccaaatgtcggcgacctcttgggaagaaccaaggatgacgactccaagaagacgccttccgcgtaaattatagaccaagattgagtggagaagcagtagcattcttgagggcgaaccatctaagtttgttaataagtgttctctctatggttaaatgattgattagttcgagttttactccgttcgtgttgattagtccaggctttcgaggtgtaatagaatactgcaacaatagaagtgtgtttctttttgttttggttattttcccttcaattcatc

SEQ ID NO: 11834 - DNA, 666 bp, Oryza sativa
  ref <308>: DATABASE ACCESSION NUMBER: AK109182
  ref <309>: DATABASE ENTRY DATE: 2002-08-28
atcacccctaaaccatatacactcctgtaacctctgcctgccttaagctaagccgatggagatcaagctcgtcttcttcttcctcctcctcctgggttttggcaacgcggaggaggaactcgacaccgaaacctgcgacgtcgccaagctgtcggccgagattggcacctactgcgaattcgaccaagggaggatgtaccccggccggtgctgcgacagcatcatcgacgccgcggatgggcacgatggcggtggcactcagtgcatctgccgcgtctggatggaggatgcggtgagaaagaccgggatcactttcagagagttgttgcataagtacattgattgtggtggtctgcagcccagcctacctcatcttgccgactccgcttgctcagctgctcctgagatggtaggcacacttccaggtccaggcaagatcagcggtgcagacaccaccaacgtcggagtcatcttctccgccatgaggccagccattatcgtcaataaaatgctagctagtacttgatacatatatatagcgagtgttcgttggggtatttgttaagttaatttagtgttattgccggctaataatatatatagtagagaagctatgagtttgatgtcatattgcagtgcattacatcgttttgttattatattttg

SEQ ID NO: 11835 - DNA, 486 bp, Oryza sativa
  ref <308>: DATABASE ACCESSION NUMBER: AK109183
  ref <309>: DATABASE ENTRY DATE: 2002-08-28
agggttcatattccccatctcgagttcttcccgcacgtcagtagcagcgtcaaattccggacctggggcgaggcgactctagcgcgggaaatcatagcagcggcgctggtgcgcagccacggcgagcgcgacgaccccggcgcccgcgacaggctacaggataagttctgtggctgtcggggcaggtgcatgggctgcacggcgacgctcgacgcgccggccgcaagcacggcaaggatggacagggccaagtgatatgaactgtagaacatggtgatagaaaagaattttttcagtgtaaatccatgcatatagattagggaggaatgaaatgtgtaaaagaagctcatctattatccctctactgttgagtgtaatgtggagattgcccaagtgatattgtataatctagtaagcatattattatgcaattcaaacgttgtatccttttgggattatcttattcgcatttttctcatttttttc

SEQ ID NO: 11836 - DNA, 592 bp, Oryza sativa
  ref <308>: DATABASE ACCESSION NUMBER: AK109184
  ref <309>: DATABASE ENTRY DATE: 2002-08-28
catcctccctccgccaccgccgcctgcgccgatccccatccatccctcccgcgagcgagcaggggggccaggggcgccgtcgttcgtcctgctgcttccgccgcatccatcctgattctgctgactgcaagatgaactctaagcgtaggaggagtcatagtccagttgagcacttggaaggcaacaataaggagattgagatttctggaaggaaagatgacttaagagatctagagaatgactctagtaatgccagatcaggcagaggtcgtgaatatgtcaggcattctgataggcattcttctggagcaccacgtgattccaggaggcatgatgattataggaggtatcatgataagcgtggtgatgacaatgacaggggccatagaatctctcggtcagaacgggaatcaaggtctgacacttattatgatcgtacaaagcgtgatggcacatctgatagatcacgcggtgattggcgaaatgatgacaaatctttaaggagagaacacaggagtaagaaccaagataagcaagagccatcacgtgaatatcctagatatgatggagaacatgacaaatattcagatgg

SEQ ID NO: 11837 - DNA, 733 bp, Oryza sativa
  ref <308>: DATABASE ACCESSION NUMBER: AK109185
  ref <309>: DATABASE ENTRY DATE: 2002-08-28
cgtcgatgtcgccggcgacgccgttcagctgcggcgctgggcacgtgttcccgcaccgcgcgatggacccgggcctggtgtacgacctgaccgtcgacgaccacctgagcttcctctgcaccatcggctacaacgcgacggcgctggcgctcttcaacggcgcgccgttccggtgccccgacgacccgctcgacccgctcgacttcaactacccgtccatcaccgcgttcgacctggcgccggcgggcccgccggcgacggcgcggcggagggtgaggaacgtcggcccgccggcgacgtacacggccgccgtcgtgagggagcccgagggggtgcaggtgacggtgacgccgacgacgctgacgttcgagagcaccggcgaggtgaggacgttctgggtgaagttcgccgtgagggaccccgcgccggcggcgaactacgcgttcggcgccatcgtctggtcggacgggaaccaccaggtgcggagccccatcgtcgtcaagacgcaggagagttgatcatcagggggacgccatgcccatgcgccatggctggaggcctggagcttggatttattattattttttggttcttttttcttttttttggtgtctcagattaggctttagttagcaagaacactgagagaagtagctaggaggttttgattaggacataaatttcagtcatcggtttaataaacagcaaatatcaggttgagaatttttcatat

SEQ ID NO: 11838 - DNA, 745 bp, Oryza sativa
  ref <308>: DATABASE ACCESSION NUMBER: AK109186
  ref <309>: DATABASE ENTRY DATE: 2002-08-28
acaagcagaagcagctcctaaattcatggcgttggccgccgtcctctcccgagccgccgcgcgcctcctccgccctcccctacccctccgcacccgccatctctgcgccctcccctcctcctcctcccccgctccgtctgaggcggagatcctcgccgaaatcgatcccatcgtcgacctcgtcaaggacatcctccactccgccagatatggagatggtgcatttctaagtccagacgatcaaaaggctgtagtagaaaaggttcttgttcaccaccccacttctgaagataagattggctgtggggttgatgctattatggttggtaagcaccctgatttcaggaagtcaagatgcctctttattgttagaacaaacggtgagactgaagatttttcataccgcaagtgtatcaaggagtacatcaaacagaagtatcccagccaggcagacgattttatacagaatcatctcacccggcaatttactcgacgtcccaagtagaaatgccccttttttttcgtgatagtgtctttggcttataggcaaaatagaacccgtatgtctcagttagaacatgtaaacgaactcgtgtttcttaatgtcaagtgaaaatgttttgttatcaacacattcatgaagatcctttaaccaattatctctcatgttttctctgctattctactgaagcctgtaggcacacgttatatggtcatcttccttgataatttcagcttgattttc

SEQ ID NO: 11839 - DNA, 479 bp, Oryza sativa
  ref <308>: DATABASE ACCESSION NUMBER: AK109187
  ref <309>: DATABASE ENTRY DATE: 2002-08-28
ctcgtctctctcttctctcccctctccggccatggcgtcgcgcctccgctccttcacccgccccgccgccgcgttcctccgctccgccgcgggacggagcccggcggcctcgctgccccgagccgtcgctcccgtcaccagggcggcgtccgtggggcggctggtggggctcgcgaggtcgctgcagccgctgcacagcgcggtggcggaggcgcggctgacgtcgcggctcggggcggaggtggcgcgggccgtgtcgcagggtacgctctgcagctccttcccgggagtctgagtctgatatcaaatctaatctttgcatcctgcatgtgagttgtgaccgcacccggttgctttgctttgatttgccttgtttgttctagttcatcttgtgtctagattcggctgggctgatgtaattgttgtcggaatatgcttagttttagtcatcaataaaatcaaattcgttgatcccgagt

SEQ ID NO: 11840 - DNA, 1038 bp, Oryza sativa
  ref <308>: DATABASE ACCESSION NUMBER: AK109188
  ref <309>: DATABASE ENTRY DATE: 2002-08-28
aacaacttttactctatatattaacctcatccgccggccatggcctccgccgcatactacgccgggctcgtcgccggcacgccacctccgccgtgtcgccctggccggctccggcggtgtcagccgccggccaataacctcgtctcatcaggtagaagaagccatcaagcaattagggtcaccaatggagtgaacatggatggccgggcaaagcttgcagccccagttgcagtggtcactggagcatctagagggattggaagagccatcgctgtggctcttggcaaagcagggtgcaaggtgattgtgaactatgccaagtcaggtatggaagctgaagaagtgtgcagagagattgaggagtccgggggcaccgcgatcaccttctctgctgacgtctccatcgaagccgaggtcgaatccatgatgagagccgcaattgacacttggggaacactagacgtgctggtgaacaatgcagggatcacaagagacgcactgctgatgcggatgaagcggacacagtggcaggaggtcgtcgacgtcaacctcaccggcgtctacctctgcgctcaggctgcggcgggggtgatgatgatgaagaagaagggaaggatcatcaacatcacctcggtttccgggatcatcggcaacattgggcaggccaactactgcgctgccaaggccggggtgatcggtctgaccaaagccatggccagggagtacggcagcagaaacatcaatgtgaacgccgttgctcctggctgggtgacctccaacatgaccgcaaaactaggcgacaatgtcgaacagaaggctctcgagacgataccgttaggacggtttggcaaaccagaagagatagccggtctggtggagttcctggccgtccatcctgctgcaagctacatcactgggcaggtgctgccggttgatggtggcctgtcaatttgagaaacatcagcaacaaagttctgacttgtaaaccaagtgaatgtaatagactctaaagatatcacgatgcttttcttgaaaatc

SEQ ID NO: 11841 - DNA, 996 bp, Oryza sativa
  ref <308>: DATABASE ACCESSION NUMBER: AK109189
  ref <309>: DATABASE ENTRY DATE: 2002-08-28
aaaaaaggccaactcagtttacagcgacatccgacatagcctagcttaagcttcatccattgatcgatcactctcacacagctagctgcacgtaagctagctaggagttagctagccatggttcggaagcttgttgcctctctcttcctcggcggcggcggcggcggcggcggcggcaatgatgcctgtagcctgtcgtcgtcgtcgagcacggcgtcgtcgtggcaatggccttcgtgcacgcaggcgaggacgctctccttcgccaggcacgacgccccagcaagcgcagacgacgacgacagcaagcggcggcggcagcaggaggaggaggaagacgactactgcgtctacaagacgagcgtgatgaacccggccttcttcctcgacgaccactccacctgccgctcctactcctccgccgcctccgccgtcaacgacgtcgtcgacgacgacgacgaggtgatcatccgcgggctccggtcgtcgaaccgccgcctcttcttcgagcccgagtcgacgagctccatcgtcgtcaagggacgcgccgtcgacgccgacgcggcggcgttcgacggggcgacggcgatgtccatcgactcggccgacccgtacggagacttccggcggtcgatggaggagatggtgatgagccacatgagtggcgggggccatgactgggggtggctggaggagatgctcggctggtacctgagggccaacggcaagaagacccatggcttcatcgtcggagcattcgtcgacttggtcgtggcgctcgcgtcttctccttcctccgccaccgcctcctcctccgccttccagctgcctctccagaaaggcagccagattaactaagctaaggctatagctcatccatgagcacaataattactactgtattagctagctaggtagagcaattaagcgagagactacgtttgattgattgatcttggaagcatgcataatgtatgccatggccatggtatgatt

SEQ ID NO: 11842 - DNA, 515 bp, Oryza sativa
  ref <308>: DATABASE ACCESSION NUMBER: AK109190
  ref <309>: DATABASE ENTRY DATE: 2002-08-28
ataaaaaagtagaggcccgaaaagagcccaatacccaaaggaatccacccaagccgatggtggttttagccacgggtctcagtctcactcccagattctactcccgctcctccatcgtcgtcgccgcgagtttgctcctctcggcggcgccctcctcgtcgtccccgcgcgctcgtgccgctgctccggccagcgtgtactccccgtggcgaggcaggtgagcggggctcttcgagttcacgaggtgtcgtttttttttttttcggggggatttctccaggaggattagtagagatcaggtgtgtcctcctttggatcgcttttatctgttcgagcgattgcttggtccggtagcgattcgggtgtgagactgagccatctgcgcctctgttactgtttctgttttttcctttaatggggatggttttctgaaaattaggatggcacccagcggtatgagattgttgtggattgtttgatttcctggtggttggtgaagtcagaaattgagcagt

SEQ ID NO: 11843 - DNA, 904 bp, Oryza sativa
  ref <308>: DATABASE ACCESSION NUMBER: AK109191
  ref <309>: DATABASE ENTRY DATE: 2002-08-28
ctcagatctcctttacccgcctcgccgccggtcgccgcccgccgccgccgccgccgtcacagccagggaagaactccgttcgccatggagggcgtgggcgcgcggctcgggcgcacctcggcccgctacggcaccacgacgacgttcacggggcccgtcaggaagtggcgcaaggactgggtgcccgtcgccgccgccgccgccgcggcggcggcggcggcgtcggccgcctcctccacggcgggggccggatcccgcgggaacaatctcgtgctcttcaagtggaccccgatgaacggcgccaacggcaacgggggcggaggagacggagaccaggcggcggcggcggccgccgccgcggaggaggagaaggccacgaaacggcggcggtttctgtagttgaagatgaaaggcaagaatctggaaaatctgacgatgaaaataaggcaaatgatggagaaccatcatccgccgaaactgagccatctaatggaaaaactaatattaatgatacaccaatggatgaatctcaggcatcagatgaggcccgatattctggcaaaaatggcggtggaaccgacctaaatttaaacttgggtctgaaggactctgacggagacaatgatattgatactgaagaacaagatgctgaaaacaacacacacacagaaaataggctgaagaggaaatctgtagctcctgaccttgagatgagaatgtaaccggctgcttcatttattccttggattctttactatctgcctttgggcctattgtgcaaactttcttgacatattgtcatatttagaggcaattcaacacgatagcttacaggaccagctatagtaaaatgtctgaactgaacattattaagtcaaaattttctcggtctgttgaacatctg

SEQ ID NO: 11844 - DNA, 823 bp, Oryza sativa
  ref <308>: DATABASE ACCESSION NUMBER: AK109192
  ref <309>: DATABASE ENTRY DATE: 2002-08-28
atcccctaacccctgaccacccccccgcctccgcacccgcctccggttgcctcctcccctctcggcgggcggcggcagcagcggcggcagagtcagcagacctcgccgggaagctaaagccctaaagctcgcggaagggtttatcgcaacgggcgatggcggcggcggagcagaaggggaagaagccgaggaccgacggcgcggaggccgagcccgtcgacgccgccctgctgcagtccatcgagaagctccaggagatccaggacgagatcgagaaggttaatgaggaagcatgtgataaagttctggagttggaacagaaatacaacgaggttcgcagaccagtttatgttcgacggaataaaattatcaagcaaattcctgacttctggctgacagcgtttcttagccatcctatgcttggtgaactattaactgaagatgatcaaaagattttcaaacacttggagtctatcgacgtggatgactcagaagatatcaaatcaggctactccattactctcacattctcccccaatccatattttgaagatacaaagcttacaaaaacatattcctttagtgacgatgaagcagtcaaagtaaaggctacctccatcaggtggaagaaaggaatggatattgccaatgatcgtgcgtacacgaagaaaggggacaagcgaatcttaattgatgaaagtttctttacttggttcaatagtgaaaagaacagaagttttgctcatggagctatggatgaggtggcagatgtcatcaaggaagatctgtggcctaatcctttgaagtacttcaacaatgaatt

SEQ ID NO: 11845 - DNA, 903 bp, Oryza sativa
  ref <308>: DATABASE ACCESSION NUMBER: AK109193
  ref <309>: DATABASE ENTRY DATE: 2002-08-28
acctctcttccctcctccctaaccaccaccaccaccaccactccagaagctctcgccatcccccacttcccccctccgatctccgctccgatccccccgccgccgccgccatggatcagtccatcgtcggccagatcttggagaagcaggtgctgtcggtggccaaggcggtggaggacaagctcgacgagcagatcgccgcgctcgaccgcctcgacccggacgacatcgaggcgctccgcgagcgccggatcctgcagatgcgccgcgccgccgagcgcagggccaagtggcgcgccctcggccacggcgagtacggggaggtccccgagaaggagttcttcgccgccgccaaggccagcgaccgcctcgtctgccacttctaccgcgacaactggccctgcaaggttatggacaagcacttgtcaattctcgcgaaacagcatgtagaaacacgttttgtgaaagttcatgctgaaaaggctccctttttgacagagaaactaaggattgttgttctcccaactcttgcattggtaaagaacaccaaagttgaggattatgtggttgggtttgatgagcttggtggtaaagatgatttcagcactgaggatctggaggaacgtctagcgaaagctcaagtgatcttccttgatggagaagggcctgcacatgcatccaagcaggcaaccaaacgaagcgttcggcaatcagatactggcaactcatcggactctgaatagttttgttactgcttctgaacttatgctaaatgtttttattggctgttacggcaaacggttatgttatccctattagtaataggaaaagttaattagtctagcattgaacatttgaactgggacttgggagttaaaagaggtatctagagtgacacatcac

SEQ ID NO: 11846 - DNA, 946 bp, Oryza sativa
  ref <308>: DATABASE ACCESSION NUMBER: AK109194
  ref <309>: DATABASE ENTRY DATE: 2002-08-28
gacaaacgcgcgtagatctcccccattaggctcgtgtcgtgtgtccgccagctgcgcgcaggccggcgacgaagctgcgtgcgcgcggcaacgtcggccggccgcagcaatggccccgttcatcgacctcggccgcggcgggccgacggcggcgccggggaagccgaggctggtgatgatcatcgccgacccggggcgcgagtcgacggcggcgatggagtgggcgctctcgcacgccgtcgccgagggggacgccatcctgctcctccacatcaacatgccccccaactccgcgggcggcgccgggccgtcgcgcaccggctccggcgggagcgccgggtccccgctcacggcgctcctcggcgccggcgccgcgggggacgccgatttcatggagacgatgagcgccgcgtgcaaggcgcggcacccgcgcgcccgcgtccgcgccctgcgcgtcgagcccgccaccgagggccgcgaggccaaggcccagaccatcctcgccgagtcccagcgccgcggcgtcgagctcctcgtcatcggccaccgccgcgtctcctccttcctcgggttgaggagcccgagcgggtcgagccgagcgcacgacagcacggcggagttcttgatcgaacacagcaagtgcgtgtgcgtgagtgtgcagaagaaggggcagaacgccggctacctgctcaacaccaagacgcacaagaacttttggctcctcgcttgatcatgatcatcacggcctagatagtgatccacacatccatgcagcttcatatatgttaatggatcgaacaaaagctccaaaaactttttttttgattcttctcgcagcaatgcttgtgtcagacacgatcgatcaatcgagttaattcttcattaatgcagaaacaacgaatcgagaaaagcaaaataaagtgttgttttgttttttaatcgagat

SEQ ID NO: 11847 - DNA, 1051 bp, Oryza sativa
  ref <308>: DATABASE ACCESSION NUMBER: AK109195
  ref <309>: DATABASE ENTRY DATE: 2002-08-28
aacaacaccaaaaccagccttaaagaattcctataccgcaggacgctatgggtggcaaatcggcaaccaagtcgcagtacttcgacaagctgaagtcgctcctcgaggagtaccacagcatcttcatcgtcggtgtcgacaatgtctcgtctcagcagatgcacgagatccgtcacgccatgcgctccaagggtgtgatccttatgggaaagaacaccatggtccgccgtgcgctcaagggcttcgtctctgagcaccccgagtacgagcgtctcctcccctacgtcaagggcaacgtcggtttcgttttcaccaacgaggagctcaaggagatccgcagtctcatcctcgacaaccgtgtcgctgcccctgcccgtcccggtgccgtcgcccccggtgatgtctacatccccgctggcaacaccggtatggagcccggtaagacctctttcttccaggctcttggtgtccccaccaagattgcccgtggtaccattgagatcacctccgacctcaagctcattgaggccggctccaaggtcggtgcctccgaggccaccctccttaacttgcttaacatctctccgttcacctacggtatgactgttactcagatctacgaccacggtcagacctttgccagcgatgttcttgacatcgaggagtctcagctcctcaaggccttcacctcggccatcaacaccatcgcctgcatctccctggctaccaactaccctactcttccctccgtcatgcacagccttgtcaactcttacaagaacgccatcgctgttgccatcgagatcgagtacgagtgggaggccatccacgagctcaaggaccgcatcgccaaccccgatgcttacgccgctgctgcccctgccgctggctccgcccctgccgccgccgccgacgctcccgctgaggagaagaaggctgagtccgaggaggaggaggacgatgacatgggcttcggtctcttcgactaagcgtttgctttgcaattcgactagacagatgccgataatgtatcattgactaatgatgcgac

SEQ ID NO: 11848 - DNA, 627 bp, Oryza sativa
  ref <308>: DATABASE ACCESSION NUMBER: AK109196
  ref <309>: DATABASE ENTRY DATE: 2002-08-28
atctctatcccctttcctctctctcttctctctccagcgccaccaccacgactccgccgccgccgctcccgccaccaccacatccctcgccgccgctgccgctaccaactccgcctccaccaccaccctcgccacctccgccgccgccgcctgcgcctccaccatccctcgtagctctccttttgcttctcagtggccgtctccgccgtgggaggtcgtggcgggcggcagcgggaggccgtctccgccgcggccaccttgacgctgaggagccctgcgatactcgatgggagacggagttgacatcgattcttgttgccggtggccgcaccgtggtcggcgaggcagctatgacgggttctacggcggtcggcgacgtggttaaggcggcttttgctgctatcggcggtgcacaaatggcggctcctgcagccgtgactaggtgcggatgagcttcatgtgttttttgcattttgtgtcgtttgttgatttgagcattttaggtcgtttgttttttgttttgttttttttttgcagttgatggagcatgtagcttgtggtgctagataggtttaagtttttttttttttgtatttgtctgaaatggatcggagtctgcaacctctc

SEQ ID NO: 11849 - DNA, 577 bp, Oryza sativa
  ref <308>: DATABASE ACCESSION NUMBER: AK109197
  ref <309>: DATABASE ENTRY DATE: 2002-08-28
cagtcccagcactagcacggtgaccaagtcagaccggcggcgccgttgtgcttgttcgtgccggctgccacgcggagcgggatgccgcgtgcggtgtctcggtcgccgccgtcgcaccgccggcgccgctccccttccccgcggtatgggaaccggcggagtcgacgcgatcggagccgatccccctacacctccacacgtcggtctccttctccaagatgggagagaagccagtccccaactcctaggaggcgtagaagccctccatcaccaagacgacaacgaagacggagaagtcgaagcaatacaagttccactgtaaataactcctgcagcccaagtcatgtatcagagcaaaacaatttaattgagaagcaaaaagaagaaggagataagaaaaggcgccaaaaggaagctgaactgaagttacttgaagaggagctcgctcgaagagttgaagaatctataagaaaaaatgttgaggaccgtttgaactccgaggacatcaaaaatgaaataaaacggcgagttgaggaaggcatcaagcagttattttatgaggttgatgctcagctac

SEQ ID NO: 11850 - DNA, 765 bp, Oryza sativa
  ref <308>: DATABASE ACCESSION NUMBER: AK109198
  ref <309>: DATABASE ENTRY DATE: 2002-08-28
attgccatcgcctgcctctcctcccgcgccgccatcccctcgtcttctcctccgcccgcgcctccccgcctcccacgccgccgcgcctccttctcctctcatcccaagcagcagcagcagcagcagcagcaggaggtggggcagtctgcgacggtcggcggcggcggcttccgcgacggcggcttctgcggcgcggccttcgatggcgcggtctgcggcgttgttggcggcggctcgccggtgcgtcggcggccggtggttcttggcagcgcgcggcgaagactcagcggaggctctcccctcctcccttcgctggctctccccccccatcttcggctctcccctcatccggcgggagcggacggcctcacgcgcgccttcgggagcggtcggcggcggcgacttcggtggtcttccagaggctcgccggtgcctcctctccctcgatcttggcgtcggctcgctggctgttcttggcggtgggaggcgaggaggacgccacctccatcatccatggggagaggcgaggaggacgccgccttcgtttcttggagctttgctcttgtgttcattgatcccaaaatccccctttttgctggtttctttagcttgcctcatcaatcatcccaagatctgagcttggtagtagttctcattgaaatccacctgaaaaaaaatccccagattttgcagaatgggttcttcggtgctggcatggaagggctgggaaagagaaagaattttgtgctttcttgattgtgattc

SEQ ID NO: 11851 - DNA, 640 bp, Oryza sativa
  ref <308>: DATABASE ACCESSION NUMBER: AK109199
  ref <309>: DATABASE ENTRY DATE: 2002-08-28
atcctctccacgcgcaggccgcgccgccggtctccaatcgcgagcgccgccgccagccaccgccctcctgtcgcgcacgccgccggccaccgccctcccgttgagcgcgccgccggccaccggcctcccatcgcgtgcaccggcgtccaaggctctcccgtcgcgcggtggggcgccgccggcccccatcctcccgtcgcgcggtaggggcaccgccggcccccgccctccagtcgcgcggtggggcgccaccggccaccacccgtcccgtcgcgcagtaggccaccgccggccgccctcccgtcgcgggcgccgctgtccaacgtcctgccgtcgtgcagccaaagtccaccaccctatcatcgttgcgcgacccaacaccgcgtacgagtagcagcaatgtaaatttcttcttgcgtatttaacatttgcagttgatgagtgattgatttcttgttcagaggagtgggttgttcattggtgtcggtaagcgaaacagttgaggccaccatccccttctcatgatgcagtgatgtactgttatggatcttatgacattataatcatgatgtactgcccagttaacttgatttgtcatttgcaacatttgtgtatggagtgcaaagttggtttggttcct

SEQ ID NO: 11852 - DNA, 634 bp, Oryza sativa
  ref <308>: DATABASE ACCESSION NUMBER: AK109200
  ref <309>: DATABASE ENTRY DATE: 2002-08-28
caaacacacccgtgcacgcggagatcaggagcatctgcaatggcggacatgggaaggcacggcatggccatggccatggcgcctgcggcggctggcggcgcgggcaggaggaagcggtacatgcacatgacgttttactggggcaagaactcggagatcctcttcaccgggtggccgggcgccagcggcggcatgtacgcgctggcgctcgccgccgtcttcgctctggccgtgctcctcgagttcctcggctccccccgcgtgcaggagtcctcctccctcggcagcaggcggcggcgcgcgacggcggcggcggtgcacgcggtgcgcgtcgggctggcgtacctgctcatgctcgcgctcatgtcgttcaacgtcggcgtgctcctcgcggccgtcgccgggcacgcggcggggttcttggcgttcagggcgggcctgtgcggcggcgggtacaagaagggagagctcgcgcctgcggcgtgctgctagatgtggttgccatggcgcaagacaaaagcgaatatatttgttttcgaaaatttagataaggattttgagtgcggatctgctcttgaatctacgctaaaatctatatttgttatcctcacaatggaaaagaaaattcaatgtt

SEQ ID NO: 11853 - DNA, 898 bp, Oryza sativa
  ref <308>: DATABASE ACCESSION NUMBER: AK109201
  ref <309>: DATABASE ENTRY DATE: 2002-08-28
aacatcatctcgcgattcacgtcgaattggccccctaaacccctcgcttcgctcatcgcggagccaccaaatccagcgaaagaagatcaaattaccctacctcacgagcaccaaatccaatccaacccacccaaatccccccaccggaaaccccaacgagccacccccacctccgactcaacccgatgagatacaccagcacggcacgccacggcacttacctaggccggagatcttatccctcagctgctgcagctccgccctgagcgccaccgcctccgcctcctccttggccctctccacgatcccctcctccacctccaccaccgcctccgccgcctcctcctgcgccgccactcccgtcgcgatcaccagcaccaccgccgccgccagcagcaggagcagcctcgagatcctccccatcgccgaaccccctcctcctcctcccaaccccaacccgccgcctccggttcgccgccgagcccgcgaagacgacgacgacgacgaaggcgagtagtggcggagagtgccccggtgcgcgtcgcgtcgcgttcgttaggacttaggcgctgcgaggctgcagatttttttttccctttttctcctctatttttccccttttttttctctttttaacccgcgacgaagacgaagccacgggagcacgtgacctggcacgtggagcgggggggcggcacacgtggcgggtcgcggttcgtgctgccgcgtgggtccacgtcactggctgggtcactgtgagatgggtcccaccgagcctatcctgaaggacaggtggctggcggcgacgacccggcacgcatcgaagggggaaaagatgtttttctctctttttttttgtttttgagaagaaaaggaaattgatttcgagtgtccgtac

SEQ ID NO: 11854 - DNA, 567 bp, Oryza sativa
  ref <308>: DATABASE ACCESSION NUMBER: AK109202
  ref <309>: DATABASE ENTRY DATE: 2002-08-28
ctcccctactgcagcgagcggcggcggccggccggcaaggcgcgacggcggcgcgccctctctctcctccctccccttgctgcggcgagcggcgaaggcgggtcggcaaggcgcacactgcggtgcgccctctctctactccctccccttgctgcggcgagcggcggcggcggcgagtagccgccggtgcggaccagctcggctccctacacagcatttgatcggggcagcattaggactggttcaagaagcggcgagcaatcgggcgaagagagaggtggctcgccgatgcacagccgcatcagcgaactccggccgatgtcgcggataaccaggcggccgatgagcggcgacatgggtgtgttcagggatgatggatcgagctatggtttagacaacgacgtccgacgtctgctgccgcgagctaccgccgccgggcgtcgcctctgagctcccaagaactggaggaatctgtagacctcccattgacgttctgatgctgtctgcctcccaatttcagcctgaaatacataaataagagagtaaatacaaattcattttgaaccc

SEQ ID NO: 11855 - DNA, 621 bp, Oryza sativa
  ref <308>: DATABASE ACCESSION NUMBER: AK109203
  ref <309>: DATABASE ENTRY DATE: 2002-08-28
caccgcggcgtccggcggcgtcggccacttcgcggtgcagctcgccaggctgggcggccaccgcgtcacggccacctgcggcgcgcgcaacctcgccctcgtcgccggcgagctcggcgccgacgaggcgctcgactacgccaccccggacggcgccgcgctccggagcccgtcgggcaggaggtacgacgccgtggtgcactgcgcgccgcacctcccctggcaggtgttcgaccgcgtcctcgccgaaggcgacaccggcggcgtcgtcgtcgacatcacgccttcccccgcggccttggccaccgcgctgctgcacagggtgaccttctccaagaagaggctgacgccgttcatgttctcgccgagcaaggcggacatggagctcctggtggccatggcgaggcaggggaagctcaagcccgccgtcgactcgtgccacccgctgagcgacgccaccggcaaggtcgtcgtcaaaatcggagaagaagaatgagcacgacgcagggagataccgttggatgttggaacagtatgttcagtggcagcgcacggttaactgttattgtatgaaaataatgttttttaaagaaacacggtacaaacgtaaacgttcatgac

SEQ ID NO: 11856 - DNA, 851 bp, Oryza sativa
  ref <308>: DATABASE ACCESSION NUMBER: AK109204
  ref <309>: DATABASE ENTRY DATE: 2002-08-28
aagccaagcattacatgtcagttacacttaccgcttgtcgccgcattttgtaccgttggcgctaccgctcctcctcgactggcttagcatgtcgtcgaacagaagctcacggatggcggtgacggtcctcgtcggcgtggtcaccgggatgttgatcctgacgcttctgccttggcaggtgaccgccctgcctcctgggagcgtcgtcctcggcctggtgttggcggcttcttctcttggcctgccaagcctccctgaatcgcccaattcttgagggatggtgagctgatcatcgtctccttcgtcagggctccttgcaatcatgtctttgtacgtgcaggtgttagcagaagagagatggagactggagagtatgtacgcacgtaccgtggaggatggagcaggagacggagggatcctccgtgtccggcggcgaggagtcgccgccgttgccgcatcggcggcggcgcccgtcgcgctgctgctcggcgacgacggcggcccggagctcggcgaggatctgcagctggcggcggagcgactcgccgcgctccacgaactcggcctccttccgctcgtagaagcggttcaccttgttgagctgctcgtccagcctcgcgaagaaggccctcgccgcctcgccgtccgcgaacccggcgccgccgtccacgagctccgtttcgtacacctctccggccaccgcgccgccgccgccgcctccgccgctggccagcttcctatgcacctgcattgcattgcacacgtgccaacagcagaacagatacagttattacttttacgaacacccgtaaccatgaaaattgctgaaaatttcccttgatgtttaggat

SEQ ID NO: 11857 - DNA, 675 bp, Oryza sativa
  ref <308>: DATABASE ACCESSION NUMBER: AK109205
  ref <309>: DATABASE ENTRY DATE: 2002-08-28
agaccgacaattggcgagcagtctacggcaggactactgcggtttaaccggtagcaatcaacatgttaggcctcccccgcccctctcctccccttcccgtctctgccgtcgcagtgtcggcagtgggcggcgagcggcgacagcgccctcccctctccgtcagcagcgggcggcaagcggcgacaccgctctcccctcctccccttcccctctgtcggcggcgtcagcagcgggcggtggcaggcgtcggcgggtgggaggcggcacaggtgatgcgggcccaccttatcgtcaccggaggcactccgcctccttccccgctggcctccgggttgccatcgccgtcggcatcctcgtccttgacaggagggaggagcgccgggcccgggccggcgatggcgcgaacgaacagcatcgcggcgagcgcggccaggagctctccttctttctttgttcttctcttctctttttcttattttctgaaggactgtagttcagaattaatgttcatgtatataattaatcttctgtttgaagaagtgtagctgcaaattagtcccctttttgcaagtgagactagggatgtgttcggattccagtgatgggaactaatccctctcacacggaaaacggagcggtttattagcgcgttattaattaagtattagctatttt

SEQ ID NO: 11858 - DNA, 668 bp, Oryza sativa
  ref <308>: DATABASE ACCESSION NUMBER: AK109206
  ref <309>: DATABASE ENTRY DATE: 2002-08-28
ctacctctctcttctcttatcttccttcccgttgcttcttgctccaccggccgccgttgcagctgccactcgccgtcgcgccaccgcttgccgctgctgccgctgcttgccgccaggccgctccgccaagtacatcctccagctcgagcacgactacccctgggacgacgaccccaagtccatcagccgcctcatcttccagcagatgatcctcttcacggccgccatggaattcgaggaattcaggggagacgtggacttctgagggaggtttcgtggggtttttaggccagtgagggaccggctggcggcgagaggagtgcaggtctgttgggttgccgtcggcggctgcggcgagggggttcggaggccgggccgctcgcttcgccactgctgccgccgccgccgcctcctgctgccgccgccgccgccgcccaccgctcgctgctgctactgcagctcgccgcccgccgcttgccgccgggccactccaccgctgccatcgaacaggaagaagaatggagaagaaggggaggaaggaagaagaagggcaattttgtccaatcttttttgtaaatgcatccaaatggtaaatagtggcatgtatcaaatatgtgtaaaatcataatggcatggttccaaatacttgaatactagtggtatatttt

SEQ ID NO: 11859 - DNA, 777 bp, Oryza sativa
  ref <308>: DATABASE ACCESSION NUMBER: AK109207
  ref <309>: DATABASE ENTRY DATE: 2002-08-28
ggaaaggcttgcggtggatacctaggtacccagagacgaggaagggcgtagcaagcgacgaaatgcttcggggagttgaaagcctcggcccatcaatgttctcccgtacgccgtgcccagcccaaccgcggctcaggacgacgctagctcctcgccggcggcgactcagttcgctcgaccgggacgggacgacggctcccctctcccgcgaagctcgccgacggcgacggcgaccgccacatctcgtccatgcgcagctccggtcggagattcctgcctttcagcttcagtcactccatgaagcacacagattggagatccaccagccctgctgtgtgatgtttgtctcccccactcatcagtttttgatgcgtgtgctcatccgtcaacgactcaacgatggtacgccgacggatctcgaccaataatcggcaggatttccatcccacagctcgcatctgtataatctgcatatcttataggtgtagtatgtaggaatttaaaatgtgctgcatttaatttctacgtttttcactttcctgcattttgtacaaccagtgtgctctaaaaaaaaaactactgttcctgctttgcggaatcacataatgtaatgcaagatgggttcgtcgttcggcgaacatagtagcacacaggaaggtgtttcaaacaattgtatcacgaccaggatttctgtccaccgggttttcttttgtcttgctagtagacgattgtaaagagtttgagtgactcctagctttggtgtgtaaccctaaacat

SEQ ID NO: 11860 - DNA, 473 bp, Oryza sativa
  ref <308>: DATABASE ACCESSION NUMBER: AK109208
  ref <309>: DATABASE ENTRY DATE: 2002-08-28
attgactccacctttgcttccttctctactacatctcctcctctcctcacgtttccgccgccgccgccgcctccgcctccgcacggccgagcagcggcgagcagccgccggcgtcctgctgcttcctactccgcatcctcgcaacgccggtttttcatcgtttgattgttggagaagaaggagaagaaccgtgttaatctgatctgaccgaagcgagtttgggattatggcgtattacgccaggaggggtggggatagggttagtggtggtggccgtgttcaaggtggtggaggtggtggaggtggtggtgggagaggtggatatgtgctgcgtggaagatcagggatgcctcctcgagggccccttggcctcggggttaactcgcggccatcagcgcgcactattgctaaggcaaggccaccgaaactgacgctgtgtttttgttcatggtcagatttctcctgaatacgct

SEQ ID NO: 11861 - DNA, 475 bp, Oryza sativa
  ref <308>: DATABASE ACCESSION NUMBER: AK109209
  ref <309>: DATABASE ENTRY DATE: 2002-08-28
attttcgagagggaaaaagaaaagaaaaaaaagaaggggggaagaaagaaatggtgaggcccgcactgctacggtctcgctcctcccctcccactccgtcgtggccggcagcgggagcagccgctgcctcctccgccgccgccgccgccgccgcgcgcgcctccgcgaatcctcttcctcctcctctctcctcgccgccgcccaggcccagccgcaggagcatggccagcgccggcgtcggacgcggccgggtccgcgtcgcggtcgtcggcgacgtggtaaccccctccttgccctcttcctccgtctcttctttgcggcgtgcctgggatgggggataggccagacatgggtgctggtgtggccttgcgattctcggtgggtttcgtgtggcgtagcataggggattcggagtgagagggagatggctttggggacggaagcattctaccaattcccgccccccccccccccc

SEQ ID NO: 11862 - DNA, 609 bp, Oryza sativa
  ref <308>: DATABASE ACCESSION NUMBER: AK109210
  ref <309>: DATABASE ENTRY DATE: 2002-08-28
atccccccatcgctgcagcggagcaatcgcccatcgccgtcgtactccccatctcgtcgctaccgccgtccccaccgcaccctcccccttcaccgctggcggtgaaaccagccgccgccgtccgaggaggtctgtcctctctctcgcgcgcggtctcatctcttcctgctctctctcgttcctctcttatcctcacgcgcaagagagggagagcggagatggcgcgcggcgactgggtggcggccgagcgcggcggcgcggccgggcggcttggcgtggcgtcgacgtcgtgtggcggcatggcgatgggagcagtggagaagtggtgcatcggtggatggggaagcagaggagggaccacaaggcggcggccgactcggtcgaggcgacgcggccgctggggtgatcgcacgtcggcgctcggcccggcgccatggtggcttgggtcgggcggagacggcgatgccgcgcatatggcgtgggtgacggcgcggccactcggcggggaggccaagacgtcggcgaggcagcggccgggcgtgtcggcgcaggcgacggcgcggcggcaaccagactcggctgcgcggcggcgcggccgaggcagacctt

SEQ ID NO: 11863 - DNA, 693 bp, Oryza sativa
  ref <308>: DATABASE ACCESSION NUMBER: AK109211
  ref <309>: DATABASE ENTRY DATE: 2002-08-28
agcctgctcctctgcatcaactgtttgctgcccagtacagtagaggcctgcacttgcaagttgcaactgcaagcaatggcgggaagcgggagcgggacaccgtgcgcgtcgtgcaagctgctgcggcggcggtgcacgtcggagtgcgtgttcgcgccctacttcccggcggaggaggcgcagcggttcgccatggtgcaccgggtgttcggcgccagcaacgtcagcaagatgctgctcgatgtgccgccgccgcagaggcccgacgccgtcagcagcctcgtctacgaggccaacgcccgtatgagggaccccgtctacggctgcgtcgccgccatctccttcctccagaaccaagtctcccagctccagatgcagctcgccctcgcccacgccgagaccgccgccctgcaactccagccgcagcagcagcaccaagatcaagatgaccaccaccaccagcagtgcatcctggagaatgctgctgctcatcaccagctgatgctgcaggaggcattcctcaagaaagagtccatgtggacataattgtagtagatgctttctagtaaatctttatgcttcgattgatatgatttgatgttgcacaaagatttatagtaaatctttgtgcttgttgtcttctcttacgtaatttccggaaagaatgaaaatgaagaacaacaattcggtctc

SEQ ID NO: 11864 - DNA, 995 bp, Oryza sativa
  ref <308>: DATABASE ACCESSION NUMBER: AK109212
  ref <309>: DATABASE ENTRY DATE: 2002-08-28
ctccagcccgtccgccgccgcccacgcctccgcgaggctctccggcgacgcaacgaagacacggacgcgacgggggcggcggcggcggcgcgcggcgcgtggcgcgacccggaggcgacggcgacggcgacggcacggctcactcctccggccgccaccttctctccgattgcacacgcacccattagacttggagaagaccaacctcctccttcctgggaccttgtaccctctccttcctgggaccttgtaccctctccaagagttaatatgcttggaagaggttctccaaggttgaccatgcttttagcgaaagctgcacaaaagaagaactctctgaaaggtcgtcctacaaaaaagcatggaggttctccaatagaaaaaaacaagagcctcttggaacccagccctagagaagattcttgttgagttattgcatgagcacaacactcctgagtataggggtcagaatggatggacttcagaagcttggaacaaaatcgtgaaggaattccatgagaaggacatatatgtctgcttaacaaagtcccaaatctaagaaaaggagaaagagctaaaaagagaatataggatgctgaaagaggctagaaaacaaagtggagcttcatggaataaccagagatgcatcattgaggctgagcctgctatatggaacaatataatcatctcatttcctaaagccaagaagtttcgcaccaaatctttccctctatttgaggccttggagaactttacgatggacatactgcagaaggaacctacaatttcacctcaactgagccattgcaacatccaatcattactcaaattgagagtgatcaagatgatctcggtaacactgagattatctttccagattatgaggacactttggcttatcaagtacaagatgatgcagatgcaactgaagatgataatgcaaatgctgaaaggcttaaagagatgccgcaaagaagggttgttgctgtaccaag

SEQ ID NO: 11865 - DNA, 581 bp, Oryza sativa
  ref <308>: DATABASE ACCESSION NUMBER: AK109213
  ref <309>: DATABASE ENTRY DATE: 2002-08-28
agatcaaccaatcgaagaacaagctttgatttgatttgattagctgcggcgcgaattcgatcttgccagctcgagctaagctagctaagctgcccatggcgccggcaatgttcgtcggaatcgccgccgccggagggaagaagggaggggcgaaggatgaggcggaggagctgcggcggcggaacgcggagctggagagggaggtggcggcgctgcgggcggaggtggcggcggcgcggcggcgcgcggagacggcggaggaggccgaggagcggctgtgcgtgcagctgggcgaggcggaggtggaggcggtggagctcgcgcgggagtaccagtgccgcgtccacgacctcgcccgcgagctcgccgccgccagactgctcgtctcatccccatcgccatgagaagagaacaagctagctagattgttgcttgattcttggtgttaatgattttctcttgcggagacattgaaatgtcgcttgtagtttagagcagtaattaagaagatctgtgtagaatttatccttttgaaaagagagagagagagatctgtgtagaattgaggtggattttggatt

SEQ ID NO: 11866 - DNA, 586 bp, Oryza sativa
  ref <308>: DATABASE ACCESSION NUMBER: AK109214
  ref <309>: DATABASE ENTRY DATE: 2002-08-28
gtgaaatcagaggacaagctggtaaacatatatacatatataatccaatccaattcagatttacatgtgatgtgatcgatcgacgcattcatgcatgcatgaaattaatatattgaaatatgaatgatcaatcaggtggtgctggtattcatggcgccgtggtcggagccgtggaagctgatgaggccggcggtggagaagatggcgtcggggctgaagagcgaggaggccgaggtgtgcacgatcagcgtcgaccggttcaacacgctggggcggctgctgcgggtggaggcgctgccgacgttcgtgctggtgaagaggcaccgggcggtggctcgcgtcgtcggcgtcaaccgggacgatcttcacagcagcatcaacaagcacctcgcaccaccctcttcttctccacaacccattaatatttcttagtgctgttgatgattcttggttgattgcatgatataatcgagtaatgccatgcgtcttaattatgagttgtaattgtttatcacatactgtatttgagacatattcaaccttgtttcgagaaaaaaaaatggagatgaaaaaaaaatctattcat

SEQ ID NO: 11867 - DNA, 656 bp, Oryza sativa
  ref <308>: DATABASE ACCESSION NUMBER: AK109215
  ref <309>: DATABASE ENTRY DATE: 2002-08-28
aacccatcctgatccagctcgatctaaccgatcgattcatcatcaacaattcacaagaactccatcacttacagtgcaaatcaagctgatttcatcagacaaatttcactaataactagcttagctgccgtagagccgtgtgcgatcaagatcgtatcatccatggcgttctacaagtacggcttcgccttcttggccggcaccggcttcggcgccgcgctcaccagcctccgccgcgacggcgacagctgctgccccatgcgccgccgccgccgccgctgtcgccgccaccaccacgacgacgacgaccagctggtcgacggcgacggcgacggcgaggctgcaggggaagagcgagacacgaaggagagcaagagggcgacgacgacgacgaatccgaaggccaagaaaggcagcaacaaggagaagaaggcagctgctagtgttgctagggaggaggaggatgacgatgatgaataggattaatttgagttgattattaattaagttcagtttgagttcagctattatatatttttaggtgcttgattccgttgctgcgccagtttaattgtgcttgtttagctctgtactcgttatcctgttgtgtgtattgacaaaaataagagaatatacatatatacctctctgttgtt

SEQ ID NO: 11868 - DNA, 597 bp, Oryza sativa
  ref <308>: DATABASE ACCESSION NUMBER: AK109216
  ref <309>: DATABASE ENTRY DATE: 2002-08-28
aggcaaagcgcagcagcagcagcagcagcagtagccatctcttcttcctctcgcctccgtttccgccgtcgcctgctcggttccagctgagaccgtgcgcgcgcgcgagggagcaacctcgagaggaaggggatggagatgaagaagatcgcctgcgccgtcctcgtcgtcgccgcctcggccgccaccgtggcgttcgccgccgaggccccggctcctgcgcccaccagcgccgctcccgcggccgtcgcgccggccatcggcgcggcgctcggcgccaccgtggtctcgttcttcgcctactacctgcagtgagcccagccggaggaggaagagaggaagaggaggagatggatgcatggccatggctactaaaccgatccaaacacgcgcgataatgtgggtgctttgatttgtgccaactttgatgcctcgtcttctttcttctctttttataatgggttgtatttttgatgcaccggtttgatttcggtgctttgatttctcatatttcgtccaccctatttgaagggaatggatattgtactattattcaccatttgtttggattaaattaagatattggaattactggct

SEQ ID NO: 11869 - DNA, 645 bp, Oryza sativa
  ref <308>: DATABASE ACCESSION NUMBER: AK109217
  ref <309>: DATABASE ENTRY DATE: 2002-08-28
agtatattcacctcgccgcacggcagcggcagcagcagcgtgccacgagacgaccaccagctagctcgcaatggcgcagcacgagaggaagccagtcggcgaggcggtggacgtggaggcgggaggaggaggaggacggcagcgagctgcggcggcggcgggggagagaatgaggttgacgtggtcgtgcctcgccgtggcggcgggcgtggcggcgacgggggtggcgggcgcggccgtgctggtgtggtgggcggtggcgttccacccggcgcatgagcagctgtggatggtgcccgtcggcctcgtcctcctcggcaccccgctcgtcgcctggctctccctcttcgcctccggtgcgtgccgccgcctcggcagcctccgcgccgtccaggaccaggtcccgccgcccttcgctgccgagagatgactgggttgtcttcgatctgtcgtccgtccgtcgagtgtacattttcttagtcttattattcttcttcggtgttctttcttatcgtcgtttttcctaagatgatcggaatgtgatcagaatgggatccaaattctaaagaaaagttcttgctagtacaaacctgcagatttcagatgcttcgattgatcttgcagataagtttggcacttaattat

SEQ ID NO: 11870 - DNA, 684 bp, Oryza sativa
  ref <308>: DATABASE ACCESSION NUMBER: AK109218
  ref <309>: DATABASE ENTRY DATE: 2002-08-28
aagcctcttttagcttactcaagcccttggtcatcaaatggcaaacaacaacggatatggggatggtgatgatcagctcaccacatgcaccaagctggcgttagaccacattgacatcgacctggagaatgtccaaggcttcgacagcaacgccttcaccatgaagctgttcgacgacaacgacgatttgatctacttccacgtcgtgtttaccggcgagacgccgggacggcgcggcggcggcggcatgcgttactccttcgccgagatcgtcggaaaagacaagccggaggaggtcagaatgtggaaagagatggacgaagaaagtgaaaattgcaccgtggagaactgcatcttctgcaccgggatgtggcaccctctgtcgggtggcttctgtggatacaagaggaagaagaagaaccggagataggctcttctgcaattatcagccactgaagctgcatgtctcgtcgtctcatctttcttctaactttgttttctagaaataaattgggtaccaattaagtttagttgttatcgatgagttgtcgctttgatagatcgcgacgtagctggctgccgtgcttgcttgcattgcttagtatacatatgtgcccaaattaatttatatgtaatttctgttgcttgcttgaagaattaattacttcatcagtgcgtttaatt

SEQ ID NO: 11871 - DNA, 715 bp, Oryza sativa
  ref <308>: DATABASE ACCESSION NUMBER: AK109219
  ref <309>: DATABASE ENTRY DATE: 2002-08-28
ctcttcctcctgcagcctctccacctcctgtcctcctccagcctctcctcctcctcctgttggcgtaggaaaccacggcggattagcgacggtgacgacggcgaccgggaggggcgccgtgatccacggccgggaagggcacgggcacgggtgcaggcgtggtggatccggccaccgcagagccgcggggggcggatctggccgccggagggccacggggagcggatccgagcgcgggcggcggcgcgcggctgatctgggcacgggcggctgctctcggacgccggcggcggtgcgcggcggatccaggcgctagcggggaggctagatccgccgccgccagatcggcggcgcctggccggtggtcaccggggagctgcatgctagctgcagagaggaggcacgaccgcacgagaggatcctctcttcagttcatgcgtttggttctgatctgtttgcacgtgaaaccatttctgcagcgggctgcggtggaggctgcggcggggctctgtgcagcggtggtggaggccggcggggctcggcggcggcgtcgtcgaggcagaggcagtggaggcttgaatgcttgaacttttttgatgcttgaatgcttgggggaatagaaatttttgactgtaaatttaaattgtgcttgtgtgaattgaattttttgactataatttttggttgggtgaatggaaatttctgtggatttttg

SEQ ID NO: 11872 - DNA, 601 bp, Oryza sativa
  ref <308>: DATABASE ACCESSION NUMBER: AK109220
  ref <309>: DATABASE ENTRY DATE: 2002-08-28
agatctctcttcccatctgatgacatcatagtaccactaccctccgggcatggcggcgtcggcgccggtggaggtcggcgcgcagggcaccatcggctcgctggtgtgccgcgaggtcgagtacttccgaaggatggaggtcgccgtcgtcagccacgaccacggcaagaacatgagcagcagcagcaagcaagcaagccgccgccgccaccggcagcgtggggagccccaggaccaggagcaaggtccggccgccgttgaaggagggcgcgggcggcgggcctacttattcttgcccagcatttgctcgtcggcggaggtggcggaggccaccggcgccgccagggtcaggtaccagcatctggggcaagatgagggccattctcttcctcaataatacgcattttcgtgcaggccatttgcatcatatcagatcagatctggagaagaacagaatgtcagggtacctaatgcatgttcgtcctgctctcatctttcgtcttctttctttgatttttgttcagggtcaaaactgtgtaatgacatgtgtgccatctggcagaattactactttaattattgaagtggattatttggtcct

SEQ ID NO: 11873 - DNA, 645 bp, Oryza sativa
  ref <308>: DATABASE ACCESSION NUMBER: AK109221
  ref <309>: DATABASE ENTRY DATE: 2002-08-28
ctaaattcattctcctccatctcccaccgcgagtagcaacagcggcggtggcggcggcgacctgcgatctcgcagccgaggcagggcggcggctacctgccctaccatgagcagcaacggcaatggcggcgccctcccccaccgctagcggtggctgcggtggctcccttcgctacttccgctgggtggattcggcggcagcggtgtcctacgggtcgatggagcggcctcggcgatggcgtgtcttgagccgctggcgctcacctctcctccccatctttctcagcggtggccggtgatctcgcgaccaacgcagggcggtggctcctccccccaccgcgagcaatggcggtgccctccctgtcgtgagcggccgtggcggtgccctcgcccaccgctagcggtggcggccttccccaccgcgagcagccgcgatagcacgctcctctacttccgatgggtaggtccggcggcagcggtgtccagcgggtcggcggaacggcctcgatgatggtgcgtcttgagccgctagcgctcgcctctccttcctatcctcctccgccaccaccgcccatcctctcgtcggacgacgagcttgtcatcgctgtcaagacgataaatcaaggttgctttgtgatttgctcg

SEQ ID NO: 11874 - DNA, 977 bp, Oryza sativa
  ref <308>: DATABASE ACCESSION NUMBER: AK109222
  ref <309>: DATABASE ENTRY DATE: 2002-08-28
atggcggtggcgatcgccggcgccgccactcgccgcctcctcctggcgcccgcccgccgcagggccttctggtcctcgccctgggcggaggaatctccgcactcccctgggccctccgccgacgagaataagaagaagaagccctcgtcccaccaccgcctggccgcggtcatggacgccgtcgccgaccgcaagctccctcccgagctccgcggccgcgccaacgccgtcagatctgagactgatataatcaatgttgtggaacaaagaatatggcattcaatggaagaagggcactttgaaaacctacctgggaagggaaaacctttaaacctcaattcaaaccctcatgctgatcctgcagaagacacactttacagaatactttcaaggaacggctgcgcacccgaatgggttgagctgaacaaggaaattcgaggcatgattgcacgatggagatcagcattgaggaaggcttgggcgaaccgctctgaggatgatcgttctacctggcatgatgatcacagactgcttcaggaacaaattcgccaaataaatgacaaggttttccgatacaatctgatagtgccctttgggcgccaaatgtttggtcttaactgggacaaggagctggacaaattgaaacagtaagacgggaaaagtgtaggctactgggatgcagttttataggcattatcctgtattttgttgtatccaagaataccttagaactcgagcagtggtaaatagcttgaataaaaaaattaagaaactatagttatatacgcggcatttttgtagtcatcttgctcttggatttagattttcagatgttagcctgcagtgtaggacatgaagcaaagggggtcgaaataatggtgtgtagcatgcagaacagctaattttctgcagcagagctgaatactgaagttgtgtgctgtactatagtagaatttgagaatggtttcagattattc

SEQ ID NO: 11875 - DNA, 640 bp, Oryza sativa
  ref <308>: DATABASE ACCESSION NUMBER: AK109223
  ref <309>: DATABASE ENTRY DATE: 2002-08-28
atccatccatccgaccgagtcgctcacgtctctctctcgcccttgctctctcgcctctctctctcgcctccctctatccctctctctctctctctctcggcggcccggcggtggcccgtcgaggtaggcgtggcggtggctggcaacggcgcgccctcccctccgccggatctagctggaggggaggtggtggaccttggggacggccgggcggtggtccggtggaggcggttgcggcggccgcgccctcccctccgccaaatccggccggagaggaggcagcggacctcggcggaggcggcacagcggctggcggcggacctcggcggaggcggctggcggcggccgtgccctcccctccgctagatctggacggaggggaggtggtggacgtcggggacggtcgggcggcggtccagcgaaggcggtggcgccagcggcgcccgatggatttgttggatgattttatagttcttttagatttttttgtgatttgtggatgattttatttctgaatatgtttcatctgtgatctgtgatatgtgatttgtgattcgtgatttgtgggggtttggggatggagtagtgacgatgattgtgagttccggctcgattcgagtcggctctttttttttttttg

SEQ ID NO: 11876 - DNA, 442 bp, Oryza sativa
  ref <308>: DATABASE ACCESSION NUMBER: AK109224
  ref <309>: DATABASE ENTRY DATE: 2002-08-28
caagatgggcattgaaaacatgagtgccgtagtgaatttcaatactgcggcaagtacgtgtggtgcccctatacaaacagtcaactcttactccaaaaacaaggataagcaaaggatttgacagggctacatgtacatttgccgcatctacaagcaatctcaaataggaatgagcagcaaacctcataggtggtcaacaatccatccaacatagtatcccctttctagagtttagacatgtggaatagtgacatgagaggagaagtagcagctacaaacgagttgatatatcgtggttttgctagactctatgttagtaggcaagtgtgctagcacatggggacaggttgtattcaccaggagtttgggaatgtcacaaagcgtgtctggagtgtctgatatattgacgatttcaccctttaaaaaaaagacgtattttaac

SEQ ID NO: 11877 - DNA, 832 bp, Oryza sativa
  ref <308>: DATABASE ACCESSION NUMBER: AK109225
  ref <309>: DATABASE ENTRY DATE: 2002-08-28
gcgcgccgccgccgccgcatcgaccgacgggagagtcaagcaggaggaggagggaaggagggagaggatggtgaaggggaggccgaagcccacaccggtgaacgcgccggcggaggtcgtcttcgacccgtccgcgcccggtgcccggaggccccgccgccctggggcgccttcgtcgtcgtcgtcgactggcgagtggcacaacttcatgggatcgagtctttcggatatgtatcggaagccagctgcggaaaaatctgatgatacttctgatgatgatgaggagcctgacattgatattgggaagttgttgaaagatgtagagcttttcggtgcatctacatggaaggaacggaagcaattagagaaccgtaaagtagttcagttgggtggaaaggccattaagaagcaccgaacgccgttaagtgtatcaaagccagctatgaagaaccaaaagaaaagagaagagaagaaagcggaagaggaaagactacttggaatatttaggaaacgggattccaagaacagcaaagctcaaaagactagacctgaggaccgagtacttagggctacccaagggcacttcaagaatggtatacttgatgtcaagcatcttttggcaccacccaaactatcgggtcgggatgcgcctgagcagaaaatgagaatgggcaagaaaaatggcaagggaaagcagaagggaggcagaaggaagagacgttagataaaacaccctattagcttttgtattaagatggactcatcatctacttgtatctttcagtgtaaagatcgaaaacattttgcagaggcatgttttgtttcagtgtct

SEQ ID NO: 11878 - DNA, 583 bp, Oryza sativa
  ref <308>: DATABASE ACCESSION NUMBER: AK109226
  ref <309>: DATABASE ENTRY DATE: 2002-08-28
ttgcggccaccgcggcgccggcggcgcagatcctggacttcgcggcgcagcggctcgtcggggtctctccggcgatggcgccgcgcccgccgtcgacgctgccgacgacgacgaccgcggcgtcgtcgccgagcgcgtggcctcacggcggcggccacgggagctagcgcgcgcgagagagatcgaatacgctcgtgtcatcgtgggcatgcatgggtggcggccatattttttgtttttttcagcatctgtgctgtgtgcgtgtgcatgtccttgcaacggggtagtttaatttggtttgtgcctttgtctttcagaaggtatttgctcgattttacgcttaaaacttttgatttcttgtcacctaaggtaacacactactaattctaaaaattgtagtcctaggtaagatataacttttgtgcattttttacagtatttactattttttttttgttgatgtgtatggttttgctttattttttatcacttatgaatattttcatatcaaaatttttgtaaatattttatgtctatgtgaaaatgtttaacatgttaactaaggaggaaagggactgttgag

SEQ ID NO: 11879 - DNA, 602 bp, Oryza sativa
  ref <308>: DATABASE ACCESSION NUMBER: AK109227
  ref <309>: DATABASE ENTRY DATE: 2002-08-28
gtctctcatccatatactgctatattaattaatcactccatatgtagatctcaggctcttcaaggagcagccacgttctccttggcgagcggcgcgatctcgtcgccttcgatccccggcgcgctgccggcgacgcccaggcccaggagcacattctcccagttcttcgcaggcccctgaaatccatgttgcaaacaattaatcatcatcagcatcagacaggagaggtcctggttcatgcagttcctgaccatctcctcgtacgccggcgtgccgacgaccttgatggcgcgcttcagggtggccgccaccttcttcacgtcgcttggctccaccaccttgcactgccaaaaaaaaccatataaccagcaaccatgtaaatgtgtagtagtgtaccgacttatcggtattaggatgtgtcatatctgattgttatgtaaatgtataggcttacgtcgacgctgagacggcccatgtggaaaccagtcttgccttcgatgaccgtgtccacgagcccaccggtggacgcgcaagcacagggctggagaaatcaacaaggaaaatcatcatgcatttgcatttgcaattgcattgcattgcac

SEQ ID NO: 11880 - DNA, 667 bp, Oryza sativa
  ref <308>: DATABASE ACCESSION NUMBER: AK109228
  ref <309>: DATABASE ENTRY DATE: 2002-08-28
gtgtctcatcacgagctcgatcgtttcccttcccccccaacctgagcgttccaacttccaattcaagcgcgcgcgcgagagccgatggatcatggcggcggcgagaggaggagcgccggcgcctacgaggcggcgctgagggcggtgcagaggccggcggcgaagccgtggcgcggcggaggaggaggaggaggcgcggggggatcggcgggtgccgcgggggcggcgccgcccaaggtgtaccgcgtggcgcccagggacttccgggagctcgtgcagaggctcaccggagccggcaccgcggcgccggcggtggccatgggcgcgagccaggctgtgcctgcgcccccgccgccttacgcgggtgtcccggcgcacgggcagagcgacgcggcggcggcggcggacatgttcgactacgcgtcgtggttctccgtgccgctgctcagcccggcctccatgccggccgccggctacgacggccagctccaccatggacatggtgctttactgtagttttagtatagtcgctgtccttgtaagatcgagccaaattttgcagttcgatcgcttcttcttcctgtcgtagaacgcttgtattagtttcttcaaaaacaacaaattcaaagaattcgatgaataaacacatgaattagttctcggcggc

SEQ ID NO: 11881 - DNA, 530 bp, Oryza sativa
  ref <308>: DATABASE ACCESSION NUMBER: AK109229
  ref <309>: DATABASE ENTRY DATE: 2002-08-28
acccttgttcattcctcctcgcctcgcctcgcatctcggctcgccgcgccgtcagatccctcgcctccgatggcgcaccgccgcctctgaccaaccaccgcccccaccgccgcccacatgccgccgcccatgctcgcggatgcggcggcggcggcgccctgctcctcctcatcatgctcatccaactccagctcttcctcctcctcctccgcgatctggtcgcgccgccgcgacgagatcaccttcgaccgcctcgacaagttctggagtgccttgtcgcctcaagcacggcatgagctcctcaggatcgataagcagactctcattgagcatgcacgcaggaatttgtactgttcaaggtgcaatgggctgcttttagaaagtttcacacaaatggtcatgcatgggaagttactgcaacaaaaaggtccaggtgttgtacaagatgattcttggggaggcctttcgacaacaaaggatggcctcctgactcttcttgactgcttcataaatacaaattcccttcatgt

SEQ ID NO: 11882 - DNA, 517 bp, Oryza sativa
  ref <308>: DATABASE ACCESSION NUMBER: AK109230
  ref <309>: DATABASE ENTRY DATE: 2002-08-28
gaagtctcgatgcgcctgctcatctaccgccgccgcccgcgtgttcccctctgcttctctcatagcagctagcgccggcggcggcggtgagcggccgtgccgtgccgcggatgtgtcgtctggacagcaagtctgattctgataggttcttctcctgggttggactgatggattaggatcagtaagatgcatattgtagtaagatgcatattgtggattgagctcaagcctcactttttatcatggtggttatgtattttctgtgcaaaatataaaggaggaaaatgctcagcctgaaaggactttaattgccataagaggatggttttcaaaggactgtagtttaatatgcaggctttgtaatatgtactatgtaatctgcgaaatgttaacagtttgcaaggattgtagttgagatcatacaagctgcaatgtaattgcaaggaaatttatccgtttgtaatatgtacaatttttgtaaatctgaaatacacatggcatgttggtgttttgaatt

SEQ ID NO: 11883 - DNA, 472 bp, Oryza sativa
  ref <308>: DATABASE ACCESSION NUMBER: AK109231
  ref <309>: DATABASE ENTRY DATE: 2002-08-28
atggttaggaatttgtcccagcgatcgcagaaacgggcgctgctaacgctaatcaagcccgcgatttgctcgctgaggcaacgcaaatgtttaccgcagccggcttaatcagaggcaccaacaaggaaaacaatcttgcccgattcagaagtataagcccccccccccccgatcatatggaagagaacacacctagacaaagacctcgcgtgaaggtcgggtcgcgcgtcgggggaggaggaggagatgggggagcgaacctcggatctggcggtcgaggacgcggcactcgttgcggagcttgcgctgccactcccgcagctgctgctgcggcgtcggccgcggcttcagcagacccttcaccttctccatcggcggagctcgccgccgccggatgaatcacgcggtatctaccgacgccgccacgcggggaggaggagagacagccagacaggacgaggagcgagaaaag

SEQ ID NO: 11884 - DNA, 600 bp, Oryza sativa
  ref <308>: DATABASE ACCESSION NUMBER: AK109232
  ref <309>: DATABASE ENTRY DATE: 2002-08-28
tcgatcagccgtcgccgctcacccactccgacatgggcctcaacccctccaagcgcgtggacgccgcgctccggggcgcgccggcgttcgccgccgcttgcgacgacgccttcggccgctgcctcgccgacgcccagtacgccttcgccggcgtccgcccctaccagctcgccgacgcgtccgcgcacctccactcgtcgctccggggctccctcccgctcgtccgccgctgggtgccctcgccgccgccgcgcgcccgcgtcgactccgcgctgcgcgccgcggggctcgaggacgcggcggtgctctcgaggggccagttcagggagttcgccgccgagctgttcagggaggccgtgctcgccggcgcggcccaggcggctctcgtccgcgccccggcaggcgccgccgggctcgtcggtgttggcctcgcgacccgcgccggggccggggtggtagggaggttggacgccatctacaccgccggcgttgcggctgctgtttacctcagcttgggctaggtttatcccacagcctgtaaaactaccatttgtaccatgtgattttacctggaatgtcagttccttcgtagtagcaaat

SEQ ID NO: 11885 - DNA, 911 bp, Oryza sativa
  ref <308>: DATABASE ACCESSION NUMBER: AK109233
  ref <309>: DATABASE ENTRY DATE: 2002-08-28
gcttccgcttccgctctcttctccgcacctcatggcgtccctcctctccctcccgcgtctcactctcaccccgaccccacgcgcgaaccccggccgccgcagcgcccgccccacgccggcgagcatcacctgcggcccgcgcgacaaccgcggcccgctccagcgcggccgctccctctccacggaggccatcctcgccgtgcaatccctcaagcgcctcacctcctccgaccgctccccggccgccgccgccgccgcggcctcgacctccctcggccgcctcctcaagggcgacctcctcgccgccatggccgagctccagcgccagggccactggtccctcgccctcgccgcgctccacgtcgcccgcgccgagccctggtaccgccccgacccggccctctacgccacgttcgtctcctcctcgccggccaccgaggacggcgccgccgccgtggacgcgctcgtggaggcgttcctggaggagaaggagcggggcggcgggttcgtggatggggaggaggacgtgtacaagctgacgcggctggtgcgcgcgctggtggcgaaggggagggcgcgcgcggcgtggagggtgtacgaggcggcggtgaggatgggaggctgcgaggtggacgagtacatgtacagggtgatggcgagggggatgaagcggctgggcttcgaggcggaggcggcggaggtggaggcggacctccgggagtgggaggccaggatctcgccgccggccagagacgtgctcgacgaaatgcgcgcgcgagaggagcagcacaactgcggcttaactgtaaatctgattatcgttttagaaacctgaggattattaaagtcgtagctgcttctcttcttttttttttactgcaatttttgcaaagagagtaaagtgttctgct

SEQ ID NO: 11886 - DNA, 960 bp, Oryza sativa
  ref <308>: DATABASE ACCESSION NUMBER: AK109234
  ref <309>: DATABASE ENTRY DATE: 2002-08-28
gtagtagtataatttggtagtagtgagcaagtgaaactgcaagtgagctaaggtgcaagaagagagaggtggagatggattggtacgcgtggctggcgaagaccgggttggcgccggcgctggcgtacgagtacggccgcctcttcaaccagaacgagctggagcgcggcgacgccgcgcacttcgaccacgacctcctcaagagcatgggcatcgccgtcgccaagcaccgcctcgagatcaagctcgccaagaaggactcctcctccgccgccgacgcaggcggtggcgactcctcgtcgtcgtcgtacgcgcagctgatcgcgcgcaaggccgggaggtgcatcgcgcggtgcgcgcggcggctggcgcgaccgcggggtgtcggtggagggagggggtcgtcggtgaccgtggtgccgaggatatgcagcggcgacgacgccgtccgcgtgggggcagtgcaggcggcggcgacgaggaggaggaggagcgtcaagaagatggtgctcatgatcaccgacggcggcgccaccgccgcgaggggcggcgtcggcttcgccgccggccggttctcggggtcgcagaaggcgagcctgatgttccacgactgctacgaggaggaggacgacgactacgaccacgaggaggaagcgcggtgcggcgacggagccgagggcggcgacgaggatgccgaggaggaacggtgctccgacggcggcggcggcggcggcaccgacgtcgagatcaagtgggactccatgttccaggacctgaagccgacgtgattgagttgaggcaatttgattaattcgcgagtttgtgtgtagctttttgtgagagaatttttacatctctctttgtggtgcgagagcttaattaggatggtaatgtgtacgtgtctatttgccatgagtttagacgataataatatcgagcgcaaatgttttgagtgagatt

SEQ ID NO: 11887 - DNA, 527 bp, Oryza sativa
  ref <308>: DATABASE ACCESSION NUMBER: AK109235
  ref <309>: DATABASE ENTRY DATE: 2002-08-28
ctccggccatggcgtcgcgcctccgctccttctcccgccccgccgccgcgttcctccgctccgccgcgggacggagcccggcggcctcgctgccccgagccgtcgctcccgtcaccagggcggcgtccgtggggcggctggtggggctcgcgaggtcgctgcagccgctgcacagcgcggtggcggaggcgcggctgacgtcgcggctcggggcggaggtggcgcgggccgtgtcgcagggtacgctctgcagctccttcccgggagtctgagtctgatatcaaatctaatctttgcatcctgcatagacgggtctcagcgtgcctcgataacgaaagacgacactccggtgctgccgcgcgcggcagactttctaagccttttgttttccttcaataatcggtttaattagtgtggactgctgtattcagggacatccacaaatatgataatatgtgcctatgaccacatcttacctggaagcaattggtattttttgcatttcgtttgagttaaagcgtccactc

SEQ ID NO: 11888 - DNA, 607 bp, Oryza sativa
  ref <308>: DATABASE ACCESSION NUMBER: AK109236
  ref <309>: DATABASE ENTRY DATE: 2002-08-28
gtacagatcaaccaagcccagagccgcgtcgagatcagcgagcgagttagtgagctgtgagccgccagatcgggccatgaggatccgcaagcgcacgccggtcagggccgcctcgccgtcgccgggaccgtcgccgcagccaaaggaagatcccgccgccgcggcaaaggcagaggacgacgacggcgtggaggaagaggaggagtccaagaaccacggcgctaacctccggtgcaacgacgacgacgacgacgaggagttccactactacggcgggttacagcacggcggcaggaagcgggcgaagagcggcggcggcggtgggccggcgtgaaagctctgcttccccgccggcggctacgtcattgattcttcgcaccagcgtttgcattgcgttgcgtcgatcgatcgatcacacactacggtttcagagtagcagagctcactgtagctaaccccagacaaattcagaggcaaaaaatgccatgaaacattttggttgaaaaatcttggaccagatgcacaagtaggaaagatggattgaaccgaggtaaaatggcaaataattttggccatatgccctgttccttcccggggttcttgcttc

SEQ ID NO: 11889 - DNA, 592 bp, Oryza sativa
  ref <308>: DATABASE ACCESSION NUMBER: AK109237
  ref <309>: DATABASE ENTRY DATE: 2002-08-28
cagatgccggatggatgaatccggccgatttgggcggatttggccgcccgagcgagcgggcgagtcgggcgagcgggcgagcggtcgtgtcaccgcgtggagagagagagagagatggccggtgcccggcgacgacgacgacgatgtgctgcggccgggaggagggagcagcggcgagtgctggcccgggcgacaagcgcggcggcgacggcgaggccgatgcgtgcccggcgacgacgacgacgacgtgttgcatcagggggagaagggagcagcggcgagccggcgggaggaggcggcggcgaccgggggaggaggcgcgaggtccccgccggcgagaggaggcggcggcgacgggaggaggcgcgaggtccccgcctgcgggaggaggcggcagcggcggtgagcccccagaggcccaaatccagccggcctttttcctttttttttcttttttttctttttctttttcttcttttttctatgtgtatttataatggagatagtagtgtaaattgttggaaattttatgttttgtattgtgtattaatttgatgggggttatactcaccatataaaaaattggatcacc

SEQ ID NO: 11890 - DNA, 722 bp, Oryza sativa
  ref <308>: DATABASE ACCESSION NUMBER: AK109238
  ref <309>: DATABASE ENTRY DATE: 2002-08-28
tactggacgaagaggcgggcggcgcggtcggaccaggcggagtacaacgtggggtggagctggctggagcggtggatggcgacgcggcaggcgtcgtcggaggcgtcggccgacgactgcatgagcaagaacgcggcggacgctggctcgacggcggcggcggccggagggcggcgggtgatcgtggtgcggcggcggcacgacctcggcgccggcgccggcgaggagaaggagagctgcgggtccaacgacgtgtccgtcgtcagcttcgacggctccagcggcagcctcagctgctacaagcccggcagcaagagccgcctcaggggcggcggccggagcctgcctcgccggaaggtggcttcctccgaccaccgcctccacgcaagatcacacaaggtgagcaagaaggtgcaccggcgaggtcaggagcaggagagggaagaagccgcggcggaggcctacgacggcaaccaaccaccgacggattactgagacaaaagctgaccggggaaggagcagatcgatgatgtacatatgcttcttcaatttgcgtggagcctccaccgaattgctgtgctgtgttgtgtaatcaaattgctatgaaatttggccccttttttttcttcttttgattgctttgttttagttgattatccatccaaaacgagaaaccacctcctaaaccgatgaagtgattggtgattgagtgcggaagtctg

SEQ ID NO: 11891 - DNA, 1057 bp, Oryza sativa
  ref <308>: DATABASE ACCESSION NUMBER: AK109239
  ref <309>: DATABASE ENTRY DATE: 2002-08-28
gtccgctcggtttccgaccattcgttccgcttcgggcggcgcgaggcgaggataatggcggcagcgcacgcgcacccgctctccctcgccgtcctcccgtcgtccccggctcaggcgacgccgctgccgctcttcctgaggtacgctgctctccgtcgcggtgggagatgcggcggagcgacgaggccgctgcggctcacgaggctgcgccgcggccgagcggcggtggcggcggcgggggaagttgacgcgcccatggagcagaccgaggccatgatgagggtggcggcggatgacgacagcgtcaccgccaccgtggtgtccgtgctcctgaccgtcgcgttcgtcgggctctccatcctcaccatcggggtgatctacctgtcggttaccgacttcctgcagaagagggagagggagaagtttgagagggaggaggccgagaggcagaaagaggaagcgaggaagaagagggccaaggcgaggggaaggaaaagaaagttctgaacttctgattgctggtacagcacttcgtcttccttttccagtgttcaacgagctgtatcaatctggatactgttaaaactgaagctatgcatcagatcagcttgaaattgttgaattatgcatgttgcttttgaagctggatggttgttatatattattgctcctgtgtttaggttggatttggactggttaggcattgacttttgtagtgagccttgaaagccacagctagatctatgttttattctttgattgctatccttctggaaggatgaaaaaaaggtgttctttcttttgtgaaatgtgccatacgttattgacgtctatgttccataagctaagaccctaggaataaacccacttctgtatgctggagtatgaatacctgttacatatgtagcgtactccctcattatactaggattggtcatatcccatcttaagttaaattattttgggacgaagggagtagtgttaaaaatgtttgtatgaagtataaatgattgatacagtatggagcatcacaggtcttaagtttggtggtggattg

SEQ ID NO: 11892 - DNA, 598 bp, Oryza sativa
  ref <308>: DATABASE ACCESSION NUMBER: AK109240
  ref <309>: DATABASE ENTRY DATE: 2002-08-28
cacaagaactagctgcaaagtcctcaaggcgaacggcctccatcttctccttccagctcctcccatggcgtccctcgtcgccatcgccatcgccatggctctcatggtgcagaggatatcccagccatggctgaaattaacttgacgcatatcatctcatcatcacttgcatttcaacttctggattgtgcagacatgtttagctgatgcagtaaacgttgcctgtttgaattggtccttgatcaggtggttcaacctggccggcagatgactgcctttgctgctcggacgtcgccggcggcggcggcggaggcgttctggcgtgccgccatgcccggcgctcccatgccggacgccatcgtcgagctcctccaccatggtgaatccgtgaacttaattgtgtacactactttaaatgatactagtattagtgatggtcactactagaaaacaagtttttgcaggcagctagtaaatatttcgccggtaggctaaggcctgcgaaagtcgttgatttttgcaggcggagcctctatccgcttgcgcagacggcatccttgtatcacccacttgcaaaaagtttttgggggcaaaaaag

SEQ ID NO: 11893 - DNA, 747 bp, Oryza sativa
  ref <308>: DATABASE ACCESSION NUMBER: AK109241
  ref <309>: DATABASE ENTRY DATE: 2002-08-28
gggaggccgtagcccgtagcgaccatgtcgattgctccgtcgagctcgctccgtgccctggtcatccccatcctcccctccgtctcctcctcgccctctgctcgcccagggctccgcggagtggcggcaccggtgcagcacgcgcgggcgcggcggcggaggggggcggcggtcgtggcgcgggcggcggcgctgccgtcggacgccgagtggctggagcggctgccggagaagaagaagccgctgtacacgcacagcctgccgtgcatcgaggcgtggctgcgcagcatcgggttctcccagacccgcgaggaccgcgccgtctgggtcgccgagatgcccctctggcacgcccgcctcagcctcgacgtcactgacctccacatcaggtacttgaagagcggccctgggaatcttgacaaggacgtagagaggagattcagctatgcccttagcagagaagacatcgagaacgcaatacttggaggaccttaatctcatcaggccatcagaggctcaagattagaagttcttgcaggatcttagcttatgggcagcgcagtaggtgcatgctctttcatgagtgactaagaaaagctctgccctgctgctgattggtcgttcgacgtccatcaggaaggagctttgcttaagttcccttcagtcatttgtacaagagaaaattaattatgtatctcaatttcatttgtaataattcaatgtgcttaaggatgagacgtccagctg

SEQ ID NO: 11894 - DNA, 646 bp, Oryza sativa
  ref <308>: DATABASE ACCESSION NUMBER: AK109242
  ref <309>: DATABASE ENTRY DATE: 2002-08-28
atcgatctttactccccccgccctctccgcccacacacatcactcacaatggctgctcgtgctgctgctgctgatcttgccaagatctccaacctgggactgggcaagaacacgctcgcccagatttcggcattccgcaagcgcgccgacgacgccaagcgccagctcgcgcagctccagcagcaaaagacggacgtcgactttgcacactacaacaagctcatccgcaacaaggacgtcgtctcccaggcgcagaagatcctcgccgagttcaagcccgtgacgtacgacgtccaggcccagctcaaggccatcgacgccttcgagtccaaggctgtcgagcaagcgcaggcgacggcgtccaagatcgaggcggagctcaaggacctcaaggcgacgctcaagaacattgaggaggcacgaccgttcaaccagctcagcgtggacgacgtggttgccgcgcgccccgagatcggccgcaccgtcgacgagatggtcaagaagggcaagtggaccacgccaggctacgacgagaagttcggaaacctctcggccatctaagcttttgccaactctggacgtgctgttggaagttagatcggcagcaccgtcgtcatgcacactgcgcaatgctattgagaaaact

SEQ ID NO: 11895 - DNA, 465 bp, Oryza sativa
  ref <308>: DATABASE ACCESSION NUMBER: AK109243
  ref <309>: DATABASE ENTRY DATE: 2002-08-28
ccatttgacggaggagcggaagtgaacaaccgcgccacgccatggggcgaagcgagtcggcgtccgcaggatttccctctccgcccgtgccctaaaccgctcgccgccggcgacgttgcgcccccgaccgcgagtgggccggcggcgatgtccggccccgtcgttcccctcgcctggacggctcaagggccctgcgagccctcccctggctctggcccgctccccgtttccgccgccgctagcgatccgccggcgccctcctcgtcggtgcccgccggcggtcgtgagccctccgctagcgggctgccccccgcggtgactcctcagcttggggtaatgacctttggtttggcttgattttgatgtcctcttgatattgctcattgttcatttgaggtatagcagtagaatgattttgcttgcagcaattatgtactttctccgtttcatattgtaagactttct

SEQ ID NO: 11896 - DNA, 673 bp, Oryza sativa
  ref <308>: DATABASE ACCESSION NUMBER: AK109244
  ref <309>: DATABASE ENTRY DATE: 2002-08-28
agtaaagcttgatttccgccttcaggggtttctgaacgagagagagacagacggcggcgggcggcggcggcggcggcgagggagccgaagcctgagaggatggtgtttggccggagcaagtcgtcctcgtcgacggcgtctcctccccctgctgcggcggcttcctcggcggccgcggcggcgtgctcggagctgcgtgcggcgtaccacgagtgcttcaaccgctggtacgcggagaagttcgccaaggggcaatggcacaaggacgactgcgtcggcgagtggcacaagtaccgcgcctgcctcgaggtcactcccttctcgccgcctccgaattcgatcacagcatcactgatttattaccgatcccctcaatttgttgcaaagacgactgccctagggattgctcttgtgttttcgcagtttaggatggggtttcatttaagtaggtttttagtttatatggcaagaaatcgagttgttttctagtgtgttggttgctagatcaagttgataaagtggcttatgtaatggtgatggctaaagcctaaaggggattcttctttgaagaatcatctgatttggagctcctagttagacctctgtctgtttgttggtcatgattcaggctaggcggcgcatgcgctgcgctggcctgttgaattcctccgtt

SEQ ID NO: 11897 - DNA, 694 bp, Oryza sativa
  ref <308>: DATABASE ACCESSION NUMBER: AK109245
  ref <309>: DATABASE ENTRY DATE: 2002-08-28
aaccataattcacattttcccctctcatcccccaccgcgagttcctcctcccccttccctcccggcggtgcctctacccctctcctcccttctcctgactgggggcgccgccacctctctgcggctccctctccccctcccccaccggcatcaccagtccctctcctcctctccgtcctgtctcactggcaaagcacgaagacgacgagggcacgactccattcgcgagtggataaggagagataggggtggagcgcgacggcttcccgcggcccgatctcttcccacggtggatccgacagcgacggcttcccacggcagattcggcggcaccgacggtgccaacggctacccgcgtgcagacccagctcgcgggctgatccgccaccgacggcggcttcctgcggtggatctgacggcaacaacagcggcggctgcttcccggggtggatccagcagcaccgacggcgccagcggctacctgcgtgcagatccggctcgtgggccgatatggcagcggatccgacggcgacgacagcggcggcttcctgcggtggatccagtggctacccgcatgtagatccggtggcaatgacggcgtcagaggcttccggtgatgtttttattaatttttttctctttcgctggattgtcctattggattttgtatttatgcttgtgatgaattttcgct

SEQ ID NO: 11898 - DNA, 576 bp, Oryza sativa
  ref <308>: DATABASE ACCESSION NUMBER: AK109246
  ref <309>: DATABASE ENTRY DATE: 2002-08-28
agttacggagccgagatggaaaaggaagcgagcgcgatggttgcgaggagaagcaccagccgccatgattggaggaggtggtggtggcggctgctgcctctcgcctgctgcttcgtttgttgggtggcctccacggcggtgacggtggcggcggcagccggcgtcgccgtgacgagccttcctggtttcgacggcccactgcccttctccctggagaccggggattgggaatttaaccttgcaatcacctgagggagggcctccactgccgctcctctcccgctgtctgcaggtgtggcctccttcctctctcgtggcctccagcagcgtcctctcccacagctgcactccccactcattgccgacgccaatgtgccctctaagtggtcctccctcttcagatcaaaacgacccctgtcgagctgtggggaaggatttaaaagggctgtactgaatgcccattgttcaataggggatatactggggccaattgaactactgtcattagacagggcctgcggctgttagttgtgggcctagtcgaactatcaaagttcaacaagcccctattgaacc

SEQ ID NO: 11899 - DNA, 747 bp, Oryza sativa
  ref <308>: DATABASE ACCESSION NUMBER: AK109247
  ref <309>: DATABASE ENTRY DATE: 2002-08-28
aatgaacagtaccaattgtaccaaagtaatctcgattcatcgatttggatggtggaatcagcgcggattggttagctcagaaattcatcaattaattatcatggcaatccgaggccacgaagtaacagaagctcttccctacatttgtagtatcatcaagtggagatggttcttgtataaagtaaacaaaaaatcaagaattaaggaggagaggaggatactgacgtggaggaaatggaggtggccctcgaggtcctcgagcgcggcgcggacggcgtgaaggctccgcgcgtccgccatggtggccgccgcagccgcctcctgctccaggccgcggtccccacatcctccctgccgccgccaccccttgacgaccacgcgcccttcgggggcgcggcggcggcagcagcggtgggcggaggcggagagggagaggatggcgtggctgagattgtcgtggaggtcccagatgcgctcctgcagccccgccgccgacgacgacgatgcgggcaatctcatctcatcgcaggagtggctcgtcgccgatggaggagaagagagccgcgcacacctgggcacgataggcggagaagccggttttttttttattttttttccttccgtattctgttaacaattttattttttttcttaatcatcattatatgttggtctgtcatgtgataatgaagtgatgatgttgtcgtgagagagggtgggtatataaaatgggaagttacttttgag

SEQ ID NO: 11900 - DNA, 821 bp, Oryza sativa
  ref <308>: DATABASE ACCESSION NUMBER: AK109248
  ref <309>: DATABASE ENTRY DATE: 2002-08-28
acttctcctacttgttggcttctatctcctgttaattaatttctcaagattagtagtaaaagggtagggtattagtggcgtgattaatttggcgggagcagcgatgagaagtggcgggagcggcggcggcggcggcggcaagctggtgagctggctatggcgggcgccgcgccgggcgctgtgccgcgcgcgggacttctacgtgcggagcatcaccggctgcgccggccacctcccgccggacgccgccttcggctacggctacccgacgttcgccgccccgacgacgccgaccatgtcgaggaacagcagcttcgcctcctcccgctactccgccggcggcggcggcgacgacgacatgcgcgagctcgtccgcgccgcgtcgcagaggctggcggcggagcgcgccgccgcggccgcggagccggcgaccgtgccgcggagccagagcgtggccatggcgaggatcgacgaggaccggccgtgcgagttcgccggagttgggctggtcccccggagccagagctgcgccgtgggcgccggccgcgtcggtgggcggagggggagggtagctgccgtggcatgaaccaccgccgccgatcgccgccggcgattcttgcgtgcggtgaggcgtagaacgaaagcgaaggacacgaacacacgacgtgttcttgttcaaatttcgatgttttctttttcttctgctccaaaatttgcagctgcgatctgtaattcttgttgtttgccactattgatcttcatttttttatattgttcttgttcatctgtaaacatcccattaagaagaacagaattaaatt

SEQ ID NO: 11901 - DNA, 756 bp, Oryza sativa
  ref <308>: DATABASE ACCESSION NUMBER: AK109249
  ref <309>: DATABASE ENTRY DATE: 2002-08-28
acgaaatttattttttttaaacacaaatcaaaaccaatctatgctagggtcgtacgccatctttttcccctgctcttcgctgttcccaccaagaggccgcgacacgatcgcgcgctcgccggcgacggcgagggagccctgccggagcgcaccaaggcgcgcggacgccgtccctcaaccctctcctccccgggctacctactttggagaaagccaccgcgcacggcgcactgcctggacacgagcggctgttgccggctagtcgatctccggcgacgagttccacggccgtacgtactgagcgtctgctgctactagtcgatctccggcgacggagttggttcttggctggttccctgctcttcgtcccctctcaccgaccgttcatcaggtcctaaccactaagcagattatggtatctaaacaacagtcctcaagttgggcagatttccagccagaactacttggtcttgtcctcaggcgcctcccttcgcacgctgaccgtgttcgattaagagcagtctgccgcccatggcgctccaatgctgagatgcagtttgttgctaaaatgattgcagtacaatggttgcagttttactactttttcttttttaccttttcacatcagcaacgtgtatatgattcgaaagaaaaataggagcatcaaggcttgctgttccaaaacacctgctccctattccgaaatataagcatttatgtatgacggacaaatagaaagaaaatacttgtgctggg

SEQ ID NO: 11902 - DNA, 567 bp, Oryza sativa
  ref <308>: DATABASE ACCESSION NUMBER: AK109250
  ref <309>: DATABASE ENTRY DATE: 2002-08-28
acctccccctcgcgccccccaaccgcatctcaatctctctcctctctctctctctccagctcgcctccccctcgccggcgacgagctctcccccggctagggttagaccaggtgcccctcttgtctgcggcggaggaggtgggaggaaggatggaggagtccgtgggctcgcgcggcggcggcggcggcggcctggacgcccagatcgagcagctcatggagtgccgcccgctctccgagcccgaggtcaagacgttgtgcgagaaggcgaaggagatattgatggaagaaagcaacgttcaggtacggtggagctctcctgcgattatgccatgccctgcagtatgatgatggtatgcgtgctgggctgaaagtattgattgccggttgcttctgataaaaatggtgactgtgtgtgtggctctaatcagcccgagtaacaccagcgatatggtgactgtgctgtttgtagttggcatgctcatttcagtttttattgtgagaggatctagctcgatatggacatgaaaaataatggttttttgcggtatcatgcttttcccatgc

SEQ ID NO: 11903 - DNA, 569 bp, Oryza sativa
  ref <308>: DATABASE ACCESSION NUMBER: AK109251
  ref <309>: DATABASE ENTRY DATE: 2002-08-28
accatcatcattgtgctcgtcccgatccctcctcttcatccccatcatcaccatcatcctcatcgtcgccatcatccagaattgacccagcaaacagcataatcaccatcgtcgatcatccgtctcttacacgatcacggcggcggcggcggcgacggaggagggggtccgggcgaagatgttctggccgggggcgaggatggcgagcgggtcgtagcgtgccttgcggtcgacgaagcggctccacttggcgccgaagtggcgcgaccagtcggactgggcgtggtagctcgggaagtatatcttgtagtcgtagccgttggaccggcaggcgtcaatgattgcgttgttctgcgccaccagctcgtccaccggcgggccaccaccggggtagggccggcagaatcggagcagcgccaccaggtagaagatctcgccattcggcagcgccaccgacgtggccgggtcccacctgtcacacgcaaacgtgttaattagggggcgttttaattagcagctcgtgtgcgtgcgtgcgtgcattggcggcaaactgagacagagagagagag

SEQ ID NO: 11904 - DNA, 3131 bp, Oryza sativa
  ref <308>: DATABASE ACCESSION NUMBER: AK109252
  ref <309>: DATABASE ENTRY DATE: 2002-08-28
accaatccactttctcttcgcgtgcagatgaaagtgaactcgctccttgcctcctgcattcgagcccaatcagctccacgttcaatccttcgtccccacactctcggcgccaaccccaccgtcgcaagcctcgctcgtgctcacacgccgattcgccctcgtcttctgcaaaaccatcttgcaaagtcgctccgctcctcggtcggctctaccttccaccgcacccacgcaacttgtgccctcgcagacccagccttcgcgcccgtctcttccaccacgaccgacgccaccgacgcctccaagtggttccgcttgccccgcaatgtcgtgcccacccactacgacattacgctcaagtccgacctcgaggcactccagttctccggaaccgccaccatcgacctcgacgtgctcgaggacactgactcgatcgtcttcaacgccgccgagaagctcgccctctccaagtccctcgtcctcagccaggcgctcaagaccgacaacaagagcttcgtcaccctcgacatcgacgcaaagcatgagcgcgcaaccgcaaagctccccaacaccctccccaagggctccaaggcgcagctcgtcgtcgccttcgccagcgacatcgacaagagcatgatgggcttctatcgctccgcctgggagcacgagggcaagaagggctactacgcacttacccagttcgagcccaccgccgcccgccgcgccatccccacctgggacgagcccaacctcaaggccacctacaccttccgcatgatccaccgcaaggacaccaccgccctcgccaacacgaacgtcgtcagctcccacgacatctcccagtccgagcaggacaagctgctccgcgccgccgagctcggcctcgacgacatccttgccaccaccagcaagaccgagggcaagaccgaaggcaagaccgagggcaagaccgagctcgcctccaccgcctccaacgactggaccgtcaccgagttcgccaccacgcccaaggtgtccacctacctcgtcgcctgggccaacggcccctttgtcagcatcgagagcagctacaccagcccgctcaccggcaacgtcatccccatgaaggtctacaccaccccagagtacatccaccaggcccagtacgcgctcgacgtcaaggtcaaggtgctccccgagtacgagcgcgtctttgacgtcgcctacccgctccccaagctcgacacgctcgtcgcctccgactttgacgcaggcgccatggagaactggggcctcatcaccggccgcacctcggtctacctctacgaccccgagaagtcgggcctgcagtcgcagaagcgcaccgcaggcgtccagtcgcacgaggtcgcgcaccagtggttcggcaacatcgccacgctcgactggtgggacaacctctggctcaacgaggccttcgccacgctcatgggcgaggtcgtcatcctcgaccgatgcttccccgagtgggagtccgcctccgagttcatcaacgtccacctcgaccgcgcgctcgacctcgacggcaagcgctccagccaccccatcgaggtgccgctccagggcgagaacgtcgaggacgccatcaaccaggtctttgacgccatctcctactccaagggcgccagtgtgctccgcatgctctccaacatgattggcgaggacgtcttcctcaagggcgtctcgatctacctcaagaagcacctctactccaacgccgtcaccaaggacctctggaacggcgtcagcgagtcgtccggccgcgacattgcctcgatcatggccaactgggtgctcaagcagggcttccccgtgctcaccgtcaccgaggatgccgatggcctcaccgtcaagcagaaccgcttcctctccaccggcgaccccaccgccgaggaggacaagacgctgtggtacgtgccgctcatgctcaagaccgtcggcgccgacggcgaggtcgccgtcgaccgcgacgccttcctcaacagcgagcgcgaggtcaagatcccgcttgccaacgccaaggacgccacctacaagctcaacgccgagaccatcggcgtctaccgcgtcgcttactcgcccgagcgcctcgccaagctcggtgaggaggctgccaagaaggattcggccttctcgctcgaggaccgcctgggtctggtctcggacgcctttacgctcgcctcggccggctacggcaagacgtccggtggtctgtcgcttgccaaggcgctgcgcaacgaccccacgtacctggtcaactcggcgtcgtcgctcaacctcggcacgctcgccagcgcgtggtgggagcaggatgcgcaggtgacgggcgcgatcaagaagctgcgcgccgacatctttggccctacggccaagaagctcggcttcgagtttggcgccgacgactcgcccgatctcaagcagctgcgtgcggtcgccatcgcggctgcgtctgcgggcgaggatgcgtggacgctgggcgagatcaagaggcgctttgaccaccttgccaccacgggcgacgacagccagatccacccggatctgttgcgcaccaccatggcgcgtgcggtcgagcacggtggcgagaaggagtacgaggcagtgcttgccatttaccgcaagccttcgacgcctacgcacaagattgcggccatgctggcgctgggtgcgtccaaggacgttgcgctgctggagcgcaccgtggacttcctgttcggtgacgaggtcaaggagcaggactttatgttcttctttgcggcgctgtcgggcaaccctgctgggcgacgtctgatttgggatgcgaccaagagccgctgggaggcgctgtccaagcggttcgcgggcaacttttcgctctcgcgcatcatcgagtactcgttcagcgccttttcgtccgagcaggatgcgcaggatgtggagcagttcttcaaggacaaggacaccgccaagttctccatgggtctcagccagggtctcgatgctgtgcgcgcccgcgctaggtgggtcgagcgcgatgccgaggatgtcaagcagtggctccaggccaacggctaccttgcctgagcaagggtggcggtgcggtgtaatgaggcaatccaacgcgtacggtccgaact

SEQ ID NO: 11905 - DNA, 3478 bp, Oryza sativa
  ref <308>: DATABASE ACCESSION NUMBER: AK109253
  ref <309>: DATABASE ENTRY DATE: 2002-08-28
tctcgttcccgctgcgcctaccacttgcggctgcaccttgacacaccaccagctgcatacgacagcagaacccgagcagcgtcaaggttgttgtcgtctcgtcgcattcaacgcgtgcatatcctacgcgctgtcagcagctgcaatcccaccatcgctgtcgaagctgcatcggctgcatccacttccacttgctctgaatcggcccggcagcgacgccgctctccagccagcccctcgatcgtcggtgattccgccgcacctacgcttggccttcccacttcacagcggcgcaagcatcccgcttcggcctgatccgcatccgcctgcaccggtccgcaacgagttcattttggccggcgcaatcgatcacatccgcgctcgctcggtcgcggcacatccgcagctcaagtcgatacacacgcgctgctgctgctgtagttgctagtgacatacgcattcgcctcctctgccgacccgctgcctcaccgccagtgcttgccaaacggatcggatctcgtccgaagcggttcccacgctcatgcccaaggacgactccaaggcgtttcgccacgaggcgggcgcctctgctggcagcaacaacaacgacgacgactcgaaagacaagcccaagaaggtgctccgtgcctgcgacgcctgccatcaccgccgcgtccgctgcaatcacgaaaacccctgcgacaactgcctccgtctcaacatcagctgcacctggatcaaggcttccaagggcaagcaggcatccggcagacgcatcgatctgctgcgcaagggtcacaaccctgccgccgctaccgacctcgtcccgtcgccaccgggcgcgaggctccctgccgagcatgccgccatcaccaatcccagtccatccgcaccgcgcgccatcctgcctccgccagggcactcgcatccgcatccacatccacatgcgcattcgccccgccactatcctccgcctcccgcaggtagcgccgcaatgagccctcccggcgtccctcccagcgccaactccccgtcccaaatgatgggtggctccagcctctactctcgcgatggtccctctggctctcgcaactcgtatggcggatacggcagattcgatggcagctcagccgctggcccctccggtcccgcccagcagccatcaccatcctcccactggtcgagcccctcggcacgctcgccagcccatcgctatccctcgcacggctcctatggccagccagattatccgccctcgcatctcgcagcctcgaatgcctcttcgagccatcatgctccccaccaaccctatcattcgccgtcgcattcctatccatcccaccagagcttccagaaccaacctccacccccacatcaccaacgccagtcatcgtccgccgccgccggcgcttccgcatcaaattccaactttggctttgctccctccgagaccttctcagagggtctcggcggctctttctccgagcttgccccggatgtggctgccagccttcgcctgccggactttggcacctcgctcgccgattcctatctcaatccgcaggacggcggcggcgagcgcaggcgcaacgtcttgctcgacatgaactcgggcggcctccctcatgacggcagctcaggcagcgccggaaacggcatgggcggaaatgcgaatggattccatcagccctacaatgcacacggcaacggctcgttccaaggacgccagaccttcctcgacgtgctcggccagaacagccagatgctcggcggaccctcctcgacgcccggctcggtcacctactccgaaagcgacgccaacgaggctcatccgctctccgactcggtgctcatccccaacatcgccatcttctttgaacgcctccagtccatcatgcctgtcttcacacgcgcctgggtgtttgacaagatcgaccgcggcgagcatcgcaccgacccgcagctcggcgccatgctcatcgcgctctcggcgtttgcgctgtgccagcccgtcgactcgaccgatcccgtggacagctcgtcgcgcaaacgcaaggtgcgccgcctgctcgaggagtcggtcaagatgcgcaacagcgcgctgctcggcagccatccgtcgctcgaggccatcatgtgctccttcttcatctttggcacgctctttgggctgggcgaggagaatgcggcgtggttccggctgcgcgaggcggtgacgctcggatacctgctgcgcatccacgagacgtcgtcgtacgagaatctggacaaggacgaacaggagcgccgcctgcgtgcgtacctgctgctcgccatcacggagcgcgcgtacgcgatccagtccggctcgtccatcacgttcagaggcaatcccaggaaggcgaccgactcgatccgcagaaagttcgacgtggcccagctgcaagactttcccaacctgcagagtcggctgtttgacgtggtcgacgaaaagtttgtcgactgctggaaccgcaagtgccctgggcccgggtgcgactatctcgatgcggaacgagcggtgcagctgcacagggcgatcaaggagagcgacgaggatgagcagaaggagaaggaatcgttccaccgcgaccgcgccaacacggggccgatgcgcagggacaccacgcacggcgagcgtaggcaccatccatacgccagccacatggcgtcgggcgccaaagcggaggatgcgcagggcggtggcggcggtggtggcttgcactccaagtcggattgggacaagagcaaggtgcagaaggcggatgtcgaggtgacgcgacagtggctgctgaatcggttgtggatgacgtgtcgctcgcacggtctgttgacggcggatgcggaggaggagccgttgcgcatcgactatgccatcgacattgcacgcgagacgctgcgcgtgtgcaactcgctctcgttgcggtctatggaggcgcacggtatcggcctcacgcgcaagctcaacgacattgcacagacgctcgtgattgtgtgtcgcgactatcccgcgattgccatgtcggtgccgttcgagggcgatccgatcaagacggaccctacgctgtttggaccgtactttggcccgtcgccacccgacgcaagcagtgttggacaataccaaagccctgcgtccaattcggccatggacgtggcgaccgatcatccatccacgtcttcaactgcaccaaccctcggcggtgtaccgctcgacaaggccttttcgcccagctacgccatcgaggccatcttgcacaagtatctcgacatctttaagcggttccgcggaggcgaccatccgtacctcccacagctcgtcgaggccgtcaaggagctccccaagatggcagaactcagcttcgaccgtttcctgcgcgagatgggctgttctaggtctatgcgcgcgagaaagaacgcgagtggtagcagtcaatcatatacacactcagccagaaaaaag

SEQ ID NO: 11906 - DNA, 597 bp, Oryza sativa
  ref <308>: DATABASE ACCESSION NUMBER: AK109254
  ref <309>: DATABASE ENTRY DATE: 2002-08-28
ggagcgtctctttctcgtctctcagctcgcacgtctctcccctctctctctctctctccttcccctctctctctctctctctctctctctcgtggtgcctgcccagcgaaaacggcagcggcggcggtggccgcgccctcccctccgccagatccagcggaggcggcgggcaccccatgggcggaggcggccagcggtagcagccgtgccctcccctccgcggatccggcgagaagggaggcggcgggctccgtggccgccagcgggtactcccacgagtggcgcggcgggctcccgtctgccagatccggctagaggggagcatgtggtggaggcagttgggagtcggcgagctcccacgccggcagctgcctggcggaggcagttgcggcgcacctcggcagcggcggcggctgcgccatgcccatgcggcgatggcggcaggggtggagaaggacaccggtggcgcatgtgaggtggcggcttgagttctttagtgtttttcttttttagttcatgagttcttgttaagttctagtcctaattttgttgagttcttgtcccaaacttgttgagttcttattctttgtaccatgc

SEQ ID NO: 11907 - DNA, 677 bp, Oryza sativa
  ref <308>: DATABASE ACCESSION NUMBER: AK109255
  ref <309>: DATABASE ENTRY DATE: 2002-08-28
ctgacctcggtcactctcactctcatcagcttagctacactctctcacacagtctcactccccgtgattctgcccctctgctttagctatcttctccttcccatcgtctcggcgactgactgggtaacccttcttcacccctcgccacagtgcccatggagctctacgccgtggtgaagccgtgcaggctgtacaagaagaggagcagcagcggcggcggcggcaaggtggcgatgtgcgtgcgcagcggcggcgacggcggcgccggcaagagcaggccgtccttcacctgccggtgcgtgcggctcgtcaaggagcagcgcgcgaggttctacatcatgcgccgctgcgtcacgatgctcgtctgctggtacgagtaccaatgagagggtactcgatcgatcgatcgattcatggagggggcgagcaaatgcgatgaagctctctctctaggacttaaggaactttgtgtaaagagaatagtatcttttttccatttcttttcctcattttcctttccttttttttttcctctctgaggagtagagcgaatgagtggtgcagtaggccggccagtagcccagcatgcgtggtcgctgcactgcgcatttttatttctaattttttgatgtcatgtgagcgcatgagcatctaaatatagacggacgtactcgatc

SEQ ID NO: 11908 - DNA, 522 bp, Oryza sativa
  ref <308>: DATABASE ACCESSION NUMBER: AK109256
  ref <309>: DATABASE ENTRY DATE: 2002-08-28
atccaaggcaccgcagcgggcgcgccccaccaccgggccctcctccccctctccgccctcgccaccccgctcctccccttccttccccgcagtggtcccgcaaaaaccctagccatcccgccgcctccgccgccgacgacgacatgaacgacgacgccatcacggcgctgatggacatcgacgactccccccgcagcagcggcgccggcgccgtcttcctcgacgacgaggaggacgcggaggtcttccccggccaccgcgcggcccgcgccaacgaggcccgcgggcccctccccttcgccggcttctacaactccttcgacggcgccgacttcgacgacaccgacctcgcctgaggcgcttacggtaacgtgtgggggccggtgctcttgtggggggctctcctggaagtttgagaggctgatctgtctctatggtgatggattcttctagttagttcgtcggttagatttcttttcatgtatctcgagacgtcgtgagatcaatctgggtaccttttgc

SEQ ID NO: 11909 - DNA, 620 bp, Oryza sativa
  ref <308>: DATABASE ACCESSION NUMBER: AK109257
  ref <309>: DATABASE ENTRY DATE: 2002-08-28
gaactttccagcaccagagcaccgttcagtcacctgtctgattcctgcagcatgtgctggtctagattgatgcacattgtgatgaccctgttgtcatgtgcagtggctaaccggctgttcttgttggcatttgcaaactgagcaccagttcatcagcatggacacatgtcccagcttctctgcagtctgcataagcccagggatctgtggagtctggacatctgtcaaggtaaatctcagcttagatagaacaattagatgtaaataagcttcttttccatggaggctccatcatctccagcttcgttcatggcgatggcgacgatgggttcgcccatgacacgtcgttctcagatcccctgttgctgcctgcacttttgtcaaaccattagtatgacattgcaactactagctctaaaacactggaggcataaacagaaatcgccttaccaaaggatttatttttcagtttatgtttcaccagatcaaaagttaatgagacaggagaaattgtaagactaaagttagctgtaataggcaatagttctgtacttctgtaccagcactgtactgcaagatatgcaatttttattcaagatttctggtgcggatagttgacc

SEQ ID NO: 11910 - DNA, 1022 bp, Oryza sativa
  ref <308>: DATABASE ACCESSION NUMBER: AK109258
  ref <309>: DATABASE ENTRY DATE: 2002-08-28
ctctcttctcttccccttctcgcgctctctctctccctctctcggcgaggacacagcgcggcggctacaggtcgtcgtcgtcgcgctggacacggaggccgcggcggcggcggtggcgtgggaagagccggcggcggcgagggacgcggaggccgcggcggtgctggacacggaggctgcgtcgacggcggcccctccatgtgccccccgcgagatggtcgtagcctgcgtccacggcggccccccgccatgtgcccgcccgcctgcacgaccacggcactggcagccacgccaccataccgtggagcgctagcaagagagaaggaagaaaacgagcagaagtagaagaaagaagaaaaggaggaaaaaaacgaaagaaccaatgagcagcagcacaagccgtcattttggtccgctacatcgacatgaccgctgtgcatgccgtccggctgccgcaccgcatgccgtcctggctgcgtctcgccgtcgctcaaccacgcctcgccgatgcacggccgtgccaagcgccatccggcggcaccaccaccgtcaagccgggggaggaaaggaacaagaaccagaaaaagaatatgaaataaaaaggggaaaagcggggaggcagtcagtgcccgtcgccgtgcgtccgcgcctagcgccacaggagcccagccgtctgccgcgtcgaccgacacaaggtcgtccgtcgccagccaccgcaccatccgccgtgcatcgccaccgccgactgcaccgacgcccggccgcgccacgcgacgctcgccttccaccgctgcacggccgagcgacgcccttccgcactaggaccgcgcccgcgccgtcttcccgcgtcccctcacgaccacccgctgccgcttgacctgcgtcgcgtgccgctgcagtgggccgcgcgccgccgcccaccacccgccccagcacgccgccgtgtgcgccgagagagaggaagtggggaaaaggggaaagtggagatgagagagtatacatgacaggtgggccctaccatt

SEQ ID NO: 11911 - DNA, 567 bp, Oryza sativa
  ref <308>: DATABASE ACCESSION NUMBER: AK109259
  ref <309>: DATABASE ENTRY DATE: 2002-08-28
gtcccgcagcctttcccaaatctagccgcacgacgcaccaacccacgcccgagccagagccaggtcgccgcgccacctcttcggcttcgccgcgccgccgcgagcgggcggggagactccccacccccgggagggagagggcggttcgtttattggatgagccgtgaggaaattgggaggaagaaggcgtgatgtttactccgcaggggaaggggtggaccgggtggtcgacgccggctccggcgaaccagcggagcggtggcggcgctcccgccgcgtcggcgccccttggcaaggggaaagggactactctgcgggtcgccgaactggaactcaatcatttgatggcaacacggacatggtggtggacacaactattgtggatgttgaccaaaacgggaaggactcggcagtgcttcccgttgtagatttggagcctgaaacatcaaaacaaggacggcgccaacaaaacaggaagggtagagcaaaaggtggtgtaaaacggacacggtctgttcttgcggtagttgaagatgctaaagaaatacttggtgagaatttagaagt

SEQ ID NO: 11912 - DNA, 889 bp, Oryza sativa
  ref <308>: DATABASE ACCESSION NUMBER: AK109260
  ref <309>: DATABASE ENTRY DATE: 2002-08-28
accttctctcccttcttcctctcctctatcccttactcctctctctcactcttccggtcttccctgggcaggctagccggcgcggcgcggcgggacggggtggggcgagggcagcagcggccaacgcggcggcggtggcggccggcgacgagcggcatgggagaaggagaggcggtggctcttcctaccaccatcaacggcaccatccactccctcctcgataagaaagagccacacgaggccaacgggcgcgagacgggagaggagatccggcggccgacgacgtggtggccggcgagaccgacgctagcgccgcctgagctcctccagtgccgcccaagcccaacaacggcagctctttcccagccgccgccttccagatgtcgccactgcgatcttcccagaagacgtcgtcgccgccttcgtgggagtctctggcgaccacgcactcaccgtgtcggcgaacgccgattccggcaggatgcaaagcttgggacctcgccggcgtttagcaagacggaggtagtggtcgatgaaggcgtcggaggagagcgcggcggcccaggcacgggagagactgcagcagcggagcaccaacctgagcgggatgcgcgcgcctcgctcgcctccgacgaggccgatgccatggcagactgtgctgaggaggctatggggcgaccaggccgcggtggaggagcaatcctcccgtgtcgtcgtagccacctcctccccagccgtcggccggcttgcccagagaacagagaagagaagactgtgatagagagaggaggaagggagagagatgacgtgacagcctgacatgtggggttcacgtgggtcctatgctgactcagcaaccacataggataaaatcgagatcaaaaccacc

SEQ ID NO: 11913 - DNA, 1124 bp, Oryza sativa
  ref <308>: DATABASE ACCESSION NUMBER: AK109261
  ref <309>: DATABASE ENTRY DATE: 2002-08-28
ggtccccctcgctctcacccccactcccactcccaagcgccaagcacctctccgccattgatggacttgtcgagctccaaggaggcgacgcctcctcccgaggcgtggtggacgggggagacggtggcggtggtgacgggggcgaaccgcgggatcgggcacgcgctggcggcgcggctggcggagcaagggctggccgtggtgctgacggcgcgggacggggcgcgcggggaggcggccgcggcggcgctccgcgcgaggggcctccgctccgtccggttccgccgcctcgacgtctccgatccggcctccgtcgccgccttcgcctcctggctccgcgacgaactcggcggcctcgacatcctggtgaacaacgctgccgtttcgttcaacgagatcgacaccaattcggtggagcacgctgagacggtgctcaggaccaacttctacggggccaagatgctcatcgaggcgctcctgccgcttttccggcgatcggctgccaacagcaggatcctgaacatcagctcccagcttggcctcctaaataaggtgagggacccgtcgctgcggagcatgctgctggacgaggcgtcgctgacggaggggaagatcgagcggatggcgtcgcggttcctggccgaggtgaaggacgggacgtggtcggcgccggggcgcgggtggccggcggtgtggacggactacgcggtgtccaagctcgcgctcaacgcctactcgcgcgtcctcgccgcccgcctcgcccgaggcggcgaccgcgtcgccgtcaactgcttctgccccgggttcacgcgcaccgacatgacccgcggctggggcacccgcaccgccgaggaggccggccgcgtcgccgccggcctcgcgctgctcccgcccggcgacctccccaccggcaagttcttcaagtggtgcacgccccagctctactccaagctgtgaaactgtcagcgacatgctaggctcctgagctcctcatggtaatatgagagaaaactactgcaaatttagagaggaaaattaagcatgagttgcttaagcatcaaccctgtcagttgacagtgaaaatatatagtaccactatatggcagtatgcgtctttggtgttt

SEQ ID NO: 11914 - DNA, 1046 bp, Oryza sativa
  ref <308>: DATABASE ACCESSION NUMBER: AK109262
  ref <309>: DATABASE ENTRY DATE: 2002-08-28
accatcccatgtctcgcacgctgcttgccctgccggcacttcgcactataaagcccctcatctcccgcaacctgcctcgcgctaccgtctcgcctcatcacctctcggttcgacactcttcctcacgcaacccgtttgacctgacaaaagttccgcgctacgatccctcgcgccctagcacaatgcagtcgtacacacagtcgtttccgtccgactcggatgcgctggtcaagctgtcgttcgatggcgagtcgcgtatctttacgctgacgatgctgggtgccgagacgcccgacaaccgtcttacgcaccgactgctcggtgaaggtctgctgcccgcgatcaaccatgttgagggcaagtggaatgcgatgctcgattcgggcgagtcggaccagggtgctgcactgatcaccacaggcggtaccgatgccagcgccaagatcttctccaacggcctggatttggaaaaggcgatggcggatccgcacttcttcgaccgctgtctcaatgcggtctacgagaagctgctcaccttccccatccccaccatcgccgctgtcaacggccacgctttcgccgcgggtttcggcctggcctgcgcacatgattaccgcgtgatgaacgcaaagcgcggatacctgtgcatgaacgagatcgactttggcgctcccctccccgccggactgcagcaggcgctcgcgagcaagatcgacgaccaaaagaccatgcgcaagatcgtgctcgagggccataggttcagcgccaaggaggcgcaggaggctggatttgtcgatgtgctgtccgagagtccacaggatacaatggacaaggcggtcgagctggcgaacaagctcaagggcaaggcaaggatgaacgcttggggcgcgaataaggaggtcatctatgcgcaggcggtcaagatcatgaggaccaaacacgacgatgccaccaccgccatctttgccccccgcgccaagatgtaaagtccacatcttcgcaaacctttgtaattggattggattcggcgtgaaaaaaaaaaaaat

SEQ ID NO: 11915 - DNA, 708 bp, Oryza sativa
  ref <308>: DATABASE ACCESSION NUMBER: AK109263
  ref <309>: DATABASE ENTRY DATE: 2002-08-28
tcttcttcctcctctttctcttcctctttctctttctcttctcccacatcagcccatcgacgcgcggcagcgatggatccccgcgcacgcgaggtgggcggcgacggcggcggcggcttcccgcacgcgcgggcagcgacgaggcgggcggctcccctcgcgcgcgaagcaggcagcgacggcggcggcggctaccagtgcacgcgggcggcgacgaggcgggcgggaacggctgcagcggctctccgcatgcgtgaggcaggcaatgacggcggcggcggctccccgcgcacgtgggcggcgatgaggcaggcgggaacggctgcggcggctccctgcgcgcgcgaggcaggtggcgacggctccccgcacgcgcgaggcaggcgacgacggtggcgaacgacgagaaaggctactgcaacaccaccgctgccatggtcctatgctatttgggcaaagagagagatggtaggagtggtggggcccatggttggccagccaaaatgactctccaagtttgaccagtgagtgttgtgatttggtcagccaaatggcttaggcaaccgaatagaaagactgttagagggtattttctcttcatatttaacaaaatttagtttggagagttatttggctattctcttgaatatactataagatgtgtgaaatgttggcttgtgttggactactgcgtcccgggctgagctc

SEQ ID NO: 11916 - DNA, 630 bp, Oryza sativa
  ref <308>: DATABASE ACCESSION NUMBER: AK109264
  ref <309>: DATABASE ENTRY DATE: 2002-08-28
cactacccatgaactgatgaacaacctgcagtcagagatggcgtcgccgcgaatctgctgttcggcgctgctcgtgctgctcctggtttcctcgtgcaatgcaggtgaccacccggcctgcccggcggcgtggtcggcggcggtgggggcggagctgttccacggcggcgtcggcggcggcggcggcggggaggcgcagtgcagcgcggcggcgccgcacacgccggtggccgtgttcgcgcacgacgtggacccggtgcggttcgcgctgaacctggagttcgccgaggcggagttcttcctgcacgcggcgttcggcgtggggctggaccacctcgcccccaacctaacgctgggcggcccgccgccggtgggcgccaggaaggccggcctcgacgagctcacgtggcgcgtctgcgccgagttcgcctaccaggagatcggccacctgaggttacaacaaagaatatgattgaaattcaaattcacatttcaactatagttgtttttggctaggaaagtgtccgtgcattgcaataggaaaaacaagtttaaaactaagatttaacttttcttgatctggacgcttcttccaggaaacatattttaagtgtgatcatatttcaactt

SEQ ID NO: 11917 - DNA, 1231 bp, Oryza sativa
  ref <308>: DATABASE ACCESSION NUMBER: AK109265
  ref <309>: DATABASE ENTRY DATE: 2002-08-28
accacatccacccaaccactacaacgatatacattggcagatatggcggaggcaaagctcaccaagaagcagcagaaggccgcacagttcaaggctggcaagaagggcaaggccgccgccatcgcggaccatcccgccaccccggatgatgttgtggatccagacgatgcaccctcgaccagcgcggcagtaaccagcaccaaggaggagacgaagaaggagtcgtccaagaagaaggagaaggagtctaaaaagaaggccaaggagtcggttgcggaaccctctgctccggccgaggcggcgcctgtcgaagcgccagtcaaggaggagaagcgtaacaagaagcgcaaacgtcttgcggctgaagccgaggcggcggccgcagctggcatcgtccccgagcccacccccagcagtagcagcaccaaggcatccaagtccgagtcgaagcccaagacgaaggcgaccaagatcgcaccagcagcgcctgccacgaagacgacgttcggtgacgacggcgaggtggcgtcggagcaagccgttgctgctgttgctgagccggcaccctcagccgcatcagcaaaggggtccaaattcatcctcttcgttggtaacatggcattcaccaccacgacggacaacattgcgaagcacttcggccagacgtgtggcgaggtgcccacggtgcgcctgctcacgcgcaaggcggacccgaacgcactcgccaacctgccggcctcgaagcgcaagtcgatcgccaagggcaaggcgcaagaccctacgcagccgcagtccaagggatgtgcgtttgtcgagttcaagtcctccgacgccctgcgcaaggcactcaacttccaccacaccatgctcgagggccgcaagatcaacgtcgagctcaccgccggtggtggaggcaagagcgaaaacaggcagaacaagatcaaggaaaagaacgccgggctggagaaggagcgtcagaagctgcatggcaagtacgtggcgcccaagaacgaggctcgcaagcagaaggcgggtgccaaggagggcggcgatgccagacccgccaagaggagcaggacggaagaggccgagcaggcgggtcaggcggcgtggagtcgtaacagcggcaaggaacgcaagatgcccaagttcatggctacgggcgccaacgccgtgcgcgttgcgccaacctcctagacagcgactacatgcaatataccatctctgctac

SEQ ID NO: 11918 - DNA, 842 bp, Oryza sativa
  ref <308>: DATABASE ACCESSION NUMBER: AK109266
  ref <309>: DATABASE ENTRY DATE: 2002-08-28
accgatcgtccagaaacccagaaggcacgcagcggcagcagcagcccacggcaaccctagatcagccagccatgtcccgcgccgttgacgcccagcaggagcccacggaagggcgccgcttctactcgccggatcgccccgagggcctcgccttccccacctcgtaccgcgcgctctacgacctgcccacctcgccggagtgcctcttcgaggaggacaagttccggcagacccgcacctggggcgagaacctcacgttctacaccggcgtcagctacctcgccggcgccacgtccggcgcgctcgtgggcctccgccgcgccgccgccgaggccgagcgcggggagtccgccaagctgcgcatcaaccgcgccctcaaccagagcggctccgtcggccgcgccttcggcaaccggttcggcatcgtcgcgatgctcttcgccgggaccgagagcttcgtccgcgaccagcgcgacggcgccgacgactgggtcaacaccgtcgccgcgggggccagcgccggggcgctctaccgcatcgcgtccggcccaaggtcgatgatcgtcgccggcatcctcggcggagtcctgtccggcgcagctgtcgcgggtaagccgatgcttcagagattcgcgccgaagctatccgccagattggattatttacgctgagtaaaatttcaggctgaattactactcaacatggtgtgcgcctggagaagtttttattcgtagtatctagctagcaactctgatctcaattaatagtttgtaactgttcatatttggtgtcctgcaaattaatggacaaaaaaatgctaatcttttcgttgcaaaaaaaag

SEQ ID NO: 11919 - DNA, 994 bp, Oryza sativa
  ref <308>: DATABASE ACCESSION NUMBER: AK109267
  ref <309>: DATABASE ENTRY DATE: 2002-08-28
ggaaccgagagtggagaggttgagagggggaggggcaaaccagccctagttccgcgcccccgatggagaggagggtggcgttccggtggggcggagaggcgctgttggctccggcggcggcggcggcgttccgatcggtggggacgacgacgatggattgtgggggtaatcccaatcgaattactggtactagaaaattattccatcgaccgtggtactggccctgttcttgcgacccctgctgatatctcaggagcagcgaccgatatatcccacaaagatcaggattcaggaagactgccttcctctcatctccacaggcaatctgagagctgggcaacacatggatcagacaaagaaaaggaagatgaagaagtggtgcaggctaaaaatgaagaagtggattccttcatcgctgcagcagaaaaaacaggtccaccacagcagaatatcgactgcacagcagctgcacgacgtcaggctaataactatgcaaaagttgctttggagcactacaacaaggatgaaaacaacaagattcaatacaggttcatcaaggccctgaaaagttgcgctatccaaaccaacgaatcctatgggcatgtgaactttgtagcatcttcatcagattcaaaagaagagttcttttttgctgaagtttgttatgatcccaagagcaatggattggtaccaacatgcatggtatctttggaagaaaacaacagaattggaggacttcttggtgttggatttgtagggtgcccagatcttctgaatcctcctgtcgacaacgatcactgctatgcttgtgacgataggcttaagcacccaaaagatggaactctgtttaagggtgggcatgtagccgccacgggtttctatacgtcctactgagtttgtaacagacaaaaaaaaacttagttatctatcctgtgctatattttctagttgtcaattgactttttgtttatctctatttaagcacacttttagc

SEQ ID NO: 11920 - DNA, 939 bp, Oryza sativa
  ref <308>: DATABASE ACCESSION NUMBER: AK109268
  ref <309>: DATABASE ENTRY DATE: 2002-08-28
agtttccacccgagccaaactctcgctccaacggaaaatgccgtctgctcttcctcctcgccacacccaagctcccgcgccgccggccgccgcctccgcctccgcctgcctcctccgccgccggcgcggccgactccgtgtcagcctctgttactgcagagcctccacggagcctctcgtgttcgcctccccgagctctccgtcgctcctccgctcctccgttgccgtccccgtcccctcctccccgcgccacgcaaatcgggggccgggagacggcggcggcctcctggtagtcaccgtcgctgcgtccgcggttgttctttctgcatgctttgtattcctttcagcaatgcgctccatgttggaatgcaagaaggcagcagaatctcttgagaagtccttcggttcagcaagagagaagcttcctgaaaccatggcttcagtgaaactagttggaagggagatctgtgacttggctgtggatctcagtaatctaagtcaagaattgaggaagggcgtccaaagttccatgagcgttgttcatgcagccgatgctcaactgcaccaactgacgacctctgccccacaaggaaatcagagggtgactagtaatcgaaagagagcagcaggagagcctttgctcgctagtaccgtgagagaactccgtgagttaattgcagaattacactcaggatttggagtagccgtcagcatcgcgggccttttaacgtgggcatcaaattttgtttctaagcgtcctaagaatcgctcatagcgagacacagaaagtagatagaggccatgagggcttctggccggtgtaagtgatactgaatcattttgcttgaagttagatcatgatcatttatcctgggttcatgaattatgatgagttcatggattatgaagattggctttcaaatgaaaatggttaatttg

SEQ ID NO: 11921 - DNA, 567 bp, Oryza sativa
  ref <308>: DATABASE ACCESSION NUMBER: AK109269
  ref <309>: DATABASE ENTRY DATE: 2002-08-28
ataacccccttcgatcaagcattttcaagcatctcgatcagaaggaaacggttgcacaacacctgagaagatcaaaatggacgtactactactcaaaagggcattcgaactccaagccgaaacaacatggaacaacaaaccacggcaactcctacaaagaaaacaacggccaatcaacggcttcatcgtattacaatggatcatcctgtagaatcaaatcacaagaactaagccaaccagaggggggtgaatggttagtatacccaaaaaccgaaaacttttagcggaaataaaagttaccctcaaaatcgatggatcgcggtctgaccgaagtagttgcgccggtctgaccgctgatgaacgtcggtctgaccgaagtagatcgatcggtcgaaccgtcgagaacgcctgtcgtcgactcctgtcgccaccggtctgaccgccgtgtgcccgccggttggaccgtcgcgatgccgccggtctgaccgccggtgcgccgccggttagaccgccgaaacccggtgaaacacaaatcgaagaactcttaaagtggatgacgactttatt

SEQ ID NO: 11922 - DNA, 536 bp, Oryza sativa
  ref <308>: DATABASE ACCESSION NUMBER: AK109270
  ref <309>: DATABASE ENTRY DATE: 2002-08-28
caaaactcaaattctctctctctctctctctctctctctctctctctctcttcctcaaatccaccaccgccggctgtcgtgttcccttcgctcctccaccgtcggccgttgtcctagcccatgcgccgtccccagccgccgccggaagcgccgagccaccggaccgtgcgcaccgccccttctctgcctcccccctctttctctgtggctcaaggaagaagaagagataaaagaaggctatgacgagtgggccccacttctaaatatacgttcgaccgtacagcaaattctatcgacatccaaggagcttatgtggacccagatggctacgctaaaaccacaagaatctcgaggcgtgaggcaagacataactaaaattttgatcatatagaaaactcaatataatcttcagtttaattttatgcatgatatattactcatttagcatctcatcggtagatgttaaatgccttcaagcattattacatgaggttatagaaagatacatggttatcattttatgtggtttattattc

SEQ ID NO: 11923 - DNA, 588 bp, Oryza sativa
  ref <308>: DATABASE ACCESSION NUMBER: AK109271
  ref <309>: DATABASE ENTRY DATE: 2002-08-28
actgccgccgcaacgagagcaccgtcaaccacagcagcagctcatggcgccgccgctcccggggccggtggtgcccgggggtcgccggaggcggagccgaacgcccgcgcgcaaggctatgtgccgcgacggccggtgagcgcgctgcccgtatcttgctgcccggtgggggcggcacggctcggcgtggagagccctttgcaatggtgatgccggagcggaaggattattcgagattgatgcgtgggcattggctggcgtcgccgcgcgcataataaatggtgtgtgattgattcctaaactattgctgtcagtttttttagttcatttggatcatacagcttgcatgatactgaatagttggcggctccagtttaattgttttatttgtccctgctccataaatctagtctaggtagtaatagtgaaaaaggaattagaatttcatttcccacgtcttggtagtcttgacagctactaccacatgtttgtctactttgttagacttagacgcactcatctgtcgaataatgtaatggtatacactgaatatttagtggaaatcgatgcatctcatacatatagatc

SEQ ID NO: 11924 - DNA, 620 bp, Oryza sativa
  ref <308>: DATABASE ACCESSION NUMBER: AK109272
  ref <309>: DATABASE ENTRY DATE: 2002-08-28
gaatacatcatcaggggcgtcggggtccgtcgctctcacgccggatctggcggggaccgtggctggcacggcggggcacaggttggcgcggccggacggcggtcacagccgttcgtggcggcgcgacggggcgcggaggaggccgagcggcgcgcgtcggacgcgggagcaggcggccggagtggtgtgcggcagatctggccctcccgtggccagatcgggtgcgggcggcgacgaagcccacggcgagtgggcgactccgacggcggcatggtggaggcgctcccgtggccggtggcggaggaggaggacggcgtgaggccagcacggcggctgcacgtcgcggccgtcagcgaggccggaggcatggaggccgtcaccgtgaggccagcgcaggcgcgagcgacgacagaggtctatacctaaagcacccatatcaccaaaataaggcacaatgtttatgtggaggttggatagcagcaacagagcctggcacaatgccaatgtcaaattcttctgcaaaaggacatgtaatttaataagttcgatagcatggaatacatggtgtaataatttaaaatggcatggtgaataatagaaatcattagaacaaagaagat

SEQ ID NO: 11925 - DNA, 1050 bp, Oryza sativa
  ref <308>: DATABASE ACCESSION NUMBER: AK109273
  ref <309>: DATABASE ENTRY DATE: 2002-08-28
gggacggcgaaggcggtgcggtacctgcacgaggagtgcgcgcagcggatcatccactacgacatcaagccggagaacgtgctcctcggcgccgggatggcgcccaaggtgtccgacttcgggctcgccaagctgtgcgacagggaggacacccacctgaccatcaccggcgcgcgcggcaccccggggtacgcggcgccggagctgtggatgccgctccccgtgacgcacaagtgcgacgtgtacagctacgggatgctgctgttcgagatgctcgggaggcggcggaacctggagctcggcgccggggccggcgcgcgcgggcacggcagccaggagtggtacccgcggtgggtgtggcaccggttcgaggccggcgagacggaggccgtgctggcgcgcgcgacggcggcggcggcgggcggcgggagggagagggagaaggcggagagggtgtgcatggtggcactgtggtgcgtgcagtacaggccggaggacaggccgtccatgggcaacgtcgtgcggatgctggaaggggaggaccacatcgccgcgccgcgcaacccgttcgcccacctcgcgccgtacagcgccgccggctcgtcgccgaccaccactaccgccaccacggaatcggatggttcgtcggctcgtaccggcaggtagacgtgtcggaaacgaattcccgttttctgattcttccacgtttgcacagcacgggtgtgagttgtcagctaggctgttgtgttcaaagacgtacacctactgatgtgtataagtgcatgtctacaacattttagtgtgttagactgttatagtgccgtatttgttccgctaattttggttttaaacgtttcggtgtgactcaattcgactctgcagtctgtactctgtagcgaggaagatgggttagacatgtgggccctgactgtcattgggaggatcagaggtagaggaggatcgattttgctatatatttgttgacaatttttctctctgaaatttaacatatgtaaatacagtgtgatcatagtgtaattatattgtact

SEQ ID NO: 11926 - DNA, 771 bp, Oryza sativa
  ref <308>: DATABASE ACCESSION NUMBER: AK109274
  ref <309>: DATABASE ENTRY DATE: 2002-08-28
ggttcctcctcggcgacctcagggagttcggccggctcaacgaggaggcgtggtcgtcggcgccgctgccgctgggctgccacgacatcgtgccccgggtcaccccgttcgtgcaccgcaacgtgcgggataacggcaggccgtgctgcttctcctggttcggccccatccccagcgtcaccatcaccgaccccgcccaggtcagggacgtgctgtccaacaagctcggccacttcgagaagcccaagctcccggcacttaccaagcttctcgccgacggcctcaccagccacgacggtgagaagtgggtcaagcacaggaggatcatgaaccctgcgttccatctcgagaagctcaaggtacatcacgtgaaagcgtctcactcgtacagacgtacgtacgctaggttgatcgtaggattgtatagtaatgcggtatgggttgatttgtagctcatgctgccggcgttttctacgtgctgtgaagagcttgtcgggaaatggatggattcccttggtcccgacggttcgtgcgagctgatgtttggccggagatgcagagtctcaccggagatgtcatctctcgcacggcattcggcagcagctacagtgaaggaaggaggatcttccagctgcagactgagcaagctgagctcttcataggagccattcagaagttcgtcattccgggttacatgtgagcaacaaattccatggtcccctcgggcatactctgtttaactctgctgttacagcaggctacattttggtc

SEQ ID NO: 11927 - DNA, 639 bp, Oryza sativa
  ref <308>: DATABASE ACCESSION NUMBER: AK109275
  ref <309>: DATABASE ENTRY DATE: 2002-08-28
ctccccctcgctctctgctctcgcacgagcggcaacgcgtgcggccggcgacggtggctcccgagtggcggcgcgcgggctcgccggcctccccgtccccctagtgtggtcggcgatggcggcgtgcggttgcggccatcatgcggaaatcgactcgacgacgccgccatcaagtcgctgccgtcgggcgtcggcgatggcggcgcgcggctgcggccggcgggggaggcggaggaggtatgcgcggacgacctcgccctcgtcgttgatgtcgccaccgatgaagaggtccgcaccgctcaccagttcgcatgcctcgtcgtcgtcgacactcgccactccggtccggccgcggcccagcgaacaagcgacgagaagccggcggcgcggcgcccccgccgcggacgagcgacaagaagccggtggtgtggcgcccccacccgaagccgccgacgacgatgaggccgagcggcgcagagtcgtcgacgccgccgctccccatccaggtcgcgctcagggtcgccgcgctgaaagcggcacatccagcgcctgatgagctgccgcgcctcatgacgttgcagttcctcgccggtcagctctcccctgtcatggtcaaattgcaagggatcgattctcctc

SEQ ID NO: 11928 - DNA, 599 bp, Oryza sativa
  ref <308>: DATABASE ACCESSION NUMBER: AK109276
  ref <309>: DATABASE ENTRY DATE: 2002-08-28
acggcaaggtgtcgctcggcatcgtgctcgagcagcttgctctcatagatagtcctcaccctgagctgccgcttcacggcggagatgagcgggaggcgctggaacatggcgcctgtgagcgcctcgagcgcgcgggcggtgtcggcggcgtggaagcgcgcgacgcagacgtactccttgccggcgccctgctgcgacttgacgaggcgggtggcgcggtcgacgcagacgatgaggttgccggtgaccttgggatcgagcgtgccgctgtgcccggtcttgttgacgcggaggaggcgcttgatccacgcgacgacccagcgccgatctaagcgaactcgcggcggacgggacgggtacgccgcgatgagcggatgaaggttgcggagggaggcgtgcgaaggaaaaggggcggcgactgatttgctggcgtgcgtgactttcggccggtgaccccgcgtgcgcaatctcgtactgggtgatcccgcgtgcgtgcactgtcgtcggatctcatgcgttagatgattttcgattgtttgatgtgtcacacgatgaatgataaatgatgaatgagtaaaacaacttgttaaactatagag

SEQ ID NO: 11929 - DNA, 1191 bp, Oryza sativa
  ref <308>: DATABASE ACCESSION NUMBER: AK109277
  ref <309>: DATABASE ENTRY DATE: 2002-08-28
gtagagcagagcttgccaaggagtgctggagggagcacctccttggcgcttctatcccgttcgagaccttcaccttccatgtcgacgccgacttctcttcatcgtccgcctcctccgccgatcaccgcggcagctcggtccttcctccgggtccgggcgacattgaggttgcacatttgcagagcatcgccagcgccaggctcgcggcccaggggtgcgaggtgctcgggaagatcaagagggagcaactcgtcgagttcgagtcggtttacgggctccatggttacttcgacaccaccggcacccacgacgacgcctcctcctccgccgaccactgcgtcggcccgatccttcctcagctccagagcgacaggtccgcccacttcgcggcgtgggcacactcgtcatgggctctcgcagcggcggcagcggcagcggcggtcgacgacgacgacgaggggaagtggatgaagccctgcatcgggccggtgctggcttgcgattgcgagcccgagtacttcgactccgacccagctccccccacgccgccgaccatcgcgaggccgcctcgtcctcttcctcccgcgtcgccgccgccaccgtcgatagcaacgcctccgccttcacccgcgtcgccaccgccaccgtcgacagcaacgccaccgcctccttccccgacgcccaccaccaccagagcgagcccaacgccgccgccgataccgacggccacggtgaggcctccgcctccacttccacgcgccaccgtgaccccgaccccgaccacgcctccctcgactgcgactactacaccgataccgacatgggtctgggtcggcggcgtgctggtcctcagtgcgggagtggccgtcctagcgatcaagctcgcctacgactacctaggcggcggccgcaacgactgatcgatcccatgcaggcccagccagcatcgtcaacctggccgctgcggtcgccctcgcctccggctccaaacagatcgcctccgccgccgcttacggcgaaagacagtgcgtgagtcaatcgtctccatttttttcacccctgctgctgcggctgcggttttcttctctgattaggacaggatgatgagtaatgtgctgtgacgacatgcatgtcctactactttgtgtggttcggcttgaaatgaaatctttgaagacattttcagcgccg

SEQ ID NO: 11930 - DNA, 549 bp, Oryza sativa
  ref <308>: DATABASE ACCESSION NUMBER: AK109278
  ref <309>: DATABASE ENTRY DATE: 2002-08-28
gaccactgttccatccaatccaagcacccggttgagctgccgttttctgtgatctccgttgctcaatctagtccgtcgtacggcatcgccatgggcgccgccgacaagggcaccggcgtgcagttcgaggacttcctgccgtcgatggcgaggaagctgggcgtggaggggctgatcgaggagctctgcaaggggttcgagctgctcatggaccccggcgccggcaagatcaccttccggagcctgaagaggaacgcggcgatgctagggctcggcgagctccgggacgacgagctgtcggagatgatgagggaaggggacctcgacggggacggcgcgctggaccagatggagttctgcgtcctcatggtcagactcagccccgagctgatgcaggatgagtcgcatagggcgttccagtgttgacataatctgatcggtgcttgttagctagtggaatgcaacattataatacagtgagcgttttgaggatttgtcgatagtgtgattatgcattttatttcccctaacgaagcataacagcctgac

SEQ ID NO: 11931 - DNA, 659 bp, Oryza sativa
  ref <308>: DATABASE ACCESSION NUMBER: AK109279
  ref <309>: DATABASE ENTRY DATE: 2002-08-28
ccaagaaaaagagaagagaagggaatttcttgctgtgtgcgggcgccatggccatggggctgaaccgattcacccaatggctgtggccggcgagcacggcgcgcgcggcggcggcggcggcgacgacgcacgagctccccaccaccgccgccggcctgacgagcgcctccttcccggacttcccttccgggttccgggagccggacaccgtcacgttcgcggcgaccacgcgccgccgcggcggccgccgcagccgccgcgaggaggacagagtggacagggagttcgacatggtgatcgtggcgtcggacgacggcggcggcggcgggtggctgtccgggtcggagtcggacgactccgactgggccatcgggtggcaggagaagctctcgccggagctgcagaccgacggcgaccccgacggctgcttcgccgtcctcgtccggtgctaccgccacggccagcccgagccggcggggaggcccgacggcggcgcccacttcctcgccaccgccgcctccctcgccaacggcggcggcctctccggtgagtaatcgaggagcagccatgtcgttgttcagttcatttatgaaacaattttagtgtcatttagtgtatttgggttgtgcggttaataattgatactgcggcttgatacc

SEQ ID NO: 11932 - DNA, 854 bp, Oryza sativa
  ref <308>: DATABASE ACCESSION NUMBER: AK109280
  ref <309>: DATABASE ENTRY DATE: 2002-08-28
gctctcgccacctccctctcatcggcggccgcctcttcttcccgctccgctggtcatggaaactcctggaccggagccgaaggcggcgacgacggtggaggtttccgatgaggaggaagtgaaggcgatcgctgcagatgcgggatccgtcaccggggaggggaagcgtctcgacgcggcggcggcggcgacggcctccactgcaggtggagacggcggcgaggaggagaagcctcctgtcatggtgcagatgcctctgaacaccatcgccgccatcctctcactgaagagggagccgaggccgatgcccgaggacctggcgcgtctctcgccggaagagcgcgacgagcgcctggcgttcttcgattcatgggaggaggtcaacgacgagttcgaggagttccagagggagatcctccgcgaggtgaaggagactggccgctacatggtccaccagagctacttcacggagcaggcggagatgcaggctcgtatggagaaagaatgggccgagatcgactggaccggcgtcaaattcggcgactgggactacgacgaccccacttgctgtcaaccactgtgatttcaggctcgcccgctaactgagatgctgcagaggactacttctttactgtatcttacccaaatggtctcaagccagcttagcttttgagtactgcctcacccttagctactaaattactagctctctgtcgggtagtagtatcagttatctatggtgtttgctaggtagtaatgtcttgtgtgatttgaccgacccttataaggaagaccatgtggcttatgctatgaatgaattactttaatagtagtaagtctgttattattaagtt

SEQ ID NO: 11933 - DNA, 1245 bp, Oryza sativa
  ref <308>: DATABASE ACCESSION NUMBER: AK109281
  ref <309>: DATABASE ENTRY DATE: 2002-08-28
accttcttgctggagctctcctactagtaccttcttgctggagctagacttgcccgatcatggaagaaaccatcttcagttccacgcacacaaggattgctgtagtcaccggcgggaacaaggggatcgggctggaggtgtgccggcagctggccggcaacggcgccaccgtcgttttgacagccagggacgaggcgaagggcgcggcggccgtcgagaagctccacgggctggggctctccagtgtcatcttccaccagctggatgtcacggacgcttccagcatcgccagattagccgaattcttggagtcccgctttgggaggctggacatcctggtgaataatgccgccgttggtgggattgtgcccgttgacgatccatcttttggtctgctgcccactgaagaaaagttcagcggcatggatgggcatcagagaattgaatggatgtggaagaactgccgacagacgtacgacgctgcaaaggccggcctgaagacgaactactatggcacgaagaatgtcactgaagcactcctccctctcctgcaatcctcctccgatggaagaatcgttaacgtcgcatcaagcttcgggctgctaagattcttcacaaacgaggagctgaagcgagagctgaacgacgccgacagcctcagcgaggagaggctggacgagctgctgggcatgttcgtgagagacttcgaggccggcgcagtggcggagcgcgggtggccgacggagttctcggcgtacaaggtggccaaggcggcgatgagcgcgtacgcgaggatcctggccaggaagcgccccgcgctgcgcgtgaactgcgtggacccagggtacgtgaagaccgacctgaccaggaactcgggcctcctgacgcccgaggaaggcgcgagcagggtggtggcggtggcgctgctgccggccggcggaccgacgggcgcgctgttcgacggcggcaaggaggcgtccttcgtgtgagtgtgtgtgacgtgtacacggttccgctgccggtgggcccaccacgtctgtatgctctctggactctggaaccgtgtttcctggtgggctgtgcgatgaacacttttttttttttgatcaaagggcaaacgccctccatttccattaggatgaacacatgtgatcgctaatttgctgtttttattatcacttgtatggagtacctattattttcctgtaggatcatcgatcaattttatagttatttttttaaggg

SEQ ID NO: 11934 - DNA, 525 bp, Oryza sativa
  ref <308>: DATABASE ACCESSION NUMBER: AK109282
  ref <309>: DATABASE ENTRY DATE: 2002-08-28
gtgtcatttcactcccctcctcttatctcctcctctccctccggtcccttcctcgtcggaggtcaaacggcggaggggatggatgacattgccggagccggagaagagccagcggatggacgacgagggctggactgaggaggaggaggatgaggtccaggttaacgccctcggcggctatcgctgctattgcggccttctccggcgacatgaagtcgaagcccacgcaatccgtcgttagtgggcactccagtctgaatgaccccagttcggcggacggcggctcggcacggtgcttgcgcttgttccggttggctggctggctggttaccttctcaagttctcatgcactgccgctgaccccaacagtgacggcgcgcggctgcagcgtcgcgagagtatgcttgcttttctttttcttttttttttttgacgtgggtagtgtttagttcctccaaacttctgaaaattccatcacatcaaatctttggacacatgtataaatacttcctccgtttaatgagt

SEQ ID NO: 11935 - DNA, 1134 bp, Oryza sativa
  ref <308>: DATABASE ACCESSION NUMBER: AK109283
  ref <309>: DATABASE ENTRY DATE: 2002-08-28
acgcctctcctaatccccctctctccctcgaaaccctaatccccctcttgcgattttcgcgaaaccctaatccccctctcgcgattcgcgattccctctccctccgccatggccgccgccgccaccaccaccgtggaggtctcggacgacggcgaccaccccgtcctccgcgacgacgagcgggggatccctcgatccctctccctcctcgccgcgatcgtggaggccgacgccgcccgccacgccgccgccgccacacggcccgccgagtccgacctcgtccgcgccttccgcggcggcgcgacgcccaccgtcgcgatcggggagttcctggagcggatccacgccttcgtccggctggagagcgtccgccacgacatccggctccaggccacgtgctacgtcctcgccgggatctacctcacccggttcttggggagcgccgccgcggtggaggccgggatccgcgtcgacccgtccacggcgcaccgcctcgtcgccgcagcggtcttcgtgggcgccaagttcgggaacaccagcgacatgctcccgacgaggtggacctccgtgttcgagacgagctccgacgcggcgatccacgcgggggagatggccgggctcgagcggcgcttcctgcgcgccgtggactaccgcctgttcgtccgcagcgacaggttcgggtggttctgcggcgccatggagcaggcgctgcatcggagcgtgagccgcagcaggaagaggacggcggcggaagcagtggggggagaagaaggggaggacgagcgccgccgccgccgccgccacagcatcgtcggggctttcctgccgccgctcccagctgtcgccgccaattaggttcaccatttctgaattcagcttcaaatattttactacagattgtattttcttttgctgcttcttgtgtttagagttgtttgcaggtcatcggggtggagaagacgacggacggctggccggagttggagttggatcggctagagctcgccgccgttggccggagtagttttacagagttttagccataggatgtttataattatatatattgagcaactgttagctttgtcagagtttaactgtcagattatatcgatcaatcagtaatagatttcc

SEQ ID NO: 11936 - DNA, 982 bp, Oryza sativa
  ref <308>: DATABASE ACCESSION NUMBER: AK109284
  ref <309>: DATABASE ENTRY DATE: 2002-08-28
atgacaaaacaaaagtggccatcactttctgcgcgcgacagcaacattatcccacgcttcattttgccgccattgacctcgccgtcgccatgaacatctccttcatcgccgtgaagtgttcgagcagcttggccctgtccgggaggcacgccttgatcctgtcgtcggcggcgtactccttcgcccagcggcagaggtcggggaactcgtcgccggtgaccaggctcaccccggcgacctcctctagcacctccagccagtaggcgtacccactggcggccaggtcgaggtagccgatggcgtcgcctccgaagaatcgcctccccttgagctgcgcctcgaggagcttcaagttctccttgatctccgccgcgaagccctcccgcacctcgccgtcgtccgtcgaccacagcgccagccagaacggcttcgtgcacttgtcgtcgatgaatcgggcccagaagcggacggcggcgcggaggccggggtcggcggggaggaggaggagcggggccgggaacgcctcgtcgacgtactcgacgatgacaagggactcgcagacggcggcgcggtggtcgtcgtcgccgtggaggaggacggggaccttcttgtggatggggttgtgggtgagcagcaggtcgctcttgttgcggaggtcctccaggatgagctcgtatggcacgcccttgagccgcagggcggcctccgcgcgttggctgtacgggctgtcgaaggtgccgatcaccttcaccggcgccggcgccggcgacgccatggtggctgctcagctcgtactggatggtttgctgctggttgatttaatttggaggagctgatatttagtagtgattagtgaagcttccgtgcatgggaaggaaggaaggaagcttcctctagtttttcgttttcgagtaatttgtttacgtgattgccgatattatatctttaaattaatagaaaaaaagcctttacgatcgctctc

SEQ ID NO: 11937 - DNA, 616 bp, Oryza sativa
  ref <308>: DATABASE ACCESSION NUMBER: AK109285
  ref <309>: DATABASE ENTRY DATE: 2002-08-28
tggccgatctcctcggcgtatatagaatttcttgcctgatccctttgtcgcgcgcgccatttggcgatattttgctgagatttgggtggtttttgttactttgtttggtatggagcggcggcaatgccacggcaagaacgcgccgccaacgctggcgccgccgcggagggcgcgcggcggcgcgggcgggtcgttctcggcgtcgctgctcgacgcgatctaccgttctctggacgagggagggggtggcgatggcgcgggtgctgtcgtcgatgacgcgcggcggtcggaggcggaggagatgaaggcagcggcagcggcagccgtgccgccgcagttctggtgggccaagtcggagcaggcggcgggcgccgcgggcaggagccgtcgcgagtcggtggctcgcccgcggcactcggggtacgcgtcgtccaccgcctcgtcgtcggacgcgtcgtcgtccagctacagcagcttcacctgctcgtccgcgtcgaccaccgacacggagtcgaccacgcaccggagacgccacagccagcctccgccgcggcagccggaggacgtcgacgccgccgccgccgccgccgctgccgcgccaccgaacagcaaaccg

SEQ ID NO: 11938 - DNA, 788 bp, Oryza sativa
  ref <308>: DATABASE ACCESSION NUMBER: AK109286
  ref <309>: DATABASE ENTRY DATE: 2002-08-28
acgaaacaaccttgcgttgagcttagctttagctgatcgaatcgagaagagacgtaaattaagcaagcgatcgatcgaactgatctcgtcggccgatcgattgatcggatttggttccatggagaggggttgcaacggcaatggcggcggcggcggcggcgtgaaggtgaccttcatcgagacgcagttcgtcacctccgacgccgcgggcttcaagtcgctcgtgcagcgcctcaccggcaacgacgcagccgtgccggcggcgccgccacagaggccgcggccgtgccgtgcagacgggtggaggggagccggcggcgcgagcgcgacggtggtgaagcgggaagccgtgccgccgccggtggcgccgtgggtggatgagatgatgatgctgtacgagacgtgcgacctcgccgagatgttgcgcgtcgacgtcgtcggcgcgagcggcggaggacggtgccacggcggcggcggatacggtggttttccatgctgatcgacggccggcgatgagctcagtccatcttcagttttggatgctctctgcatgttgttccattcttttttaactgagattatctgtatattgctccatgccttgttgtaccctgttttatatgtttggttgcgaccaggccatgtaattccggttctaatcatgaaactgaaaaaaaaaacaaattgatagagccgatgaatcaaaggattttggagtcacaacagggtttatactttccgaaaaggccgaaattttggtaatttcagtgggcaccaacatttcatcg

SEQ ID NO: 11939 - DNA, 849 bp, Oryza sativa
  ref <308>: DATABASE ACCESSION NUMBER: AK109287
  ref <309>: DATABASE ENTRY DATE: 2002-08-28
actggctccgccaccgccgcaccagccctcaccaccgcccccgattcctgacaagtccccacgccgccgcatgccctgtccgccgttgccgccgccccccaattcctgacctaaagtccccacgccgccactgcacacgctattttccgccgccggcagcgcaccagccatctctatcaccctccatatcctgagtgcggctaccttcacgatgggctcagatctaggcaccacggcctcgcgaatttgctctggaggctgcggcggtgcacagatggagatgaaggcgaatgaccgtcgacgggtagccggagcagaagctgcagcacgcatgcacctggaccattgggtacatctgctgtacatttttgcagtggtgatagacccacctttccaaatgcatctcgccgtagacaaaaatatggagaccagacacctagagcttcaactatgtgcaaaaatagatgctttctcatgcgaaatctcctacggaattgattatcggtgtacaagggattggcagaatagtatttagcaaacaatctgttgtgatcatcttgatgatctctattgatgtacctccgtgtgtagcccccacgccgaatagaggtaccagctggttctgcttccaattcagcccccagctcagcttcaagctctacctcaagctcagcttcaagctgagcctctgtagactcatctgaatgactagattgatcttgagagtcactggacatcttcttttttggaatgagggagtgtgtgttgtatgaatgagggagtggtgtcctagactgcatctcatatttatagctgctaaataccaatagctatctattgctttatctc

SEQ ID NO: 11940 - DNA, 1001 bp, Oryza sativa
  ref <308>: DATABASE ACCESSION NUMBER: AK109288
  ref <309>: DATABASE ENTRY DATE: 2002-08-28
aacaaactaaaagactcgaaaacaaagagaaggcaccaacgaatctcttggacaccgacgactcgacgcctcaccaaccacgcccaaccaacgccaccaccaaccccactacgcacgcactcacccaccccacctgtcgccccgccgcgcccgacttcgccgtcgacgtcgacccgctgctgcctccgccgtccaacggcgacaccggcgcggaggcgtcgatggttgtggcgttgggcgtggtgacgtagacgtcgagctcgaacacgccggtgctggcgctcatgctggccgtcttccacaccacgtagccggtggccatcctgaacttgcccgtgccgcccaccacggacagctccctcaccgtggccgtggtgtcgtcgtggccgatcaccgcgatggtgctgccgttgttctcgccggcggtgaagtagaggttcacgcacatcatcagcgtcgggctcgacagcgacgacatcatgtagaacccctgcgcgcgccccacctccggggacgtcgccgacgaggtctccgtgagcgcgtcgtcgacgacggtggtgtctccgaagccggtgctgacgccaccgttggccgacgtcgggcccttgatgacctgcaccgccgtctggccgctgccggagacgacgtcgtgcatgaagaagtggaggtgcgtgtccgccgcccgcaggagcggcggcgcggcgcaggcgagcgcgagcagcaggaagagggcggcgggagagcgagaggtgggcgccatggctgaacctggactggacgaacactagctgctgctgctgcccacaggaagtttaatttatcaacaggtattctctcagaaagtgggagtaggtagcagaaatgactatattatttctactattaattaactaataataaccatgtgaagcttagactttacggcaggcatgcatgctgcaaagcaagcatgattcaggtcaagaaaaatgcatcctacttgggttaatttagttgatgtc

SEQ ID NO: 11941 - DNA, 1254 bp, Oryza sativa
  ref <308>: DATABASE ACCESSION NUMBER: AK109289
  ref <309>: DATABASE ENTRY DATE: 2002-08-28
agtactccaatacaaacccacccccaaattcaaatccgcttccaaaatccagcggcgcggcgcggcgcttccctccaattctccaaacccaaagccacccccccccccccccccgcgcgcccaaaccatctcatctccgacggcgagcgagcgggaggaagagatcccatctcatccaggttgcgcctcctgattccgatggcggcgggtgcggaggcggaggcggatgaggaggagctggagccgctcttcgactactcccgcgtgcagcccaccatggccttcagcttcgacgataccgacattgagaagtccgacatcttcgtccactgcaacaagcggcgcaaggtggccgacggcgacggcgacgccaatgccgacgagaagggggataagggtgagcagaaggccgcgaaggctgccgcggtagtcgacttgggagaggaggattggctgccgccgccgccaccccccaagcccaagtccactgtcacggacgaatcagagcagagcagcgtattgaaggagctgagattacagaagcaagcaatggcgaaatttgctgaatcagctgatgattttctggagaagttggctcaaactgctaggcaaaaggttgaggccagaataccaactgaacatatagatctagacaagtcacctgaacgacacgaagcaagagaaaaggtggtcgtaacagttcaggacaaagctggacatcaccagtttcggttatacaaggatgagaagtttggcaagctttttagggcatatgctaagaaggttaatctcagcgtcgcagacctgacatttgcattcgatggtgacaaagttgacgcagaaagcacaccagaggaccttggcctggaggacgaggacatggttgaggtgctccataagacacgctgaagattatgaccataagacacgctcagttttgggtgcccctcactgggacgttgttggtaacttcggatggttattattttttgcttgcgctttagctccttttagtcccagctgttctaaagagccgttggtgtctatatccatagtagatattataccgtcaaatgtatgtagacgatagcctgccccaattttatgaatcgatgtttttccttttgccaactcttcttttctcttggctttgtgaatctatcacgagcgtgactgcttttattgaatgtgtgcgtccaattgtttgtactctgtaaagaaagatagtatccctctacattatctaattccttt

SEQ ID NO: 11942 - DNA, 795 bp, Oryza sativa
  ref <308>: DATABASE ACCESSION NUMBER: AK109290
  ref <309>: DATABASE ENTRY DATE: 2002-08-28
acctaaacctcacgacttcacgagcagcagcgagaggaggagggagcaatcaatccatcggcggcaatggagaacggcggcggcgacgtcccggagaacgccaacgaccattgcccggggacgcagtcggaggcggcggggaaggcggacgcgtgcgccgggtgccccaaccagcagatctgcgccaccgcgcccaagggccccgatcccgcatgtgatgctttgctccgcggcgtgtcgcttcgatgcttggtttagtttggttttactgcaatcgagtgtgaatttagtggagcatacagcctatgcttgtatgagcatccttttgcagagcctcgtgtcagttgtgtgcaggaaatttcagagtttggtagtcggtagctcatctatagcaaagtcgcatgcttccagcatgtataagtttctgtagtataactggctgtggcattgatgaatttgaagaagtttagattgtgtgagctatgaaaagaaaaaaaaaacagtccggtgtgaagtatgcaaagaacatgagctctccgacaaattcctatttgttggcccatcaaagttggttcctttatttctgaagattatgaactgttgcaaccatggatgtatattggaacatctgcattccaagtcaatttgatcaatggatagaagttctctagttcttaaatgatcaagtgcttagaagaacttataatcgcacttaagattttccatatatctacatgttaagtgaaccactgtttatgaaccttaatgaatgatgctgtatgaactttcaggcgc

SEQ ID NO: 11943 - DNA, 895 bp, Oryza sativa
  ref <308>: DATABASE ACCESSION NUMBER: AK109291
  ref <309>: DATABASE ENTRY DATE: 2002-08-28
gggccgtcccgtcctgtatcttccttcatcttcttgccatagttgggcacttgggctggtgcgccgcctaggcaccggcggcggaggcggcggcgcgccacacgcgataagaccgaggcaaggcggcggcgtgccggtgcaccgcgcgcgcaccacacgcgacaagctcgcaaggcggggagaatgccacaacgattgcacgcgccgcccaacagtttgacggataccaggagcgggagattgcacaccaaaggtcaaacaggttgatctaaagatgcatagggaccagctgattgggtcggcattcatcgcatttggcatcatattatttgtgggtttcttctatgctgcggttttgaccaagatgcttccaccatatgaaaaccggtttctgtcagcaatccaaaacgataggtattactgcctgctcataccgttgacactcccagtgataatcgtggctgtctatttgcattggctaagcatgaagatgttcaagcatgcatgaagcctcattctaaaagtctgaagttctttctcaaatgacaacctcattatcatggtgaccaaaaacatactccctccgtcccaaaaaaaactcaacctggacaaaggggattcatgaggttttttgggacggagggagtatattactagtatcgttctcaaagtcagcgttagacttttacaaccattaatatatatatatttttctgccaggaattcaaactatacataattgtactatcgtagaactatttgtccccagctccgtctgttgcactagaaaaaaaacagactaatttaggatcaaggcacaaacaagtgtcaaattttttttgtctatcaaattttgccaccagagtataattattgtttatagtacaaagacttc

SEQ ID NO: 11944 - DNA, 897 bp, Oryza sativa
  ref <308>: DATABASE ACCESSION NUMBER: AK109292
  ref <309>: DATABASE ENTRY DATE: 2002-08-28
gcgatgcagcagcagaggaccaaattgtaaaatttccgcactgttgtagacagcatatctctctcgttccccttttgctctccgaaaaccctaacccctcgccgccgatccggccctcctccgccgctggccgccatgccggacgtgcagccgctcgtcagcgagttcgtcctcaagctcaagcgccggtaagcagagctccccccctgtctctccctccgtttttcgtttgcctcgattggccttttcgcatgttgacgcgctcgtgggggtgtgggggtggtgcggggcagcaaggtggaggggtcccatgccgtggcgcggcagacggcggagctgctgcggtcggtggtgtcgcagcaccggatgggcagcaccaaccaggcggcggcgcttgcggacgccgtccgcggcgtcggggagcagctcatcgccgccaaccccatcggtgcgccccaaagaaaattccaccctgtttgaggacttgtgattgactcctgtgcttattatgatatttctgtttctgatatatctgttggcgtggtttaccttaattctgtagaattattgatgcttgtttttgctagataatgtatggttctagttaactgagggcttgcagaatagatgaatttcctcggaaatagagtgcttgagcttgaatttgagaggttttgttttattgtctatgtttggtctctcaaacagaagtggcagtcaaaatactactagacaagaaccatgtattggaattgtacaacatttatcttgcaatatatcttaaatttttagtttactagcgcactgtatttcttttctacatgtgaaatgtctagtctgtcactaccaataccatgcactgactgtatctgaatgttgtagaatataaatttgatc

SEQ ID NO: 11945 - DNA, 1128 bp, Oryza sativa
  ref <308>: DATABASE ACCESSION NUMBER: AK109293
  ref <309>: DATABASE ENTRY DATE: 2002-08-28
agagtaccgggaacaacctacaacccgctccaaaaaaaaaaaattagagactataaagggcggcgccctgggcggccgctggggcgtgcccccgccgccgcgatccgcgcgcgccgccaccaccgtctccctccgccgccatcgtcgtccccgtcgcttcgcgccccgctgccgagagccgcgcgcgccgccgtcgtcatccccgtcgcttcgcgccttcgcctcctccgcctctgccttcgcctccacctcgcgctaccaccgtcggtcgccggcccccgccacgacccccttcatcagctaccggatccggcaccgtccgccaccaccgtggtcgaaggaagcccgtaagctggtgtcctctcgccgctggatgtgacgaggactcccgtcgccatcacgccatcgccgctgcctccgcctccgcctccgcctccacctcctcctccaccgctgtcgcgtcgcagtgtcggagctcctccgcctccgcctcgcgctgttgccgagcgcagccgtctccgccgagcggcggtgaaggcgggcgcagcctccatcagcgacggggtcggagctctgacgaccacgccacagggggcgcaaagagctgacggctcatattctagcatcaggagccacgccgccgcgcccggcgaccgcgacgacgaggaggaggaggagccccgtcgccgcgtccatcctccgccggctgctacaccttcgtccgttccgcatcccgccgcggcgggtaccggcgcctcggctcctccgcctccgtgtccacggccacggatgtgatttgggtggtggtggggacgacgaagcgagagaggagcttgttccatgtcgatccggccgtgcttgaggccgggctggtgcagcgtgtgacgccccgattttcggtcgggattaaaaatcatttaataatgcattttctataaactaaataaaagttaaagcaatttaatcaagtgaaataatgagggaatttaaaatttcctttaaaaatcattggccgagaatattttgtaatattctttgtgccctaaaatactctctgaaatttctcgcaaattttcggagctcgagaaataattttaatagcacaaagatcattgaatcaattaaaat

SEQ ID NO: 11946 - DNA, 533 bp, Oryza sativa
  ref <308>: DATABASE ACCESSION NUMBER: AK109294
  ref <309>: DATABASE ENTRY DATE: 2002-08-28
atcgatcgattgtttcttggtgtggtggtggcggcgacggcgagcagcgcgccaaggtacatgacctcggcggcgccggcggccgcgcagttcgctgcgccggcgccggcggcgatggggatctacgaccgccggcaccatcccctcgccgccggcgtctggggagaccaccccttcatccgcccggacaccaccgccagcaccagcaacgccgccgccgccgccatggtcgtcgcgccgccgccgctaacagagcccaagttcgagagccagctagctctgcctctgcagcatggagacgatcaagacaacgctgcagctctgcaagaatcgccgaggcatgcgtcggacagcttcgagcaggaggcgtccaagcctcgagacaagatccagaggcggctcgcgcagaacagagaagcagctcgcaagagccggctacggaaaaaggcttacatccagaacctggagacgagccggatgaagctggcgcatctggagcaggagatcacccgagcaaggcaacaggtaagaac

SEQ ID NO: 11947 - DNA, 657 bp, Oryza sativa
  ref <308>: DATABASE ACCESSION NUMBER: AK109295
  ref <309>: DATABASE ENTRY DATE: 2002-08-28
gcaaaacgcaaaacaagctcgctcctgcgttctccatcgaagcatcatggcggcggcggcggcggcggcgacggcagcgaggatactcgagctggaccccgcgcacccgcgcgccggccgcgtcatcgacgacatcgtgcgtacggagaagcggatcttcccgaagcacgagtccctggcgcggaccttccacgacgagctcaagcgccggaacaccaccctgatctactcagccgcggccgccaccatccccaccactggagacgccgccgccgcctccgacgaggaggaggaggtcgtcgggtacgccatgtacacgtgcgccacctccctctgcgcctccatcaccaagctcgccgtgaaggagagccggaggaggcagggccacggcgaggcgctgctgatggccgccgtcgagggctgccggaggaggcgggtccagcgggtgtccctccacgtcgacccggcgagggcggcggcggtggcgctctaccgcaaggccgggttccaggtcgacgccaccgtcgtcggctactacgctccacgcagggatgcgtaccggatgtacatggatctctaggaaaccaaaccaatcagcatttgagcaagaacaaaaaaaaaaaggcttgtgaattgttcaggaaatgcaaatggagc

SEQ ID NO: 11948 - DNA, 681 bp, Oryza sativa
  ref <308>: DATABASE ACCESSION NUMBER: AK109296
  ref <309>: DATABASE ENTRY DATE: 2002-08-28
aagcagcctccggttcgctacctccacctctgcctctgccatgccttcgccttcttctttcctcctcatctcatcctccgcctcgagcgcaccctctctcctgctcgttgtgccgttgctcgactcacacgcgccgctcggccgcatgcaccgcatcatgctcaatgccacgaccacatcacgccagccacccactgtgcatctcgccttatccccgcgccggcgctaggcgaatcgcaatgatgacggcaaggaggacgagaaggcggcagcaatgtccatggtgatagtggatctggtagagtggccatggcgacggtggatctggaggaggacgcagctagcaagacagaggctggcgatgggtggattggtggagggcaccaagcaatgcgaaggctggcgacgaccacatcttttgtggatcttgttgtaggtggcggcagaggaaggcgcaggcggcaatggtgtgaccacgacatcaagtggtccaacactgttcatctttaattggggctagctgccatcggtctagtgctgggcttgaaggagatcaagtttaaggtggatcctttactgattttatttgggtgaaatctggttcttgtttttgccttatggttgtatcgaactatcaaagtctgattttggtaagtgcttccatgagattagattattgtc

SEQ ID NO: 11949 - DNA, 550 bp, Oryza sativa
  ref <308>: DATABASE ACCESSION NUMBER: AK109297
  ref <309>: DATABASE ENTRY DATE: 2002-08-28
tgaggcgcggcggcggatacggggggtgacgacatggccgacgggggagagaagtgccgggacgcggccggcgagggcggcggcggcggcgacctgtacgccgtgctcgggctcaagaaggagtgctccgacgccgacctcaagctcgcgtaccggaagctcgccatggtgagcaattgagctcgacggcttcatgcaaatgttctttgtttttgttcttgttcatgttgttgtcgtcgctccgccacgttcttgattggtaactggattacggccatggattcgccttgttgctgtaactgcttcataggtagggaaagagcgtgccgtggtaggcgatttcgagtttggagaggtgtagatgatggcgccaagttcttttttttttttttcgccgggacggcgaagaatgccgaaaaggggaaaactgtacaaatgcagtgtgtcagagcaccgcctttacaacaaaaagcaaattacaaagtctgtgatctctctaaagctggcactgcagcaacattcaacgaggtaactagccctgctgatttcc

SEQ ID NO: 11950 - DNA, 663 bp, Oryza sativa
  ref <308>: DATABASE ACCESSION NUMBER: AK109298
  ref <309>: DATABASE ENTRY DATE: 2002-08-28
aatgcgcgacgtccagaaccccatcgtcgtcgaccagaactactgccccggcaacgtcaactgccccggccagagctcgggggtgaagatcagcgacgtggagtacgagggaatcacggggacgtcggcgacggcggtggcggtgaggttcgactgcagcgggagcaacccatgcacggggatcaggctcaggaacatcaacctgacgtacgacggcggcggcggcaagccggcgaggtccttctgcaagaacgccggcgggtcggcgtccggcgtggtcatcccaccgagctgcctctgaccggcgaccgcacggcacggcacgacgccgccgacgtacggcagcaagcgtacaatggttgcatctacatgtgaaaatcttggtgatttgcgacggaaaaagcaagccatattggttggtgtatccggaagctacgacggccggccctagtaacggactaacgggcggattaagccactctcttggatttttgcaaagaaagctaaagtatgctcaaaatattccaaattattaatataaaaacagagtattacgtagccacgtaggctttctagttcttgaaatttctttttttgccaaatgtgaaggattacccaacggggaaaccagttgcatgttatcaaaacaaatattccggtatc

SEQ ID NO: 11951 - DNA, 1070 bp, Oryza sativa
  ref <308>: DATABASE ACCESSION NUMBER: AK109299
  ref <309>: DATABASE ENTRY DATE: 2002-08-28
aagacgctgctggagtagtaacgtaaccaagaggggaagagagatggcgatggcgatgcaggaggagcagagggtggtggtgatgcgtcacggcgaccgcgtggaccacgcggatccattgtgggccgccaacaacccccgcccctgggatccgccgctcaccgacgccggcctcctccgcgcctccaccgtcgccagtcgcatcctcgccgacggcttccacatccaccgcgtcctcgtctcccccttcatccgctgcctccagaccgccgcccaggccatcgccgcgctctcccccctgccccgtatcaacatcaaggtttcaattgaatatgggttgtccgagatgatgaacactcaagcaatgggcattctagtcagccagatagctccaagcatcgacaggtggtttcctgacatgtcacaactggaagctgctttgccagctgctaccattgatcactccgcggagccactctaccaggaggtacctaagtggggggaatctgtttgggaagcaagaagcagatatgctagtgtaatcaaggctcttgctgacaaataccctgatgagaacctacttctggtgacgcatggtgagggtgttggtgcatcggtgtcattctttgagccaggcgtggagatttacgaggtggagtattgtgcctactctgtcctgggaaggcagcagcacaaggtcgggattgaacaaggaagcgaggaggaagggttgaagaatctgagagtgctgagcacaagtggacctacaggcatccactactactacactaccccagcaccatctgaggtccccgaccgttaggaattctcctctgctgctcagcctcagcctccgcctccgcagcaagagctctgagacacctcttcagcgactagtaattttccttcacttgtgctagtatttatttaccacccgtgtgccatttgcatagacgagattctgatggttttttctttatgtactctgcgtatacaaataagatcatgttcttttaaaccaaggatatatagtagtagaagaattggccgtatcgatggtttgggtaagc

SEQ ID NO: 11952 - DNA, 590 bp, Oryza sativa
  ref <308>: DATABASE ACCESSION NUMBER: AK109300
  ref <309>: DATABASE ENTRY DATE: 2002-08-28
atgttcccccacccccgccgccgacgaactcccccctagccatggcgtcgcgcggtgccgcttcccgctccttcctcgccgccgtccgtggccgcgccgcctcgtcggcgccgcgcatccgcgcggctccgctcccctccgccccacgccgccgcgtcccctcctccgccttctcgccatttgccgccgcgaggccgatgtcggcgatgatggggtcgccggcggcgatggcggtgaggctgaccgggcacccgtcggcgagcgtgcgggcgtgctgtgagctctcccagggtaattaggcttgaacagtgctgtcccgactctgttaggatgcaattctttttagggttacagaagctctctggctcgtttttccccctgcctaatgggaggttgtaaggaactccctattattacttcacctgtcacctagtgaaaataacagtcaacatgatttttacattaataatcccctgttaaccagttacccgttatgttcatttggtcgtgaaatattggatgaagcatcattccttttcatgggaatgaatgttcttgttttgcaaagtttaatatgttcagatttctgt

SEQ ID NO: 11953 - DNA, 862 bp, Oryza sativa
  ref <308>: DATABASE ACCESSION NUMBER: AK109301
  ref <309>: DATABASE ENTRY DATE: 2002-08-28
gtaatcatccgaacccaaattcctataagcactcctcgatctctatacagacagcgaccagttcggcctcttgcacacggatgtaccacactaccacatgtcgatctcaaactcgtctggcatctcgcctccgctccgcgtttgctgatggatccaaacgcgaggttttcggacagctgtcgtcactcctcccaggaagccgcgtaactcttatctaacgaacgatcgaacgaacggagagcgttccaaaagaatcggggatcaatcgcgtcgcaggaaatggtgggcgcggagagggggagggggaagcggaacctggatgaagtagatcaggcagacgagccacaggaacggcgccccgaacgccgccgccatccgccccgcccacggcgaggaggaggacgaagccgccgccgccgccatggcggaaacgggcgggacggggtcccctcccaggagaacgcctcctcctcctcctcttcctcagctgctcgtcgcagtggattctagggttcgggtggatcaggaggtggaagctagagagagagagagagagagagatctcgtgctcgtcgtctcctcggcatgaggaggagaggaaacacgcggcgtgagctcgatggcgctgaccgggtgacgtgtccgttgactggcccgttttgccttggttggcagttggctcagtgttttggaccgttcggttaaccgattcatggttaatcgaaccatgaatgggtaagaattgaccgttcaattagaaatggttatttttctttgaggaaatttcactttgggtcaccttttattaccggtatttcactttgggtcacctttcaactaacattttcacattagactgggt

SEQ ID NO: 11954 - DNA, 1189 bp, Oryza sativa
  ref <308>: DATABASE ACCESSION NUMBER: AK109302
  ref <309>: DATABASE ENTRY DATE: 2002-08-28
tggcccagcaaccaacctctcgtctccgccgcttcgccctcctccggccgcccgtgcaggcggtgcagcctcccctcccccgtctcctccctacctcggggggaaacggggccccgcggtgctattaccaagatgactaaaagtataagggcaagaaatgttcatctcgtcagctcagatcacataatcggaggctcttcagccaatgcaatttcaagagagttgctaacaaggaattggcagcaacagagaaatgtgcgtggaaagattcaatctgtccagtttgcttggaatgcccacataatgctgtccttctactttgttcgtctcatgataaaggttgtcgtccatatatatgtgcaaccaattaccaccattcaaactgtcttgatcaactcatagattcgcggagaagctcaaaagattgtgaggacctagactccatagagcttacatgccccctttgccgtggtgaggttaagggatatacattggttgaacctgctcgggaacagttgaaccaaaacaagaggagctgtatgcaagatggttgctcatacatgggtagttatggggagctctgcaagcatgtaagaaagaagcatccttcagtgaagcctcattctgtggaccctgtacatacttacagatggaggcgacttttattccggagttcactgcaagatatgatctgtgcaacgagttcaccaatggtgcggagggttttgtatgttatgttgcagtttgaggagttgatggcatctgtttggcacgaaggtcctcatggagctatgcaaatcaatgaaatgaacttggctgatccatgatctcaacctcactgaaatgtgagaatatcttatgctgttctcgcaatggggtcagtgatttgagccatgctgatccatcatgtgtgacctgacacagaaagatatagcttttttagttttctgttcttgagggaatatttgtcaccatcttcagaagaaacagatcctatcctatgctgccatgaattcaagaaacctggtcaaattgtgggtggaatgtggaatggcgttgaaggcttttgttgatactatctcattgtagtcccccctttgtgtcgtgtgatgaattgatcctgtgcatcccttttgcactgtattgacattacattctattcggaaatgcagagttcacttgctcctgt

SEQ ID NO: 11955 - DNA, 795 bp, Oryza sativa
  ref <308>: DATABASE ACCESSION NUMBER: AK109303
  ref <309>: DATABASE ENTRY DATE: 2002-08-28
aacctcgtctacacttctccaaatccccccacggcgcatcgcccgctcgccctcgccgccaccaccacccgcctccggccaccgcacactagggcggcttgagccccagcgccgccgccatggacgaggaagcgaagccgaaccctaacgccgacgcggcgcctgctgcagcggaggcagcagcgtcttctccgccgccgctttcgagctcggagtcggcggaggggaaggataaggaggaggagaaggaggaggaggaggaggaggaggcgggggatttggtggagaagctggtggagttggtggaagagatcgccgccatctcggacttcaggaatgcataccggcggcagttctgcaacctgtcgcggcggatccggctgctcgcgcccatgctggaggaggccaaggaggggccgcggccgctgccggatgtgtcgtattccgctctccggcggctcagggaggcgctcgctgactccagggagctcctccggctcggcgtcagcggtagcaagatctccctggtgcgtttctcgcttgaggctcgttgttttgttgccatatttggtcgttaaaagattacatttcttctgcttatggcctttcgagtttatttaggatttaataggagaatttgcctcaagaattggagcggattttagtgcgttcatactccaaacttcgtattagcacttccaattgtcccctgtgatatgaccattttagataactctttgacatgatctactgtatctctacatttttaaaatattttgttgtttcttaattgtt

SEQ ID NO: 11956 - DNA, 927 bp, Oryza sativa
  ref <308>: DATABASE ACCESSION NUMBER: AK109304
  ref <309>: DATABASE ENTRY DATE: 2002-08-28
gaacggataagcggaagcagggccggccggaccgaccggcgagacagccgtaaccggggagatggccgcggcggagacctcgggcacggtggcggcgccggggaggtggtctctccatggcaagatggctctggtcaccggaggcacccgcgggattgggcgtgcggtggtggaggagctggcggcgctgggggcggccgtgcatacctgctcccgcaatgaggcggagctaggggagcgcctcaaggagtgggaggccagggggttccgcgtcaccatctccgtctgcgacctctccgcgcgggaccagcgggagcgcctcatcggcgacgtcgctgaccgcttcggcggcaagctcgacatcctcgtaaacaatgtggggacaaacataaggaaacctactactgagtattctgcagacgaatactcatttttgatggctacaaatcttgaatctgcatatcatttgtgtcaacttgggcatcctcttttaaaagcatctgggtcgggtagcattgttttcatatcatcagttgctggaattgtagccctatttagtggaactatctatgctatgactaaaggtgccatgaatcaattaaccaagaacttagcatgtgaatgggcaaaagacaacataagaaccaactgtgttgccccagggtacatcttaacttcgctttcagaaggagtaagtgtcttcttgtgttaatttactaagtttcactgtattaataagtcggaatatcatgtggcttctactatgatgaagtgtgctggttgctgctaggctgcatttgcttcatgactatcctttattcccccatataactgtttagatgttggtgcttcaaagtgcccttttttggaaaaatatgcaaaataattgtatatcactattaagattagaaatgaaggttttgaagc

SEQ ID NO: 11957 - DNA, 744 bp, Oryza sativa
  ref <308>: DATABASE ACCESSION NUMBER: AK109305
  ref <309>: DATABASE ENTRY DATE: 2002-08-28
atagcttcactcagccacggtctcctcctcctccttccatctgatccacctgtacgtacgcagctcagccgccggccggcgagaaggagaagaagctagccagccagccatggggaacagcctgcgctgctgcctggcctgcatgctcccctgcggcgccctcgacgtcgtccgcgtcgtgcacctcagcggccgcgtcgacgagttcaccagctgcccgctcaccgcggccgacgtcctcgccgcgcaccccaaccacgcgctcaccgccgcctggtcgccgggcggcgccggcgccggcggcgcgccctgcaggaagatcgtcatcgtgtccccggactccgagctcaagcgcggccgcatctacttcctcatcccctccgcgtgctccgcgcccgccgccgacaagatgatgacccgccggaagaagaagaagcgctgccacggcaacggcaatggcaagggcggctccgccgccgcggcgagcaccgcggagcaggacaactacctgatggagctgctgtccgagaagcgggggacgagccaccgccggcggcgcagcggcgcccgcgccggtgtgtggcggccgcagctggagagcatagcggaggagccatcagactagctaggcagctagctagtgaaccaccttttgaccattttttttccttctttttttttctcttcgtttcttctcctctcgatcttccgctgtgaatatgaacggtggatgatgaggaccct

SEQ ID NO: 11958 - DNA, 1088 bp, Oryza sativa
  ref <308>: DATABASE ACCESSION NUMBER: AK109306
  ref <309>: DATABASE ENTRY DATE: 2002-08-28
gatcgaaaccgtctacacgcagtcgacgtctacgcgacaagccgcgagaacgtacgccgccgccacaacacaatcccaagctcccaacctacgcaagctcaccatcgccggccgtcgacccaatcccagcgaccatgaggcgtctgctcgtcccggtgctcctcctcatgctcggattgtctacctgcgagtcctccgtgttgcaggacacatgcaagtccgtcgccgccggccacaagtacgtcacctacaacgactgcatcaaggccttccaggccgacagcgccagcgccaccgcggccgacgcgcgcggcctcgccgccatcgcggccaggatcgcggagaaggccgccaacgccacgtccgcgcgcatcgccgcgctgagagccgcggagaaggacgcgaggaggaaggaccgcctcggcgtgtgcgcggaggtgtactcggacgccgtggaccagctcggggagaccgccgaggacatcgccaggggcggggacgaggccacccaggacgcggtgacgcagctcagcgcggcgctggacgcgccagggacgtgcgaggacgcgttcggcgaggccgacgacgcgtcgccgctggccccggaggacgccgagttcgcgaagctggcgaccatcgccctcgccgtcgctgcgtccctctcgccgccgccatcgacaccggcaaccatggattgatactgtctattaatcatcgtgattcgcgcataattagaaatttagcatcgtggactacattcagctataataaaagatttttcgatgatatgttaaattttttatgctttacttggaaggattttgtccagtgccttgcatgttacgcatgcaacgtggtttagtgggcgagtagccagcttggaatctcatctcgcgctttttttatactccgtacgtggtatgtctttgaacgtgggtgctagctgttttctggaagtgggagcgttgagtggaagcaaggcgtgctgccttctgaacagcacctttgcctttcgccttcgctcccttcttttctatgtggcttgttggcatatattgctacaaaattgtactggtaaatatacagat

SEQ ID NO: 11959 - DNA, 1016 bp, Oryza sativa
  ref <308>: DATABASE ACCESSION NUMBER: AK109307
  ref <309>: DATABASE ENTRY DATE: 2002-08-28
atgaacatgaggaccatcatatccctcatcccagatacatgatctgtactgtctcctcctctctagcttccctcctctccctgctgtgccccttgctttgttgcttggtcaattagagctaagcagcaagctagcttcctggaagcaaggccggcgcctggctgggacaagaaccacaggaaccacagctgactgattgatcaatcaatcaatcttctgctgccctgctgcctcacagcctcagcaagacagtacgtacagatcaattttggccctcttgaggctccggccggtcgccgactcgccgtcgtcgaaggtgctctccggccggcggagttaacattgagcttgatttcaagccgcgctccgatccgaccggcaaagcgccgaagctgccttccgtttgtttcactctggtctctgggggctcgccatcagccatccgtaccgagctgtaggtatgaacagaggagatatcctgttccctgtatatgcatactatttcgatacagtagttttctcgacatgagatttcatgcatgcagaatttcacgctcgaagttacctaattagaagtaatccatactctcgaaacaacctatttaagtagcactactatgtaggaacagaataaccgacgtcgttgcccgggcgtgtcagttaacaaacgacaaagatgtgcaacgcacagcctgcaagttacataagcatccgctcgttcagttaagctggcagatcgaccacacactagctttgatttgcgctaacagtgtatcagatctaactagctcttggtgtaataagatgaactgtagagcgaagcggatacggacagtgtaattatgaggctcgagacatcttcctctcccgtccctgtctgaacatcaatgccgctcaccagcgccactgtttcttgatgctgattacggatttgtaattccatcgatcacgcatgcgcgcgctcttcttgtaattatctagagagattaattgctcgtcttgatcggtgtctgatt

SEQ ID NO: 11960 - DNA, 554 bp, Oryza sativa
  ref <308>: DATABASE ACCESSION NUMBER: AK109308
  ref <309>: DATABASE ENTRY DATE: 2002-08-28
agtctcctccaaaccgtcgagagcccaacaataataatccccccttttcatcgcggcgacgatacccgccattttcatctcattctcaccaccaaaagcgaccacgcagcgaccggccaccgatcgagatggagcagcatgaggaggcagcggagaggaagccttcgccgccggtgatattccggctgttcggcgtcgaggtccgcggcggcggcggcggagttgacgaggaggagtacgaggaggaggaggtggagggtggattgttcatcaagaagagctccagtatgcccaacctcacctccatcgacccgctgccggtgccggccgacggcggcaaacggcgcgcctccgacgactccgagctcgcctccggccagcagaagcgccgccgccgcaaggtgcaggagaggaagaaaggtgagcaaccaccctttttgtctgttcttgtatctactgttcattacttgttccatcacctgattcctttttttttactctgaaacttccaactcactgttaattcttgacgcaatttgatgatccgtgaaagc

SEQ ID NO: 11961 - DNA, 802 bp, Oryza sativa
  ref <308>: DATABASE ACCESSION NUMBER: AK109309
  ref <309>: DATABASE ENTRY DATE: 2002-08-28
gcgatagcatagcaacaccgtaattccgttccgttccgttccgttccgtcgccccccccggccggcgagggcgagggcgatgtccttcttcttccgcatggcgtcgcggctgcggccgtcgacgccggaggaggtggtccgctccatcaaggactccttccaggccctccacaccaagaacggcgccagggtaaaaatcccccttctcctctcctctcttctcctctgtttttcctcttctcttcttggcccgccgctcgccgccgcgtccgacgatcaaggcaggggatccgtgcgtgcccgatcccggattagcccccttcatcacgcatgcagctggagatagatcaaaaccggcgatcttgctgcccgttggtcggatggtaaagacttttctttcctcggcgtgaggatcatttcttcgtaattgaggggcacctgagccttttagcggtgagattgctcattgcggcctattgttggcgagattatctctgggcatgtcagtatatgtttaagtggggagatgcagcgttattcattgtaattctcgaaccaaaggtttcagcaaacctggtgataatagtacgagttccttttttgtgctttttttttaagtcttgtggttgtggcagaatgtgtaattgtgtattatttcggtagattgttcaatggtccagaaaccagtgaattttagatcaggatgattgtaaggtttgctgtgctcagtcatgtcatgatattgttcatcatgcttgttcactctattgtgaagatttcttgtactgctgtacatagtttg

SEQ ID NO: 11962 - DNA, 767 bp, Oryza sativa
  ref <308>: DATABASE ACCESSION NUMBER: AK109310
  ref <309>: DATABASE ENTRY DATE: 2002-08-28
ttgaaaaagccgctggacgggcgcaagacgtaccggggcattctgcacgcgccgaatggcgaaacgatcggtttggaatttgagaggaataagggcgaggccgccatgctggatttcacgctggccgatatcgacaaagcccgcctgattccgcaagttgactttaggagccgcaaataatgagtcgcgaagtgttgatgctggtggatgcgctggcgcgcgagaaaaacgtcgacaaggatgtggtgctgggcgccctcgaggccgcgctcgcatccgcttccaagaagctgttcgacgaaggcgccgaaatccgcgtccatatcgatcgcgaaagcggcgagcacgagaccttccgtcgctggctcgtcgtgcccgacgaggcaggcttgcaggagccggatcgcgagatcctgctgttcgaagcacgtgagcagaagcccgacgtcgaagtcggcgaattcatcgaggaaccggtgccgtcgatcgagttcggccggatcggcgcgcaggctgccaagcaggtcatcctgcagaaggtgcgcgacgccgagcgcgagcagatcctgaacgactacctcgagcgcggcgaaaagatcatgaccggtacggtcaagcgcctcgacaagggcaacttcatcgtcgaatcgggccgcgtcgaagcgctgctgcgccgcgaccagctgatcccgaaggaaaatctgcgcgtgggcgaccgcgtgcgtgcgtacattgcgaaggtcgaccgcaccgcgcgcggcccgcag

SEQ ID NO: 11963 - DNA, 986 bp, Oryza sativa
  ref <308>: DATABASE ACCESSION NUMBER: AK109311
  ref <309>: DATABASE ENTRY DATE: 2002-08-28
atcatcatcacaccatcacgagcaccaccaccactcaccacgcgccacccacccccgcaccgcacgccaagatccgaccgccgccgccgccgccgccggagtagggagagggagaggagatggggcggagggcggggtcctacccctactacgtggaggcggcgccgccggtggacgtgaacaagaacacggagtggttcatgtaccccggggtgtggaccacctacatcctcctcctcttcttcgcctggctgctcgtcctctccgtctccgcctgctcccccgggatcgcgtggaccgtcgtcaacctcgcccacttcgccgtacgtcccgcctcgccccccgattcattcatccatccatccattcattgacggcgagtttgctccttctttcattagtccgatccgttcttgattagcgccgctagctagtcctatcctgtcgcgtgttggtctcacgcacccgatctgagagtcgcttctgctgctgttcttctttggtactatctttgatgagatacagtggcggaaggaatcgaggaacacaccaacttgcggagataatttttctcttcttcacaaatatctttttctcaaagaagcgtcgatttcgcaagctgaaatatcagggaataatcttccttacctttttctctgctagtttgtctcaagtatattccaaccttgcaaaagtcaaaagagatttcttggtgtatgtacaatctgttcaggttgaactcaagtccaactacgccttcagtctaaaacaactagcagtgagttgatgcaagaatctgttcactgttcacatcattgcgctaaaaaaaatgttaaatgttaaatccagattatgttatgcgtcgtgctttatttgtggacttgcatacgtttcttgattgtcctaattgacaaacgttgcattgatagaattatgggttgacaattgtcatatgttctttgtcatactgggtggttgtgtgtggc

SEQ ID NO: 11964 - DNA, 734 bp, Oryza sativa
  ref <308>: DATABASE ACCESSION NUMBER: AK109312
  ref <309>: DATABASE ENTRY DATE: 2002-08-28
gtgttggtaagtactatttccactcaccacatcgccgcgggcgacgccgaagcgggcggcgagcgcggcggccacgcggacgcaccgccgccgcgcctccctccacgtgtgccgcctctccccgcacaccaccgcggcgcggtcgccgtagaccgccgcggcgcgctggatgaagctgagcggcgtcagcggcgcgtagttcgccgcgcaccgcaccgtgccggcctccatgtcgagcacctccccttcggcctccccctcccttcccgcgaggctggagaatagcagagatgctgcgctggatctggcagaagtaaacgctcgctgatggcgccatggcgataaattaatcgcgcggggggaggcgagattagtagtataatccaagtgaggaattgaataatcttggggagattggtgatgacatggtggtgatccggtgctgatgcggcgagctagcctacgcaacgcacgggatgcggctctcatggtgtgtgactgtgccagtgacgctgtcatcttgtatagccgtgtctgtgtcactgtgtgaggctactgttcactccggcagggacgcagcgtatgcatccatatgagctggatttttctgcatcggcatatcgtctcttttcttcgatttttttttgtaaggagtacagaagctttgcccagtatattaaggtggtgtttggatcacaagatactaattttgagtataaaaatagacaacttac

SEQ ID NO: 11965 - DNA, 683 bp, Oryza sativa
  ref <308>: DATABASE ACCESSION NUMBER: AK109313
  ref <309>: DATABASE ENTRY DATE: 2002-08-28
gcgcaagcaccaatagctagacagattggaaaagagctcgatcggcgcaatctcttccccgcgactcatcaatcaaaatcgtcatccggccatccgggtgccgtacttctgttccgccgccggcgcccatgcgtgctgggagctagttccggcgccgccgcccgcgtgcaggaggccaccaccgaccgccgccgcccgcagagcagcgcaggaggccaccaccgaccacagccgtccaccgccgcaggcagagcagcgcaggatcccgtcgtcgaccatcgccgcaggcatagcagcgcaggagtccgccgctgacgaccgccgcaagcaaagcagccccgacgccttccttcattccgtcgccatgccctcgcctgagaagttgcatattgtatgaacatgcatatttatgttcttgatatgtgtttgatactgacaggttgttcttgatgtaaaaaatgattggcgatgattaatactgtatgattgctggtattaatcattacttggaaaaattgcatgttgtcttcaaactgagtggatgttgatacatatgtatgatgtcttcaagtagagtggatgcttaaacaatatgtacgtaagagcttatatcggtcctgattatgctcagacaatatgtatcttatattttgtttggatatatataatattcatcttgagtt

SEQ ID NO: 11966 - DNA, 903 bp, Oryza sativa
  ref <308>: DATABASE ACCESSION NUMBER: AK109314
  ref <309>: DATABASE ENTRY DATE: 2002-08-28
actattcagggcatccatcgatcagagaagagagacgagcgatcgatggctgaggagctgaagctgctggggtcgttgtccggcgtgagcccgtacgtgatccgcgcgcagatggcgctcgccgtcaagggcttggcgcacgactacctccccgaggacctcacccgcaagagcaagctcctcctcgacagcaacccggtgcacaagtcggtgcccgtgctcatccacaacggcaagccggtgtgcgactcgctggtcatcgtcgagtacgtcgacgaggcgttccccggcggcgccgccgcgctgctccccgccgacccctaccaccgcgccgtcgctcgcttctgggccgccttcatcgacagcaaggtgttccctccgtgccttgccattctgaagacggcggcggcggaggcggaggaggagaaggcggcgaaggtgaaggagacggtcgaggcgctccagctcgtggaaggggccttcggtgagtgctccaagaggaagccgttcttcggcggcgacgccgtcgggtacctcgacgtcgtgctcgggtgctacctgtgctggttcgagggggtaagcgagatcgctggcggtgtgtcgccgccgctcctcgacgcgtcgaggacgccgcagctggccgcgtgggcggcgcgcttcagatcagcggccgatgcagtcggatgctcggttcctcgggtggacaaggttgaggcttacctcaacaacgtgctcaagccgaagtggagtgccgccgccgcggcgtccagccattaaaattccaatccgtatttgtattttgaaaagtttttgagcgtaccgtcaagtacgttattgacggcaggaaaatgccaagagttggacgtactactgctatgaattattatttcagtggattaaaag

SEQ ID NO: 11967 - DNA, 1300 bp, Oryza sativa
  ref <308>: DATABASE ACCESSION NUMBER: AK109315
  ref <309>: DATABASE ENTRY DATE: 2002-08-28
caggcgaccgttacgtcccaccaccatcacgctcaccgcttcgcgatctcttttacgattaacccctcgcagaattagatatagcggcgcggcgagagagagagactatttttgggcgtaatccagcgcggccgtccgcccgagatctccctctcccaccgcgcgtttcgccgctggaatccgcgccgcagagagcggggggtataaagaggtgagacggtggtctcccggattcggtgggtggtgggtcccgctgctgtgtgcgtgtgcgtgccgagggagggagggaggcctcgtcgccgccgatggagtcgtcggccggcggcggcggcggcgagtctccgcctccggcgaagcccgtgctgctccacggggacctcgacctgtgggtggtcgaggcgcgcctgctcccaaacatggacatgttctccgagcacgtacggcggtgcttcgccgcctgcaagccgcccacctcctgcgccaccgccaggcagccgcgccacgcccgcggccaccaccgccggaagatcatcaccagcgacccctacgtcacgctctccgtcgccggcgccgtggtggcgcgcacccgcgtcatccccaacgaccaggaccccgtctgggacgagcgcttcgccgtgcccctcgcccactacgccgccgcgctcgagttccacgtcgaggacaacgacacgttcggcgcgcagctcatcggcaccgtcaccatccccgccgacagggtcgcctcgtgccaggaggtggaggactggttccccatcatcggcaacaacggcaggccgtacaagcccgacacggcgctccgcctccgcctccgcttcaaccccgcggccgacaacccgctctaccgccgcggcatccccggcgaccccgaccaccatgggatcaaggactcctacttcccgctccgccacggcggccgcgtcacgctgtaccaggacgcccactacagggaaggggacctgccggagatcgagctcgacgaggggggcaaggtgttcgaccacaacgcgtgctgggaggacatctgccacgccatcctcgaggcgcaccacatgatatacatcgtcggctggtcggtgtacgacaaggtgcgcctcgtccgggagccgtcgccgtcgaggccgctgccggaaggcggcgacctcaatctcggggagctgctcaagttcaagtcgcaggagggcgtgagggtgtgcctgctcgtgtgggacgacaagacgtcgcacgacaagttgttcatcaaaacgggtggagtgatggcgacacatgatgaagaaactag

SEQ ID NO: 11968 - DNA, 643 bp, Oryza sativa
  ref <308>: DATABASE ACCESSION NUMBER: AK109316
  ref <309>: DATABASE ENTRY DATE: 2002-08-28
tggctctctctctctcgctgtttctcgtcgcttccagatcggcgcccacgcgagaagcggcggcgaccgcgcgtgtgcccaggcgacgactaggtcgagcgcgcgaggtagcagccgtcgccgacatcctctctcctccacgcttcccctccctcatcggcttcccgtccaagaagaagcggcggcggcggcaacgccgacgacggcagtggcggcaggaagcagcagcgaggtcgagcatgcaaggtagcaatcggcgtagtctcctcccttctctgattcccctccctcgtcggcttctcatccgggaggaagcggcgacaacggccgcgcgtgtggctccagctccgccaccgcggtcgccggagaaataggcgctcacgtcagggctcgccggcgtgctctgcaggctccggctcaggatctccatgacggcaccgtccagttaaaacatgccggccggttaaatagcgtggagctagccatttgtctgctttgatgtggacggatcacaaggaattttgcaaaggttaatttagtgtctggttcttctaagtgaaatgcagtgccaaaactgagtgatatgttcaagaacacgaagttgacatagttgtttttggcatttttgcatgacagctctgat

SEQ ID NO: 11969 - DNA, 1014 bp, Oryza sativa
  ref <308>: DATABASE ACCESSION NUMBER: AK109317
  ref <309>: DATABASE ENTRY DATE: 2002-08-28
acactgatttgtcagccagagctgcagatcaaactggggcacgggcgctccccacgcgcgcagaacagagcaccacgaagctccaaacacattcctccatcatctcatcttttgaccggtcaccggccggccggggacctacgcggcggccaccaccaccaccaccggcagcgccatgacagcctgaacttgtgtttaagtaagccccaaagcgtagcaaagtattgcaggaccaacgaaaagtctatataggtttcaaatggagtgcggtgttacacttccaatcctctatggccacgtagccttgcggccagggttaccgatttcgaggtaaaaaccggttcctgttggccgcaaggctacacaaaaccggaccctactggtttcaagaacaaaaaaaggaatggactcccgcactatctctagttctttacacatgtcatggaggaataactcagtgaaacaacgcactgtctggtgctgtttgttaaaaaaaaaaagaaagaaaaaacttagagtgactgaccaagaaatccatgatctggtctacgttcttggttcgtctaccgattcatcaagaagagattccacaccggcctagctacggtgtcccgtgatgtcggctgtcggcaagatcaacatgtatgtttcgttcagctcctccagtgaaatggccccggacagctatatagcctgaatcccaatcagagatgcagtcatggatgataaccatgcgtcgtatgcttcagtaattcagtttagtaggctcatgtgcctctgaatctctgattgggaagttgcagtaggcagacattccagtttggatgccatgatcagttagttatcaatgccgatcctgtgctgatgcagttgttgggttgggtctgattagtgtgacgagcaggaagagacatttgccagtttttctggatctgctacatcattcagaggctttgctaattgatgctgtatttctgtctccaaaaaaaaaaaaaagtaagtgaaatctttgag

SEQ ID NO: 11970 - DNA, 891 bp, Oryza sativa
  ref <308>: DATABASE ACCESSION NUMBER: AK109318
  ref <309>: DATABASE ENTRY DATE: 2002-08-28
ctctctcgatactcgattcgatagtgacaagaggaaaagcgcggctctctccgtctccggcggcggtgacgcgaggaggaggaggaggaggagcccgcgccgccgggccaagccatcatggacgaggagcagctgcgcgcgctgctccgcgacctggacgcgctcaagcagcgccccgaccccgccgccatcgatcggatgcgagagcgcgtggcgggaatggtgaccccggccgccgctgcacggtccaagatcaaggatatgagctcggaggtggtggacagcaatccctacagcaggctcatggcgctgcagcgtatggggatcgtggacaactacgagcgcatccgtgattactccatcgccatcgttgtaagcacagctcctgctcaatattgctttgggacagccatattagcttaacctaccttctgaaggaagattgcatatgctcagtgttagttttggacagacttatatgtgaccctaccttctgaaggacacacactaggcctctaaacctgccgtgaaagagtggttcaatcgagttatttcgtaagtcataatacttaattgacaaacattttagtattagttttaccattagttgtcacatttattctcacctgcacttggcagtaggagctttcagaattacccctttcagagcttccagaattacccctttcagtcttacaaacatatggtatggttagacaatgttgtcaggttctcggttctctcactaatacctgattaaatgggcaagaccgatgatggtttgtttggcttcttgaattgtcatttctgcaccaaagtcaaattttgtcacatgcctgttagatgtgtattagataggttgtatttatggttttatgtcttttggctttc

SEQ ID NO: 11971 - DNA, 1128 bp, Oryza sativa
  ref <308>: DATABASE ACCESSION NUMBER: AK109319
  ref <309>: DATABASE ENTRY DATE: 2002-08-28
accatctagctcactcacacagtctccactcacacgcattgcagaggagaggcgacaatggaggggaaggaggaggacgtgcggctgggggcgaacaggtactcggagaggcagccgatagggacggcggcgcagggcgccggggacgacaaggactacaaggagccgccgccggcgccgctgttcgagccaggggagctcaagtcgtggtctttctaccgggccgggatcgccgagttcgtcgccaccttcctcttcctctacatcaccatcctcaccgtcatgggggtctccaagtcctcctccaagtgcgccaccgtcggcatccagggcatcgcctggtccttcggaggcatgatcttcgcgctcgtctactgcaccgccggcatctccggaggacacatcaaccaattttgtatctgtttctcattttttgcccccaatttgtgtatgtattacatgtgtgtcccttttacccccattttgtgtatgtatgtattatcagtattatcctgctgatttcacttactggtgactagtgaggtggtgatgacgcaggaactgaacaatgagtagaatgatatgcccatcttgtcaacacgctcccgtatctttcctgccatcttgtggtgtcctgcacaaggagatgccggcaagcgagctccttgattggcagcaaacggaaagtatttttaatgggaatgcaaccaagatccaattaagcaaggaaccccaagcttatcaacccattcagattgggtacaactaaagattgcacaagctgaatgcctgaataccagacttgaaggaagtttgtgcaaaatatgacttcttcaagcagagcaccgctttttattaccttcccagaagctagctgatttgtccacaagtttcaattatgccaaaagggtcctgtgaccgaatttaagctgtggagcaattaaaagtagaaggccgtagggttgaaattcttgttgaatagaaaaaaacaagagaaacagttgcttgtagctagcccagaagatctatttctaaaaggggatattgtgtacatgttcttaactatttgtaatttcgtcgtggtgtagtgtgaaacgtatgtactagtatattctttttcctatcctc

SEQ ID NO: 11972 - DNA, 844 bp, Oryza sativa
  ref <308>: DATABASE ACCESSION NUMBER: AK109320
  ref <309>: DATABASE ENTRY DATE: 2002-08-28
atcggcaatctgattctgatcggccaagatcaggggcaagaatccaagaaacccttttccgttgccgatcatggcgagtcctcttcgccgtcgccgttggcgatgacgacgactaccggcggcggcggcgccggcgagttctactgttccatctgcatggagacggtgcccggcgctctcaagttcagcgtcagcccatgcctccacgccttctgcgtgtgctgcatcggccagtacgtcgcggccaagatcggcgagaacaccgccgacgtcaggtgccctgaccccggctgcggcggcggcgtcgagccggagagctgccgcggcgtcgtcccctcggaggtgctcgacaggtggggcctcctgctgtgcgaggcggcgatcgtcgcgaggaggctgcactgcccgttccgggactgctcagagccgctcctcgccgacgccgacggcgagggcggcggcgtggcggaggccgagtgcccgagctgccaccggctgttctgcgcgcggtgtatggtgccgtggcacgacggcgtcgggtgcgaggagttccaggagctcggggaggacgagcgcggccgggaggacgtgatggtgcggcggctcgccggcagggagcggtggcagcggtgcccccagtgcaggatgtacgtggagaaatccgagggatgcatgttcatgaagtgcaggtgtggatattgcttctgctacgcttgcgcatccccaatgtcaaaggagctccattactgcaagagatgcaagcgctgatatcgttggctaggtttttttttcgttcaatttgatgaacgcatatatgagtgatatatggaaccatgctttcacc

SEQ ID NO: 11973 - DNA, 708 bp, Oryza sativa
  ref <308>: DATABASE ACCESSION NUMBER: AK109321
  ref <309>: DATABASE ENTRY DATE: 2002-08-28
ctcactcttggacactttgagctaagctctcatctttcgtctaaatcttctcagaaaattcacaacacaataaatcttctccttgatttcaatctcatcatcgccatgggcaactgcctagtgatccaagacgacagagacaaggagatcaagatcatgggaatggacggcggcgagatcctcaagctgcaccgggatgccgccgtctccgactccgacgaccccgcggccgacatggcgaaggcagcagctgctgccgccgccgccgccgctgccgatacggccggcggcgtcgtccgggtgaagctggtgatcagcaagcagcagctgaagaagatgctgcacaaggatggcgtctctcttgacgacatggtttcgctgatgcagagagaagcaagtgagcaggagatgatcagctgcagagggtggcgacctgccttgaagagcataccagaaggcagtgattgttagctactagtacataattaattaattaattaattatacttaactagttcaatatatatacaagatatattagctagactgctagagttatactagtagatgttttggaataagtgaaagaaatatctagcgtaggaccataggtatatatatgctcaacagatacatgtaaatatggagatagatatggtgtacccacttaaaaaaaagttttgagagatgaggattctctttatcttt

SEQ ID NO: 11974 - DNA, 663 bp, Oryza sativa
  ref <308>: DATABASE ACCESSION NUMBER: AK109322
  ref <309>: DATABASE ENTRY DATE: 2002-08-28
catgcataatctagttgtagtgcagaatctgcacgattcctagttttttttttttggggggccttgtggccggccggtatggagtaacaaccaaatctggcatatcaactctaacatagaccctcaaaatatcccaaagcacacaaatcatctcagatttcacaacctgttcttccaaaacacacacacacacacacacacacaaaaagaaagttcagcaaaatttggcaagattgcgacaacacagagaaccacgcaggcaaacatggctgctaaccagccccgcaatgggcggaatccgagcatggaaaggaggagaggaggggttgtacggatatgataccgtcgagggagagcgcgttcacgggggggttggagacggtgatgacggcgacgccgtcgcggcggacctccacggaggtggagcctctcgccatcgctcgctcgctcgctcgccggccggagaaggcaatgcggggagcccccctcgccgccggcgacgatgacgtggctcacactcgcccggccgcgagatctctctctctctctctctctgagaatacagccgacagatggtatagtactactactactctcctcccggactctggttgttcaactggttttaataatagaaatgattaattatttgccagtggtgat

SEQ ID NO: 11975 - DNA, 1171 bp, Oryza sativa
  ref <308>: DATABASE ACCESSION NUMBER: AK109323
  ref <309>: DATABASE ENTRY DATE: 2002-08-28
gcgagcaaaagccgccgcgaaaccgcactagccgagtcgacggcaaaccggcggcgagttggctggctcttccgctcgatccccgtcgcggcgccgcctcgtctcgccgtcctcctccgatccgatggagcgctccacccactccaccggctggacctgcctcccaccgccgccgcccgaacccgctgctccaggtcgtggagtatgcgcaatgagcacttcatggagggataaacaacagccaagcctcatcaactttattgctgcattcttagctgcaaactcataccgcctaaacttcctgtcaatatctcctgactttatattcaacaatggggagctatctgttgcatttatctttgagacaaactgggattgtcaaaatgaaggtgctgtctttagcagggtgaatatgctgaagaggcagttaaaacatctatatgttgttgttgctgttcctacaaaagagcaaaacgaatcatttaatcgatcatatcacaagtatggtatgaagcttggctttcctacgtttgtgcctgttactgatccggagatggggttcgagaaaatcgtgaagatagctcatgcacttggagtatgcaagcagcaagacattatctcaagactgaagaatgagcgggagcaagcagttcagtgcactgattcctttctacgtgtgctcacctctattcctggtattgacaatcatgacgccaatgcgcttgcccaagctattgggtctattgaagcaattgcaaaagcatccaagaaatttattctagaaaacactgacctttccacggataaggcagagacaattgtcaggttcttcagagatccgcagtactacttaagccctaaaattaactagttacaggcagaaggtgattgtgaacctgagctatggactgaatcaactgggcggactgactgcctgcggaagcctgtgcacagcttctttatccttgtggttgctatattgttacgtagtatttttagaccattaatactctgtgtcagagagaatcctgatgcttctgcttagttgtgagttgcgactcctcaaaggctcctgattgcgttgggtcagcaggcagtcttttgatcttaactagatggaaaaagagaaacaaagtctacttatatagcaatcactgttaaatgtcctgct

SEQ ID NO: 11976 - DNA, 901 bp, Oryza sativa
  ref <308>: DATABASE ACCESSION NUMBER: AK109324
  ref <309>: DATABASE ENTRY DATE: 2002-08-28
aaatctactctcttgagaaagaagaagatttatattctagggagtagaatttggtcatagaatttgtgatctcaaataaatatggaagcaagcctcaaatctcagattatggtttatcaggaaggaggagtgcttcaagcatctgcgaggaagaacccattcagattacgctgcatttttttttgttctctcgcctcccatccccatctccgcgtctcgcgaccccgagctcttcctcgcctcgccgatcgccgcgccgctctccggcgaagcgcggatcgagccgccgccatccgccatggcggaccccgtggagctcggagcgcctccctcccccgagcccctctctcccttgagggagctgatcgacgtccccaccgtggtgtacgtcgccgacgaggaccccaagttcgccgctctcgccgaccaggcgtacgccgggttccccttcctcttcgtcaccatgagcctaaaagccctggcctacaaaaggatggatctaaatgaactcgatgaagagcacagtgctcattaccttcgcctaaggtttgagaaccaacttcaggatgccatggaaggtatggcggctggtggagaggaaatgagggtggcgctggccaggatggagaccctgaagaaatcggtgcagtttcattttcgccgtatgcaatacgcagcgcatgagttgcggaaggtggtgcttaaagaggaagagatgtacaagaagctggttaccctgaccaactgagccaagggagaatggcgtaacgatggcttctgtggtgtaatctgggggtaaatgtctctgtgctcaagaattctcctctcatgagacctgtttccatctcctgccacgtaactactccacgtactagaacttggactcgaaaaaaaaaaaaag

SEQ ID NO: 11977 - DNA, 744 bp, Oryza sativa
  ref <308>: DATABASE ACCESSION NUMBER: AK109325
  ref <309>: DATABASE ENTRY DATE: 2002-08-28
ctctccgtcgtccaggagacggccggcgacggcgacggtgacgccatggaggaattccaagaggctgacatcctgtggcccgagcccgcggaggacaactccgacgacggcgcggtggttgtcaccacgacgccgtctccggtggctcgtcgtcctgtgggctcgccggagtcgtcgtcgttgtctgctccggtggagatcgccgcctctcgccggaagcggcggtctcggtcgtgggcttccgagtacaacatgttcgaccagaccaacgacgacgacgacgctgtgaagaagaagatgatgaataatggagttatggtcgcgccgccgcacgccattgttgatcggaggaggctccgaggaaggacggcggcgtactccatgtgcgccggcaaggggaggacgctcaaagggcgggacctccgcaacgtcaggaacctcgtcctccagatgaccggattcatcgagaaatgaacacagaattaagattattgattgattggttgattgattgattgcgaataggatatactgaaacctgaagattttcagcttgcctgaaggctgaagatatttgcggaatgcaataactctttgtttaattaattaatcatctgtaggattgcaagttgctggctcgtggaataaatgtacatgtattacataagaaattaacaaaagaaaggggaaaaaaatgaatgccagatgctacagagttgctgaattattgtaactctgtaaaac

SEQ ID NO: 11978 - DNA, 718 bp, Oryza sativa
  ref <308>: DATABASE ACCESSION NUMBER: AK109326
  ref <309>: DATABASE ENTRY DATE: 2002-08-28
aggaacaaagaacagaatcctgatcttagtgccatcgcactgtgggacgtgacggggcacgcggccacggtggcgcagctggtcggggcggacgtcggcggcctcatctccatgatcatgcaggctgcgatgacggctcaacagaacaagaaggagtgcgagcagctcgcccgccgcgtcttcacgatcgccgagctgctgcagcacctgcaggatccggaggtgcttcggcggcctgagatccggcggccgctgaccgggctcgacgacacgctccgggaggcgcacgagcttgtgttgtcgtgccaggacaagagcgccgtgtacaggttggtgatggcagggcggcaggctgagaggttcagagatgttcagagcaggatcgactcgtacctcctcgtcttcccattcatcagccacatagacatcactcgtcgtctcgatcgtatctacaacatcctgcttccaaccaacacgcccggaccatctacgcctgctttccccgtgcccccaaatccagtccctgccgctcaggtatacattgaaatgggaagactcaagcattcaattgtttgtacttgtactactaccaactgcaactcttttgatttggtattcagttcctcttttctttccgatgtgtattcatcgatatactaggttgccacaaagtttgttcggacagaaatccatggagtaaaagaattcacttttaagc

SEQ ID NO: 11979 - DNA, 1043 bp, Oryza sativa
  ref <308>: DATABASE ACCESSION NUMBER: AK109327
  ref <309>: DATABASE ENTRY DATE: 2002-08-28
agtctcctaccctccttcctcctccggtcgtagcggcggcgcccagcggccgcgccaccgcgtcgtccccccgccagctgcggcgcctcgcctggtccaccggcggaggggccgtgcggcgccccgcctctttcgtccgcggagaccggggaaagcgcagttccgttgctatcagcggccttcgcctctgccctgagtaggcggcggaaagcgcggtggctaaggactccaactgcagcggcgtgttccagaagtatcgcggaaactgacgccttcttccgggagcaactgagcaaagggtatgcatacattttcttactgagcaaccttttggaatccctctctaaggaactgtttactgcaacatctttaggttcttattaataccatggatcagaaacctaaggatgattttgatttccttgaaccatcagtactcttagatgagacacactatcaaacgggtttcaagaatggttatagtgagggcttggtgtctggaaaagaagagggaaggcaggttggtttaaagaatggttttcaggtaggtgaagaactaggtttttatcagggatgtctggatgtttggacgtcgttggtttcaattgatcaagatgcattctcagctcgggtcaggaaaaacattgagcaactagctgcactgttgagaagctatccgttgtcgaacccagaagacgagcaagttcaagatataatggagaagataagactgaaattcagggttatcacagcaagtttaggtacaaaactggagtatcaaggtcgccctacatcatccaagcaggatgttgaggatctgtaactagtttagctttcattgtcaaattaccatgttgaaatgatatatgagacccaaacatgtttatgtaggtttcggttaacgaatacttgttcgagtgaatgctgctatattactctgtttctaaacatcttatgaaggccaccgggatcacagtggagacctgaaagcctgtatctgagtatctatgtacactcaagttaatttgaggcagttctggact

SEQ ID NO: 11980 - DNA, 768 bp, Oryza sativa
  ref <308>: DATABASE ACCESSION NUMBER: AK109328
  ref <309>: DATABASE ENTRY DATE: 2002-08-28
acgccgccggcctcctctgtttgtgtttggtgagtggtgtttaatcggtgtcggtgtttggtggatgccgtgcaagccgagcggatgcacgcggggttggaggaagcgcagcgacggcacgtccgggcgctggtggcggccgcggcgcgcgccacaacagggaggacgcgtgcggcggaggccaagctggatcgcgcacgctgccgcaacgcggagctggaggagaagctccgccagatgagcgcggaagggcaggcgtggatgggcgttgccaagagccacgaggctgtcgccgccggcctccgcgcgatgctcgactagctcctccagtccccctatgccgtcgccgccaccgcgggggagggcgacgccgaggatgcgcagtcgtgctgcttcgagaccccaggcggcggcgccgccgccactgccaccgacgcggtgtccggggcgacgtcgtgcaaggcctgccgtgtcacggaggcgtccgtgctgccgcctgtgcctgtgcggcgcctgcgaggccgccgttgacgcttgccccgtttgcgccgccaccaagatcgcctccgtccatgtcctcctttcctgaagtcactcacatgtgccacaccagctactgcatggagtaggagatttcgatagcgcaacagctgtggccagaccgaaaccaggcatccgtcagccaactccggtgtcaagcaagctaacaacaatcatcctgtcccaagttacatggaaattcatgctagggaagccacagttctgtgc

SEQ ID NO: 11981 - DNA, 1635 bp, Oryza sativa
  ref <308>: DATABASE ACCESSION NUMBER: AK109329
  ref <309>: DATABASE ENTRY DATE: 2002-08-28
gctgcggaattcctcgagcactgttggcctactggatcaatcgctgtcatctcatctcccaaccttttttttcttaccctcgcggaaatctaatccttttttttttttcaatttcgatttagttgctgttcgtcctcctccaccaagaatcacccacccgcgagatccaatccaatcctctcgcttgcattttctgctgctgcgtgcgcgtgctgagatttcattcggatttgttgggggttcgctgagatcggagatgacgtcgccggcgacgacgtacgcctcgccgttcgtgctgtcggtgctcctcctcgtctccatcccggtcatcttcctcctcgcgccgcgcctcctcccgcccaagacgcttccggccatcccggacgccgacgagtccgacgacctcgcgctcttccgccgcgccatactctcctcctcctccccctcctccgccacgcccacgccctcctccgccgcgtcctacttcttccgccgccgccccgcccccaaggtcgccttcctcttcctcaccaactccgacctcgtcttctccccgctctgggagaagttcttccgcggccaccaccacctcttcaacctctacgtccacgccgaccctttctccgccctcacgatgccgccgacgccctcgttccgcggccgattcgtcccggccaaggccacgcagcgcgcctcccccaccctcatctccgccgcccgccgcctcatcgccaccgccctgctcgacgacccatccaaccagttcttcgctctcctctcgcaatcctgcatcccgctccacccgttccccacgctgtacaacacgctcctctccgacaatgccgggcctcatggccgccaccgcagcttcatcgagataatggacgatgcctacatgattcatgataggtactatgcccgaggcgacgatgtgatgctcccggaggtgccgtacgaccagttccggttcgggtcgcagttctttgtgttgacgaggaagcatgccatcatggtcgtcagggacatgaagctatggaggaagtttaagcttccttgcctgatcaagcgcagagactcgtgctatccagaggagcactacttcccgacattgctggatatgcaagaccccgaaggctgcaccgggtatactctgacaagggtgaactggacggatcaagtcgagggccaccctcacacataccggcctggggaggtgtctgcaagcctgatcaaggagctgaggaaatcaaatgggacatactcgtacatgttcgcccgcaagtttgctcccgagtgccttgagccactgatggagattgcagactctgtcatcctacgtgactaatccagcaacaacaccacatttcagggtgtcggaatttgtacactgaggtgaatgaggtatggatatgtactgttgctaaggtggtgtcaaaaagatctaatcttcttttaggtgttgtgttggagacaatgtcactgaatggagtgtacatagtatgaaatgcgggaattttaggttgttctgtaatttgtatgcttaacacttacgcaataaagtggcatgctacatcaagagtgttgttgtgtcaaaaaaaaaaaaaaaaaaaaaaaaaaggccacatgtgctcgagc

SEQ ID NO: 11982 - DNA, 1208 bp, Oryza sativa
  ref <308>: DATABASE ACCESSION NUMBER: AK109330
  ref <309>: DATABASE ENTRY DATE: 2002-08-28
gctgcggaattcctcgagcactgttggcctactggaacaagaatcccaccgccaccggtcgccatggctgcggtcgccaacaccgtcacaaccctccccctccttccctcccctcatgccttcgccgtgcccgcaatgggctcgctgcccttcctccggcgccgaatgcgctcccgtcgcctcgccgctgtccagcaggatgcggccgtctggacccccgcccccgtctcctccttcggcccagccaccgccgacggctcgctcgtccacttctccgtggacctctccgacgctaccgacctcgccgcatcctacaccacgccggggcagtatctcctaatccgcgtccccggcgaggatgagctcaaaccggcgttcatggccatcgcctcgccgcctgggggtgccgcgttcgagttcttggtcaagaccgtacctggtaccacggcggagaagctgtgtgggctccgcgacggggacgtgctggagcttggcgcgataatgggtaatgggttccccatcagcaggataaatccgcccgatgaggcgcaaactgtgctcctctttgctacagggaccgggatcagtccggttcggtcacttattgagtttggttttgctgcggatcaaagagctgatgtacgactttattacggtgccagaaatctccaaacaatggcatatcaggataggtttacaaactgggagtcaactgggcttaaaataataccggtattgtcacgagcagatgatagttggaaaggagaacggggatatgttcaggatgctttcttgaaagcccagaacatagcaaatcatttttctactggggcagtgctctgtggacaaaaacaaatgtctgaggagatcacatcagcccttgtagcagatggtgtatcaccagataaaatcttgaccaactattagcaaggattggcgagcctcctgtaaagctcagtgcttcctttggcctcaagatgttcttttttctgttgtattttagctgttctcgtcctatagttttttatatttctcagcacatagatatgtatacattataatcattcttcagagtatggccaccttttcaggccatgtaagcattgagctccaggcttatttgcagttatgcggtcccttgcggaacttgcaaatagcagagtaacatttggcaaaaaaaaaaaaaaaggccacatgtgctcgagctg

SEQ ID NO: 11983 - DNA, 1762 bp, Oryza sativa
  ref <308>: DATABASE ACCESSION NUMBER: AK109331
  ref <309>: DATABASE ENTRY DATE: 2002-08-28
gctgcggaattcctcgagcactgttggcctactggatctgtccctcaatcccgcgacgccgccgccgttctgctccggtgctagggcttgggagctgagctccaccctgccccctccattctccagctcgcctcagccatcccttccttccgtctttaaaggcatcgctgccgggcggctgttagctgaatcgatcgcaaggaaagacaaaggaggagagttcagtcgacttgggatcgagtagaatcgccggcttctgctgctattgcgctgaccattatatccaatcccaatccaatcgacgatgggcctctctcgtcggtttctgaacctgatcgtggacaaccgcatccctggagccaaatcgctgcgctgcatcgacctcaccctcgcgcgctacaagttgttcaacactacaacacctgctgcactgatactgaatgggaaaatatctgaatcagaacgcccacaagactccaccccatgggcgggtgccgacaataacgagaaggaagcggcagcaacgttaaagataggaacgattcagcttcctacaccaatcatgaactttcgatcttcagctgagtacttgagttggtatatcaactgtattccgcttgcaggtcgcaaggtgctctgcacagaccaatctggccgcgcctgcctcttcgatgccgatacgtgcaaagtggataccttgccctctctccacaagcccaagtgtttgccctactccatcttcatccccagtgccgatgacaaggacgaccacgacgacaatagtaatggaggtggcagcgtctacatcatggatacttgtcttaatcacataccaagagacaacatacagctgagcagtcagtttgaggcttttgtctaccgtaggtccaccttgacctccttcaccaagtcctggcagtgccagcgcctcccgccaccgccattcgtctgtgaccccaagtacaagcatgccagcccccacaagatcacttcatacgcagtggtcgacggcggctcccacatctgcatatcggtggatggtgctggcacctactgcttggacacggtgaaacacacttggatccaaattggggagtggacactacccttcatcggcaaggttgagtatgtaccggagctgaagctgtggtttggcatttgtgccaatgactggaagcaatttggtgccgctgacctctccaccattctctccaccatggactctcagccacagctagtaggatcttggaaggagctggaggcaccccaagagtggacagagatgcagcatcctcatcttgtcaacctggggtctggcagattctgtgtcgcaaggttctaccacagttggacacccacggcgggcttatttggttctgatttaggtgagcttttttttactgtgttgaccggtacagatgtggtgcaatgtgttgtccatgacggcaatgggactggcaatgcctcttgcaatgacagttgcaataacccttatggcagcaacgggaaagtggaactccgaatgatcaagcacaactcaaaatgccacatgtcttatggcaccgatggtaacattaaggtattgttctgaataataacttactttggtgtattatcttacccatcattatcgtctgaataattttggcactttggtatgtaagagacaaattgttctttgagtactgtcatgaaatttaactctccctgtgttatttgcttcgcttaaaaaaaaaaaaaaaaggccacatgtgctcgagct

SEQ ID NO: 11984 - DNA, 873 bp, Oryza sativa
  ref <308>: DATABASE ACCESSION NUMBER: AK109332
  ref <309>: DATABASE ENTRY DATE: 2002-08-28
gctgcggaattcctcgagcactgttggcctactggaccgatgccgcctcccctcctcctcctcctcctcctcctcctcggcggcgccgccgcggcggaggagcccccggcggcgccctcctcctcccctccgccgcacaagaacgcgacgctctccgagatcctcccgcgctacggcctgcctccggggctgttccccgccagcgtcaccgccttctccctcgccgccaacggcagcctcgccgtcgacctcggggggccctgctacgcccactacgagtacctcacctacttcgagccccgcgtcacgggggtcctccgctacggctccctcaccggcctctccggggtcaaggtccgccgcttcctcgtctggttcgacgtcgtccgcgtcaaggtcgacctcccgccgcccccgcgctacgtctacctcgacatcggctggatcacccgcaagctccccgccgacgagttcgagtccccccacgagtgcgaggactccaagaaatgccgcctctcgtccgcgctcgccacggtcgccgcgtggttccagaacttctttgcccagttttaggggatggagaagggatttggtcttgtgacagtgttacatgagcttcgggccttccacgagtgtagtgattgccagcatccaactacagaagaataagcagtggttgagatatttctctacagcttctatattgtcttagatgcacatttgctcatgcccgagagacacatgatcttgtggagatttattggtcattttgatccatgatactggagcgtgctccatgattcaaatgcaattacacctgttaaaaaaaaaaaaaaaaaaaaaaaaaaaaaaaaaggccacatgtgctcgagc

SEQ ID NO: 11985 - DNA, 1299 bp, Oryza sativa
  ref <308>: DATABASE ACCESSION NUMBER: AK109333
  ref <309>: DATABASE ENTRY DATE: 2002-08-28
gctgcggaattcctcgagcactgttggcctactggatagtcatcaaaacagaataatgcgtggcgtcgccgcatccgcctgcacgctccgccctgggccacccggagccgtccgatcaaaatccaacggcccggatcgcctcagccacctccccacgcggcccctctcggctccccgcctccacctccggcgatcgccggagcccacccaccgccgcctccccctcatggcttcctccccctccgcggccgccacaggtagcggaggctccttccctgagatgaactcggtcgacgacttcgccgcggtcaccgcccctcgcggcggcggccgcgtatccgtcgtcggcttcggctccctcctctccgagcggagcgcgaggagcacgttcccggagctggaggggttccgggtggcggcgctgcgcgggttccgccgcgtcttcgcccactccgccccgatcttcttcgagcgcggcatcgccatcgaggccaccaaggagttctcaagcttaagtgtggagccatgtgagggtgaactgatcgttgtcactgtgtttgaaataaaggaggatgaggtcccagcattcatcgagagggagcatgagtttaggtttcttgcggttgttccagaaggactggatggggtgccttatgcaaatccagcagttgtctgtgcacgctatagcgatgaagaatatttccaagtgagatgcaaaggaagcaaggaaatatattatcagcgctatggccgatacaacattgatagaatatggagagacgatattttaccctgtcgtgcttatcttagacattgtgtcctcgctgcgaaaaatcttggagaaccagcatacagcaacttcctagaccacacctatctgggtgaccggacaaccacaataagggaatacctggccactaccggagccggcatcatggaagaggagcctccagaatcgctaaaaagccgctatggcgggtagctagcgagctagctagctccacgaagacgactccgtcgactcccacagccaccatggatcgaacttccatccgcttcgctgtcgctcaaatctgacggttggtggtgttcctcacaattctgctaaataatccctgatgcttcagtgcataatactaccaaaattccaatttttcgggccacatagtgttcagactttcagaggaagattgtgattcatgaccctcttcatgggagagttgaatgattgatgtaccacaacaataacagtgactattttgtcaaaaaaaaaaaaaaaggccacatgtgctcgagctg

SEQ ID NO: 11986 - DNA, 1659 bp, Oryza sativa
  ref <308>: DATABASE ACCESSION NUMBER: AK109334
  ref <309>: DATABASE ENTRY DATE: 2002-08-28
gctgcggaattcctcgagcactgttggcctactggatcatagacgattttatcgatgaacctgaaatagacatggcttgccacttgagattatttccctttactcaactactagtattggttctgtacaaaatcgccgccgtaggggcagatcctgcaaacgcagaactatccacaaagatcacccaacactctccattgtacaacccacagcctcaagactttccaaacgaggagctctaccgcaactatctagtcatccagcggttcaagaagacaatcacttccgaccccaagaacatcaccgccacctggaccggccatgacatctgcggcaacacgacctacctcggtttctactgtgcagcattgcctgggcgtactaagaagcccacggtcactgtggtgatctttaacggttatggcctgcgtgcaccgaagctggaaggatttattgaccatctccccgatcttgcacttttccatgctgcctccaacgacttcggtggtgacatcccctacctcacaggcctcgcctacaactacaagatcaatgtcgacagcaatctccaaatacaggatgattttagtcgtgacatggtcgggtcgcatgtaacaactaaagttcatggttattgcgttaatttagatctagatatcacatttcacctccggcccggaaaagacgacaagaaaggacgaagcatccccggtgccacagattctaaggcgctcctcctcaactacaatcacctgtccgggccattaccggtgaacatcggtttctccaagttaagctacctggccctcgccaacaacaggctcaccggcgcaatcccgccatcaatcttgcatttgcaagactccctcctcgaggtgctcctcctgaacaaccagctctccggctgcctcccccacgagctcggcatgctcaccaaggccgcagtgttcgacgccggcatgaaccagctcaccgggccgatcccctcctctttctcatgcctcaccagcgtcgagcagctcaacctgggcggcaaccgcctctacggagagatccccgacgcgctctgcaagctcgccgccgtcccagccggccgcctcgccaacctcacgctgtcgagcaactacttcacgtcggtcggaccggcgtgcttgtcgctgatcaaggacggcgtcctcaacgtcaggaacaactgcattccgggcttcgccaaccagcggcggccggcggagtgcgcgtcgttccacagccagccgaaggcgtgcccggcggcgagcgccacccacgtggcgtgccccgccggagctgccaacgctgcggcggcgccggcggacagggtggtcaaggactactccagctacgtgatgtacgccaccctgcacgagtgagcccggcgccacggcacgggcgcacgacgtgcgtgcatgcatgcagtaggggacagctagaagctagcgtctcggggtggtatttgctcttgtattcttgtgttcgtttgttgtgctcgtgagtcgtcattgtggtttgttttctctgcacgtgtggctagctatggctgtcacgtctagatctcacctcctgtactcttgtgtactgtactatgtgaaaatcattggtgattactaaaaaaaaaaaaaaaggccacatgtgctcgagctg

SEQ ID NO: 11987 - DNA, 1238 bp, Oryza sativa
  ref <308>: DATABASE ACCESSION NUMBER: AK109335
  ref <309>: DATABASE ENTRY DATE: 2002-08-28
gctgcggaattcctcgagcactgttggcctactggacagcctcctcgatctcctctacagcagctcactcactgctcaacaatggcgacggcgaggttgatcctcctgctcacggtggcggcggcggcggcgggctcctgctgcttctgcagcgcccaggaggtgatcgtgggcggcgtcggcgagcagctggcgacggcgccgccggccgcgcccgctccctcgccgccgccgccgtactgcggcagcgtgaggacggcggtggaggcgcacaacatcatcggctggaagacggtgccggcggactgcgccgagtacgtctccgactacttgaccggcgagcgatacggccgcgactccgacgtggtgatcaacgaggccatcgcctacgccgagagcctcaagctctccggccatggcaaggagatctgggtgttcgacgtcgatgagaccgccctctccaccctgccctaccaggccaagcatggctatggaactaagccatacgaccacgcgagcttcgtccaatacgtggctggagggagcgcaccggcgctacagggaacactgcgactctaccgacggttgctgcagctcggcatcaagccggtgttcctgaccgaccgcaccgaggaccagagggccgtcaccacccacaacctcctctcgcaaggctactacagctgggagaagctattactccagcctgttgggctccagaccacgactcaggcgttcaagaccggcgagcggcagaaattggtgagcgccggctatgtcatcgtcggtaacatcggtgaccaatggagcgatatcctcggatcaccggagggctaccgcaccttcaaataccccaaccccatatactacgtcgcgtagtttggtgtcggcgccatcgctagctagcttagctatagctagctatatcgatggatcatagttcgcgtgcgtttcatctacttattttcttctcatgaactgtcgtttgtagttaatgtttgacgcgtttgctttgatttttcctcgttagttgttgatgagatgaaatttaaatttgtaataatgtttgtttggcatggcagttggccattcattgatcaatgcattgtgttgagcaagctggttgtatttattgatcgatggattatacagttccttacattaaacatattcattataaattggatttttcattctcatttcaaaaaaaaaaaaaaaaaggccacatgtgctcgagc

SEQ ID NO: 11988 - DNA, 1951 bp, Oryza sativa
  ref <308>: DATABASE ACCESSION NUMBER: AK109336
  ref <309>: DATABASE ENTRY DATE: 2002-08-28
gctgcggaattcctcgagcactgttggcctactggaattactccccccatcccctcctcctccgccgccaagcacctcgcctcctccgccatggcgaccgccaccgcgtcgtccctctctctcctcttcgcccacccacactcgtccaaccccaggcccttcgccggcgggcctcacctccgccgcccgctgcgcgccgcgccccaccgcgcgcgatgcgcctccgacgccgccacgacggccacgaggcaccgccgccccgcggaggagaacatccgggaggaggccgcgcggctccgcggccccgggaacgacttctcggcgtggtacgtgccgttccccccgacgcccgaggacgaccccgacgagcgctactcgctggacgaggtggtctaccgctccagctccggggggctcctcgacgtgtgccacgacatggaggcgctcgcgcgcttcccgggctcctactggcgcgacctcttcgactcccgcgtggggcgcaccgcgtggccctacggctccggggtgtggtccaagaaggagttcgtgctcccggagatcgactccgaccacatcgtctccctcttcgagggcaactccaacctcttctgggcggagcgcctcggccgcgagcacctcggcgggatgaccgacctctgggttaagcactgcggcatctcgcacacgggctccttcaaggacctcggcatgacggtgctcgtcagccaggtgaaccgcctccgccgcgcgccgctctcacgccccatcaacggcgtcggctgcgcgtccacgggcgacacctccgccgcgctttccgcgtactgcgccgccgcaggtatccccgccatcgtgttcctccccgccgaccgcatctctctgcagcagctcatccagccaatcgccaacggcgccaccgtgctctcgctggacacggactttgacgggtgcatgcggctcatcagggaggtgaccgccgagctaccgatttaccttgccaactcgctgaactcccttcggcttgagggccagaagacggcagccatcgagatattgcagcagttcgattggcaggtgccggattgggtcattgttccaggaggcaatcttgggaatatctatgccttctacaaggggtttgagatgtgccgtgttcttgggcttgttgatcgtgtgccgcgtcttgtatgcgcacaagctgcaaacgcaaatccgttgtatcggttctacaagtcagggtggactgatttccagccacgtgtagccgaaactacatttgcatctgccatacagattggtgatccagtatctgtcgaccgtgcagtggtcgccctgaaggcaactgacggtattgttgaggaagctacggaggaagaactcatggatgcaatgtcacttgctgaccgcaccggaatgtttgcctgcccacacaccggggttgcacttgctgctttgttcaagcttcgagaccagcgcataatcgggcctaatgaccgcacagtggttgttagtacagcgcatgggcttaagttcacacaatcgaagatagactaccatgacaggaacatcaaggacatgctgtgccagtacgctaatccaccaatcaatgtgaaggctgactttgcttctgtgatggatgttctccagaacaagctgaatggtaagatctgagctttagttaaccccccatggccgttatcttgcttattgtcaccatgaactcctttttctgcatcttattcaactgcagttgatgaacttggtgtgtcacagtaatctttaatttgtagtactaggttttgaggctcttctaactatacacataagtggatagagctgttccttgtactttatatatgtatcatataatatgacaataagtggttatgccctagcacttaattgaataattgtttcgaaaaaaaaaaaaaaaaaaggccacatgtgctcgagc

SEQ ID NO: 11989 - DNA, 1063 bp, Oryza sativa
  ref <308>: DATABASE ACCESSION NUMBER: AK109337
  ref <309>: DATABASE ENTRY DATE: 2002-08-28
gctgcggaattcctcgagcactgttggcctactggtacgacgtcgagctcacgccgttcttgggcaagctgctcgacggcaaggagcacgagctcgggttcgcggtaaccaacgcgcagaagtcatggtacgtggacgccaacctccatctctggctcgaccccaagagcgtggcgacctccggtggcctcgtcgcctacgacgccccgaaattgaccggcaagatcgtctccaactcctccgacggcatcgacgggcagtacgacgcgacggcgagccgcaacatcacggccacggggtgggtccgctcgtcgcgcggcaacatcaccaccacgttcacccagcggctcacgttcgtgcacacgaacgtggtgaccagccagggaagctcgcaggcgatcaaccagacgacggaggcgcgcaccgaggtggtcaccggcgacggcgcgcacgcgctgcagctccaccagagcttcccgctctacatcttcctgggcggcgacggcagcggcacgtcctcgcagcggctgatgcggcgcgtggcgatcggcttcgacgagacgcgcgcggcgggcgcgggcgggagttcgtcggcagcgagcacgctccacaacgaacagacggcggcggcggaggtggtgctccgggacgaccaggtggtcggcgcgtcgtggcggatgcaccaggtgtacgagtacggcggcagcgacggcggctgctactcgaggaacgtgagcagcgtcggctacgacgtgctattcgaccacaatgaggagtcgtgcgccgggacgcgccgacgttgacgcctgtcggcgccggcgcggcgtggcgtggcgtggcgcggcgcgcgtagggatagagcgagtggatagggggcccggaagagatcgacagggtgtaaatggaacggaaggtgggccagtgtgtgctggcgggccctacttaagtctttgcaattattgatggatcactccagtgtccttaaccttgaataagaaatggtatgattgtacgtaaaaaaaaaaaaaaaaaaaaaaaaaaaaaaggccacatgtgctcgagc

SEQ ID NO: 11990 - DNA, 1075 bp, Oryza sativa
  ref <308>: DATABASE ACCESSION NUMBER: AK109338
  ref <309>: DATABASE ENTRY DATE: 2002-08-28
gctgcggaattcctcgagcactgttggcctactggaaaccacctcgccgcagatctgcttccgcctccgccatggcgtcatcggcattgccctgcgccgccgcgctcttcctcgtcctcctcctcgcgccgctgctcgcctccgccgagtcgcccatctcgctgccgcctgcgtccgcgcccaccgcctccaccccggctgcagacgagcgcctccaccccgccgacgccgccctcgctccgtcgcagccgccttccgaggcctcctcctccgccgccgcgctctcccctcccgcgcctcctgagacctcccctctccccgcgccctcccactcgccccccgtcccgcattccgcggcacccgagccgtcgcccatggagcattccgccgcgtccgcgccggccccctccgccgccaaggccaagcagggcggcgacgacgaggaggacgacgacgataaggagaaagacaaggaggagaagccgtcaataccgtcgcctgcccccgccgccgaggagataaaggccgccaccgcgggcgacaaggcgggggaggaggacggggagacggagaggcacgagttgaacggcggcaagaaggccggcgtcgtggtcggcgccttctcggccgccgcggtggtgggtctagccgccgtcgtgtggaagaagcggcaggccaacatccggcggtccaggtacgccgactactccgcccgcctcgagctcgtctgatcgttcgccggagctcctcaccggagtagtacactacatctacatctacagtagcatcagcagtacaaccccaccatatacgttcgtcgtctcagtgcagcagctccgcagatacacagattcgatgcatgccttccatggccgcgcttcaaattgctcctgtgatccgcgagatgttagattcttcatttcattcttgtgttaattattcttggtgttgaaaccattaaaattctttttctgtgaaaaaaaaagaggaataacgtaatggagtgatatggagatggatacacgcagttttgtataaaaaaaaaaaaaaaaaaaaaggccacatgtgctcgagc

SEQ ID NO: 11991 - DNA, 1277 bp, Oryza sativa
  ref <308>: DATABASE ACCESSION NUMBER: AK109339
  ref <309>: DATABASE ENTRY DATE: 2002-08-28
gctgcggaattcctcgagcactgttggcctactgggcaagctgtgacacactaacactctacttgtactaggtagatcgctagaacaatggcgtccggtggcgaggagaagaagagcaggatcctggtggtgggcggcacggggtacatcggccggcacgtcgtcttggccagcgcgcggctgggtcatcccaccaccgccctcgtcagggacctctccccctccgaccccgccaagtcgcagcttctccagagcttccgcgacgccggcgtcaccctcctccacggcgacctctacgaccacgccagcctgctcagcgccgtccgcgacgccgacgtcgtcatctccacgctgggcgcgctgcagatcgccgaccagaccaagctcatcgccgccatcaaggagggcggcggtggcaacgtgcggaggttcctgccgtcggagttcgggctggacccggaccacacgggcgcggtggagccggccaggtccatcttcaccgggaaggccgccgtgcggcgcgccgtggaggcggcgggagtgccgtacacgtacgtggtgtccaactacttcgccggctacgcgctgccgacgatcgggcagaacctgccgccggcgcggccggtggatagcgtggtgatcctcggggacggagccaccaaggtggtgttcgtggaggagggggacatcgggacgtacacggtgctggcggcggtggatccgcgggcggagaacaagacggtgaacatacggccggcgaagaacgcggtgtcgcacgaggagctggtggcgctgtgggagaagaagacggggaagaagctggagagggtgtacgtgcccgaggacgccgtgctcaagcaaatccaggagtcggagatcccgttgaacatcgtgctgtcgatcgcgcacgcagggtacataaggggggagacgacgacgccgttggatccagccaccgccgttgaggccacccagctcttcccggacgtccagtacaccaccgtcgatgactacctcaacaggctcctctgaaatacatcgatacatccatcatcttttatgtgccaataaaataattaagtctcttccttagtaatgtacatgttcctgcaaatttcacaccgtcggtgagagtgagtgtcttggtttaatctgtcatggatcactgtgctcagttcagctcttcttcagggcttgatttgcatgttaatgaatttatttgcttaaacattattagtatgaaaaaaaaaaaaaaaaaaggccacatgtgctcgagc

SEQ ID NO: 11992 - DNA, 1418 bp, Oryza sativa
  ref <308>: DATABASE ACCESSION NUMBER: AK109340
  ref <309>: DATABASE ENTRY DATE: 2002-08-28
gctgcggaattcctcgagcactgttggcctactggacaagccacctcgatcgatctccattgaaatcaaggcaccttaataatttctagtaccatattaagctaagaacagtagtgtacatggcttctcgtagaagtgcagcagctagtccggccatggcagcagcagctgcggtagtagctgtatctgtatacttgctggtgtgcagtgctccggcggcggcgacggcggcggcggtggcgaagaagccgtcgtacccgccggtggcgaaggggctatcgttcgaccactacaagaagagttgcccgcaggcggaggccatcgtgttcagcttcctgcgcgacgccatcggcaaggacgtcggcctcgccgcggcgctgatccggctccacttccacgactgcttcgtccagggctgcgacgcctccatcctcctcaccaagacgcccggcgggcccgacggcgagcagcaggcgatacccaacgagtcgctgcggccggcggcgttcaaggccgtcaacgacatccgcgccctgctcgacagggcgtgcggccgcgtcgtctcctgctccgacatcgtcaccctcgccgcccgcgattccgtcaaactggccggtgggccgtcgtacaaggtgccgctcggccgccgtgacggcctcacatcggcgacgccgtcacaggtgctgggcgcgctcccgccgccgacctcccacgtccccgagctcatcgccgcgctggccaagctcaacctcgacgccgccgacctcatcgcgctctccggcgcccacaccgtcggcatcgcccactgcacctccttcaccgggcggctgtacccgaagcaggacggcaccatggacaagtggttcgccggccagctcaagctgacgtgcccgaagaacgacacggccaacaccaccgtcaacgacatccggacgcccaacgccttcgacaacaagtactacgtcgacctgcaaaaccgccagggcctcttcacctccgaccaggacctcttcgtcaacgccaccaccaggccgctcgtcgccgagttcgccgtcgaccagtcggcgttcttccaccagttcgtcttctccgtcgtcaagatgggccagatccaggtgctcaccggctcgcagggacagatccgggcaaactgctccgtccgcaaccccggcgccgcctccgccgacgaggagctcccgtggtccgccgccgtggagaccgtcgtcgaggcggccgagagcatcgtgctctagacacacaattgtgcgcgccatggacgcgtacgtcagtacgtgtaccgtacgttgaatgtggaaagagacgacgacgactgtggatatatgttggttactgccatgtcgaataaatgcatgacgtcatgacaaaaaaaaaaaaaaaggccacatgtgctcgagctg

SEQ ID NO: 11993 - DNA, 981 bp, Oryza sativa
  ref <308>: DATABASE ACCESSION NUMBER: AK109341
  ref <309>: DATABASE ENTRY DATE: 2002-08-28
gctgcggaattcctcgagcactgttggcctactggagcgcctcctctcctctactccgctccgccgtcgctgttgctctctgatccctagggtttactttcccctcctcctcgaactctagggtttttccgctcgctctccgccaccatgacggccgccgagacgcaggaggagctgctccgcaagcacctcgaggagcaaaagatcgagggagatgagcctatccttgaggatgacgatgatgacgaggatgatgatgatgacgaggatgacaaagatgatgatgtagaaggagcaggaggtgatgctagtggaaggtctaagcagagtaggagcgagaaaaagagcaggaaagccatgcagaaacttggcatgaagaccatcactggtgtgagccgtgtcactatcaaaaagagcaagaacattctgttcgtcatctctaaaccagatgtcttcaagagcccaaactcagacacctacgtcatcttcggtgaggcgaagatcgaggatctgagctcgcagctgcagactcaagctgcagagcagttcaaggcacctgacctgagtaacgtcatctcaaaggccgagccttctgcagcagctcaggatgacgaggaggtcgatgagtctggcgtcgagccgaaggacattgaactggtgatgacacaggccaccgtgtcgagatcgagggcggtgaaggcgctgaaggctgctaacggtgacattgtcactgccatcatggagctgacgaactagtggaatcacgaaacgttgtggtggggatggaacttgtgggttaaattttaatgttgagggcgcattgataggatgaaccctcctccttggttatgctatcttgagagcggtaggtagtgttacgaaacttcaaggcctatatcatcctttgataagatcgactgtttgctatttaatatgcctttttcaaaaaaaaaaaaaaaaaaaggccacatgtgctcgagc

SEQ ID NO: 11994 - DNA, 1283 bp, Oryza sativa
  ref <308>: DATABASE ACCESSION NUMBER: AK109342
  ref <309>: DATABASE ENTRY DATE: 2002-08-28
gctgcggaattcctcgagcactgttggcctactggaaaatccagccctctcccgactcccgagcgaagcagcgagaggctagaggcaaggaaggaggcagcagcagagcagagcagccatggcggccgctgctcttctctcccctcctccctctccctctccctcccccaccccgtcctcgctccaccccaggcaagccctccgcttcgcggttggcacaggaggaggagggcgcgcgcgcgccacgtcgacggggacgagacgccgcgcggcgctcgtcccgtgctcctccagcgtgagcgcgcgcggccccgcttcgggaggcgacgggttggccctggagaggaggcgcctgctgctgtccggcctcgtgtcttcgttcgtgctcgtcctcccggtttcagattcgcatgctgttgccgagatggatgaagatgtgaaaatggctacgctagttgacccgatcaatgcatattcttttctttacccagttgaattgccaggaaagaaattcacattcaaatgggtagaatccagaaaaccagaacgatattcctctgctgcaccactatctcctgatgcacggcaacgtattgtatcggagcgagttgacatgatacataacgttgtcatctcagtctcgattgggccgccaaattcacgttttccgccttccaaggacaagagcaagtgggatccaaaagatgttgctgattggattttggctgaaaaatcttcactgaaggtgacgacaggccaacgcatgacagagagttctgtccttgatgcacactcttcagatgtcgatggagaaccatactggtactatgagtatctagttcggaaatctcctacacaatctgcaccagaaccaaatctgtttcgccataacgtagcctgcactgctgaacgagatggttacttgtactccttgaatgcttcaacactcagcaagcagtgggaatctatggggccttctttacagaaaacagtggcatcctttcacctcctaccccctacagaaaattatgttcctccataccaggatccatggagattttggtgacattgcaattcgtttcctccttttactgtttcacgttttaggtgatcttggaacatcaggttttagaacatattttcctgtaatggatgcttcagtgatgtctgcactttcagttctacaaaatgaagcctagttcagttgtgcaaaatgaagcctagggacatagtttgcttttggcagtcaaaaaaaaaaaaaaaaaggccacatgtgctcgagc

SEQ ID NO: 11995 - DNA, 1674 bp, Oryza sativa
  ref <308>: DATABASE ACCESSION NUMBER: AK109343
  ref <309>: DATABASE ENTRY DATE: 2002-08-28
gctgcggaattcctcgagcactgttggcctactggctcccggccgtagaccatttcgttccgacgcgagtaattcctccccacgggcggcgactagggcggctagggttcgtcgggcgccgccgtgccggagatcgcctctcgccgccgacacccggatctccgccgccgccggtcgccccaggttatcccgctcccgcagtcaccatcccgtcttctccgccagtcgcctcacgcccggcctggacgccccggaatccattgtcggtctcgccccgccgactgccgttgacgccactggctgaaggtgtgaatatgtcggacagtgcgttgaaagatctgaatctagctcagtcagcagagctggagaaaaccaaggacagttctgccaagtcttgcatcaccaagcctgtcttgaatggcaacaaatgcaacaatacggaagaaaatgctccacctgtactccctgatgctgtgactaatgggtgtgaagctggaaatgcagatgttgagtatattgattctgagagtctgacagatcttgaagatgctggtgcaacccttagtactttagttgcaaggttggattcaaaagactgggttatgacatgtgaagctctaaataatgttcgtcagttggcaatatttcacaaggatagattgcaggaacttctagagcctctagttcctcttattgtgaaatctgtcaagaatccaaggagtgctgtctgtaaaaccgcactcatgacctgcgctgatattttcaaggcatacggtgacctaatggttgactcaattgatccactgttagtgcagctatttctgaaatcttcacaagataagcgttttgtctgtgaagctgctgaggcagccctcatatcgatgacaagctggatcgccccttctgctctgttgccaaaaatgcaaccttaccttaagaacaggaatccacgaattcgagcaaaagcatcaatgtgcttcagcaagagcgtcccaagcttgggtgtggagggaattaaagaatatggaatggataagcttgttcagatcgcagcaactcagcttagtgaccagcttcctgaatccagggaggctgctcgcaagctggctttggagctacaagcattctatgagaaatcccaagcttcgagttctggtgaagttgacgacgcacctgctacctcacctgatgctgatgctgatgctggtgctgaatcatgggaagctttctgccaatcaaagctttccccattaagtgcacaggcaatccttcgtgtcacctctacgacgaaagagggtgtggctgtgggtgtcacctctacccctccgaaagaaggcgtcactgttggttgctagcatcaggaggtagtagatgcaatgaggttgtggtttttccatccgattcaccttttgctgtacatggttatggttgttctttctctacatccaatctgggattcgttcgttaagcatcggttcgagagttgaggtgtgacctgtgggtgttaatattggtgcgagatatacctgttatagttgaccgtatgatcttccttttctcccactgcttggtattgattggtcaggcgaattgtagaatttcttccactattcaatattactacacagtaatttttccaaaaaaaaaaaaaaaaaaggccacatgtgctcgagc

SEQ ID NO: 11996 - DNA, 1183 bp, Oryza sativa
  ref <308>: DATABASE ACCESSION NUMBER: AK109344
  ref <309>: DATABASE ENTRY DATE: 2002-08-28
gctgcggaattcctcgagcactgttggcctactgggcacaaacaaagccacccaaaaaagttggggagaggagagaccgagatcgatccgcacccaccgcgacaaacgctctcccctcccctccccctccgcccttcgctcccatccgctccgccccctcgccgcgcagcgccggcggcgagaaggttgagttcgtggggggtgtgaccgaacgatggcgtaccgggcggacgacgactacgactacctcttcaaggtggtgctcatcggggactccggggtcgggaagtcgaacctgctgtcccgcttcacgcgcaacgagttcagcctcgagtccaagtccaccatcggcgtcgagttcgccacccgcagcatccacgtcgacgacaaggtcgtcaaggcccagatctgggacaccgccgggcaagaaagatatcgagctattacaagcgcatactatcgcggagcagtaggggcactcgttgtctatgatgtcacgcgacatgtcacctttgagaatgtggagaggtggatgagggagctcaaggatcacacggacgccaacatcgtgatcatgcttgtggggaacaaggcagatttgcgccaccttagggctgtctcgactgaggatgcgaaagcatttgctgagaaagagaacactttcttcatggagacgtcggccctggagtcaatgaatgtggagaatgccttcactgaagtgctcacccagatatatcatgtagtgagcaagaaggctcttgacatcggcgatgacccagctgcaccaccaaaggggcagaccatcaatgttggtggcaaagatgatgtctctgcagtgaaaaagtctgcttgttgttcatcagcgtagatcgaaaggacttgacaaacatggagatacccgaggtggttgatactatgcagtaggacacaggatgttattgcattcatagacctcatctgtattcatgtgttactaagtgtctccttcgttttgccatttgaaacattaattcattcaggacataatcttgccggtatagtttagggatatgaaattgtgaggccgtcagattttcatacaggccatttgtttgcttctattatggtttgaccgcttgatttatttaaaaaaaaaaaaaaaaaaaaaaaaaaaaaaaaaaaaaaaggccacatgtgctcgagc

SEQ ID NO: 11997 - DNA, 1143 bp, Oryza sativa
  ref <308>: DATABASE ACCESSION NUMBER: AK109345
  ref <309>: DATABASE ENTRY DATE: 2002-08-28
gctgcggaattcctcgagcactgttggcctactggtggcggatgtggcgatggggaaggcattgggcgacgacaaagtaggaggagtccagaggggtgagaacgcggtgtcgatgaccggaaatggacgatgatggctgtgaaaggacgatggtggcggcaacggtggtggaaggaggcatggcggcctcgaacggctagtcgtgggcatggcagacggctgcatctggtcggcgcagcagcgtttggaggaggggtcggagatcggcttggcatagagaggcgcaactgatggcagcggaggccggctcggcgcgagaggcgcgggcggtggagatggaggccggcttggcacgagagacacggccgatggagggaggctggattggcgcgaggcgcgtccggtggaggaggccggcttggtgcgagaggcgcgactggcggtggaggaggcgtcctcggtgcgaggaggagctgccggtggatgtggcgtagtcttcggcgcacgaaggctggccggctgggggcgccggtacagtggtcccacttggcggctgaggttgagtggtggtggagcatcagtgcgtcagccgtggattcgtaggtggtgagcaacaggtgaaaacccagcccggccttggccggaccgacaacgatggttaattctccctcctgagggcgttgtcgtgctgtctcatccctcaagggtggttgccgggcgaaagccagtcttggcttctttgagccccgacggacggtgacggcggttttctatcgcttctcttcttgaagacgtcgttttggcatcccctagccgaagcctctcgatcgattggtgcaagcacactctaggagttggctttgcgttggttgtgagggtgttcttttaggtgatctcgtctgcgttcctttgtcggtctagcggtgatcagtcatgcttagcggcggccggtccggtgttagccttctcccggtcttgtgtgttggcgctgtcagtgtgtgggtggtggtatattttttcctttttcctggttatgaccctccagggttatagtcctgtaatattttcctgctctatcaatcgtattgtctcgtgcgagtcgttaaaaaaaaaaaaaaaaaaaaaggccacatgtgctcgagc

SEQ ID NO: 11998 - DNA, 1558 bp, Oryza sativa
  ref <308>: DATABASE ACCESSION NUMBER: AK109346
  ref <309>: DATABASE ENTRY DATE: 2002-08-28
gctgcggaattcctcgagcactgttggcctactggccaactcacatctcatctcttcgctgctgctactcgaagcgcacatattcccggagttaaatcatcggtacaccgtctcagagcatttttctcctcacggacaagatgtgcaactccaacgtgaagtccgccggcgtcgctcagatcgacggccgcccggtgctgcagccggcggggaaccgcgtggcggcgcctgaagctgcccggccgctcaagaagtccctgcagaagtcgctctccatgccggcttcgctcgacaatgctgcggccgcgaccacctgcgcggcgtcccccgagaagtcccgcgccgccgacttcgcccgcgctgcggcggcgtctcttctcccaccacctactccagcttcggtcagtgctaaggcgacgagggtgtctggagccaaggtggctgccgccaggactgcggcggcggctgcggccatggggggcttggacaggagcaggaagcccgccaagaagggcggcgccgccgtgctgccggtggtgacgttcgcggggctcgaggcgtacgagcccgccgggagcatcgcggcggcgcagcgggagcacgtcgcgatggcgcaggcgcagcgcaagatgcggatcgcgcactacggccgcaccgcgtccttctcccgagtcgaagggaaagtcagcgctaccgcgacgggtgccgccgagctcgtcgccggtgccgtcaccgggcatgacgagaagcgatgcagcttcatcactccatattcagaccccctgtacgtcgcctaccacgacgaggagtggggtgtgcccgtgcgcgacgacgagttgctgttcgagatgctcacgttgtccggcgtgcaagtcggggcggactggacctcgatcctgaagaggagacacgtctacagggaggcattctccggtttcaacgtggacgctgtcgccaagtacacggagaagcagatggcatcgctaagcgccgagttcggcctggatttgggcaccatcagaggcgccgtcaacaacgcctgccggatttccgaggtgaggagggacttcgggtcgttcagcaaatacgtgtgggcgttcgtaaacaacaagccgctgtcgccgagctacaaatacagccggaagatcccggtgaagacgtccaagtcggagtcgatcagcaaggacatggtgcggcgcggcttccggttcgtcggccccaccgtcatccactcgttcatgcaggccgtcgggctcaccaacgaccacctcgtgtcatgcccgcgccaccgcgtctgctcctcctcctccgcttaaccgatctgaccatcgccaaaacagttaccggccagctccccgaaggaagcaaggagaaaaaacaagaaggaaagagaaaaagtgagagatgagatagcctcaagtagtatacagaacgggtattgatttgcgagtgtgtgtatgtgtgtgcttgtgtagattattgtccctaactaggcaagaagcttgattgtcaattacgtacgaaaaaaaaaaaaaaaaaaggccacatgtgctcgagc

SEQ ID NO: 11999 - DNA, 1343 bp, Oryza sativa
  ref <308>: DATABASE ACCESSION NUMBER: AK109347
  ref <309>: DATABASE ENTRY DATE: 2002-08-28
gctgcggaattcctcgagcactgttggcctactggcagatccgccaatcgcccatggagtccccaccccaccccctcctcctccttctcacgctcctcgtcgccgccggcgccgcctccgccggcgccgatgacctggtcgccgagctgcaatccctgcggtcccgctccccgtcgggcgtgatccacctcaccgacacctccatcacccgcttcctatccgccccggcgccgcgcccctactccgtgctcgtcttcttcgacgccgcctcgctccactccaagaccgacctccacctcccccagctccgccgcgagttcgccctcctctccgcctccttcctcgcccacaaccccgcctccgccgacctcttcttcgccgacatcgagttctcggagtcgcagcactcgttcgcgcagttcggcgtcaactccctcccccacgtccgcctcgtccgccccgagcacacccgcctcgctggctccgagcagatggaccagtcccacttctcccgcctcgccgactccatggcggagttcgtggagtcccgcaccggcctcgaggtcggccccatcgtccgcccgcccctcgtctcccgcaaccagatgatcctactcgtcatcctcttcttggtctccattccgttcctcatcaagaggatcatggacggggagaccttgttccatgaccgacgggtttggatggctggggcgctgttcatttacttcttcagcgtgtccggggggatgtacgggatcatcaggcacacgccgatgttcatcaccgaccggtccgatccaaacaagctcgtgttcttctaccaggggtctgggatgcagctcggcgccgagggttttgcggttgggttcttgtacactctcgtggggctcatgatcgccatggtgacacacttgctggtgagggtggagagcctgcagatccagcgttttacgatgctggcggtcatgataattgggtggtgggcagtgaagaaggtgattcttttggataactggaagactggatatagcattcataccttctggcccagcagctggaggtaaatgcttgtacaatggcagacgatatggatggtttcttccttcggtttctgaggttatggaattatccaactttgaccgtgctgagatagagcatattttggagtgttgggacttgccaagtttatttttgcaaatttctgatgctgtagtatgaaatatgtagacctcaagtcatgttagttatgcagaggaattatgacattgcacatctatcacttgaacaagaaagtttggcttttgaattaaaaaaaaaaaaaaaaggccacatgtgctcgagct

SEQ ID NO: 12000 - DNA, 2039 bp, Oryza sativa
  ref <308>: DATABASE ACCESSION NUMBER: AK109348
  ref <309>: DATABASE ENTRY DATE: 2002-08-28
gctgcggaattcctcgagcactgttggcctactggattcgcgggaggccggtgcctggaatgcagccaatttttaagtccagttcccattccagctccgtctttctttcttctcctcctggatttctgccggctcgagatcttttcaacgctcttgagctagcggcggctttgtttaattcgtggtgagcaacgtcgtcgtcgacgacgaattcgatccggaggaagggttcgttgtccggcccagttcggccggccggatggcattgttgggcgtcctcgtcggggcggtgatcatcgtcgtcgccaccgcggccgccgtttcgggcagcgggctgccggtgcctggatacgacgggctcgccatcgggttctaccacgagacgtgcccacaggcggaggacctggtgctcgccgagatgagggagatcgtccaggaggacaggaccctcgcgccggcgctcctgcggttcatgctccacgactgcttcgtcagggtgcgtgcctcgcgtgctcgatcccttcctcagtttctcatcatgtcgcgtggcgtcgcggggacgaaccctcgtgcgtcgatgtcgcgtcgccgtggtgcgtgctgctgatcaatggacgatgggtttttgatgatatgtttgtgcttgcttggcttcgcgtggcgtgcaggggtgtgacgcgtccatcatgctgaaatcgcgggaaaaaatcggggagagggacgccaactcgagctacagcctccgcggctacgaacagatcgaaaggatcaaggccaagctggaagatgagtgcccgatgaccgtgtcgtgtgcggacatcatcgtcatggccgcgcgggacgccgtgttcctggtaatgacgccaactccctggctactttaattcgagatcagtagtataatccgatcgccgtgatctttattatcgttcatcccgacgtacgttgacgagcggcttcgttttaccagagcaacggcccacggtaccaggtggagaccggacgccgggacggcaaggtgtcctgtaccattgacgccgacaacgatctcccaccgcccggctccaacattgtcgacctcaagatctactttagtgtcaagaacctgggatggaaggacctcgtcgtcctatcaggtacgcaataccgcaaataccagcgtccagtagtacttttggtcagtgcgagcaaaagcacacacaatatccattcaccagcttcaatttctgctcgattttgcgcgtgattttgtgcgtgattttccgcagggagccacacgatagggagggcgcagtgcggctcgttcgcgcgcgacaggctgtacaactacagcggggaagggaggcaggacccgtcgctgaacacggcgtacgcgccggagctgaggaaggcgtgcgtggccggcgaccctttcgacaagacgtacgtggacatggacccggggagcccgtacacgttcgacctgagctactaccgggacgtgtacagaaacaggggcctcttcgtctccgaccaggccctcctcaatgacaagtggaccaagcagtacgtggagaggatggcgtccgcggattcgacggacgagtacttcagggactacgcggaggccatgaccaacatggggaggatcgaggtgctcaccggcgacaacggcgagatcaggaaggtgtgcggcgcgtacgttgactaggcaagggggagtagacggagccagcgcgcggttcgttgggtgcgagttggcgcaatcgcttcgatcgatcaatcgtcatgtggccgtggcaaacgtgggggctagccaaccacagtggagttgcgttattattctatatatcggtcgaggtggttggggcgttgacgctcaccgcccgctgaaattttctcacaactggaaagaaaaactgtaggtatatcaacacatagaatagtccttctctcttttttttcttcgttcaccctgttcttcacggtatggcatggtgcaaatatatatatacggcatcttttaaaaaaaaaaaaaaaaggccacatgtgctcgagct

SEQ ID NO: 12001 - DNA, 1168 bp, Oryza sativa
  ref <308>: DATABASE ACCESSION NUMBER: AK109349
  ref <309>: DATABASE ENTRY DATE: 2002-08-28
gctgcggaattcctcgagcactgttggcctactggggaaagcggcacataccagggggtagcgactgtttattaaaaacacaggactctgctaagtggtaacacgatgtatagagtctgacacctgcccggtgctggaaggtcggaaggagaagtgtgataagctttgaatggaagccccggtaaacggcggcagtaactctaactgtcctaaggtagcgaaattccttgtcgcataagtagcgacctgcacgaatggtgtaacgactgccccgctgtctccgacatggacccggtgaaattgaattctccgtgaagatgcggagtaccaacggctagacggtaagaccccgtgcaccttgactatagcttcgcagtgacaaccttgatcgaatgtgtaggataggtgggaggtggtgacacacaacgaccaatcctgaaagaccactctttcgtctaaggatgcctaaccgccgcaccgatcattcggggggggcgggacactgcgaggtgggtagtttatctggggcggatgcctcctaaagagtaacggaggtgtgcgaaggtaggctcaagcgttgattctgctcgtgagcgtaatggtataagcctgcctgactgtgagaccgactggtcgaacagagacgaaagtcggccatagtgatccgggagtcccgtgtggaagggctctcgctcaacggatcaaaggtacgccggggataacaggctgatgactcccaagagctcttatcgacggagtcgtttggcacctcgatgtcgactcatcacatcctggggttgaagaaggtcccaagggttcggttgttcgccgatgaaagtggtacgtgagttgggtttagaacgtcgtgagacagttcggttcctatctaccgttggtgttaaagggagaactgcgaggagccaaccctagtacgagaggactgggttgggtcaacctatggtgtaccggttgttatgccaatagcagcgccgggcagctaagttggtatggaagaactgctgcgccgcgggaaatccttctctatacaagttctcgtacgaggtttttgaacagaacttcgataggcgagaggtgtaagcaccgcgaggtgtgaagcgatctcgtactaaacgaaaaaaaaaaaaaaaaggccacatgtgctcgagct

SEQ ID NO: 12002 - DNA, 1585 bp, Oryza sativa
  ref <308>: DATABASE ACCESSION NUMBER: AK109350
  ref <309>: DATABASE ENTRY DATE: 2002-08-28
gctgcggaattcctcgagcactgttggcctactggacagtgctgaacactctcttcctattacctctctcatcctctccatctctctagtttctctctctaattaagcattgcaacaattcaaccaaaatgcagctaattcttcttctctcaaagccaagaactctccaacttttccccctcctcctctgcctccttctccttccatgtctctcccagcctctcccctctccttctccttcaccttcgccgtcgccttcggcgtcgccggcgccgccgccatcgctgccgctgtcgccgttcaatgagcggctggaggcggcgtacgtggcgttccaggcgtggaagcacgccatcaccgaggaccccaagaacctgacggaggattggtgcgggccgttcgtgtgcaactacaccggcgtctactgcgcggcggcgcccgacgatccgcacgtcctcaccgtcgccggcgtcgacctcaaccacggcgacatcgccgggtgcctccccgaccacctcggcctcctcgccgacgtcgcgctcctccacctcaactccaaccgcttccgcggcacgctgccgccgtcgatgcagcacatgcgcctcctcttcgagctcgacgtcagcaacaacctcctcgccggcgcgttcccggcgttcctcacctcgctgccggggctcaagttcctcgacctccgcttcaacgccttcgacggcgagctccccgccgccgtcttcggccgccggctcggcctcgacgccatcttcgccaacgacaaccgcttcaacgtgtcgctgtcgtcggcaagcctcaccaactcgacggcgtcggtgatcgtgctcgccaacacccgtctcgccggctgcctgccgccgtccatcggcgacatggcggacacgctggtggagctcatcctcctcaacaccagcatcagcagctgcatcccgccggagatcggcaagctgaagaagctcagggtgctcgacctcagccacaacgagctcgccggtgagctgccggccagcgtcggcgacatggagagcctggaggtgctcaacgtcggccacaacatgctcgccggcgaggtccccgaggccatctgcgagctacccaggctgaggaacctcaccatcgccggcaactacttctgcgacgagccggtgtcctgcctccacgtcccgctccgcgacgaccggatgaactgcatcccggactggccgcaccagcgctcgccggaggagtgcatcgccttcgcccaccgcccgccgccgcactgcgccgccgacggctgcatcgtcatccctccgccgtgagcgatcgatcatggcggccggagtacgtaacgttgcatggtcgtcgttggtgacgtcatcgtcctagttggttggtagagactgcaaatctccatgtggttttctaggagggggtagccaattaatattctatcatccatccatgcatccaaatttcagaattaaatggttgttgttaaaaaaactttcgattatcattaattaagttgtgatgtcgccgtctcgatggatacaaaaaaaaaaaaaaaaaaaaaggccacatgtgctcgagc

SEQ ID NO: 12003 - DNA, 1336 bp, Oryza sativa
  ref <308>: DATABASE ACCESSION NUMBER: AK109351
  ref <309>: DATABASE ENTRY DATE: 2002-08-28
gctgcggaattcctcgagcactgttggcctactggaagccagcgtcgggccaagccaacgccgaccaccgaggcgaccggagaagcgcggcgaggtaggccccgatggcggcggcggcggcagccggagcgggcgcggacgaggaggtggacttcgagttcttccccatcatccgccgctacaagggcggccgcgtcgagcggttcatgaacatccccccgctccccgccggcaccgaccccgccaccggcgtcacgtccaaggacgtcgtcgtcgacccggccgtcggcctctgggcgcgcctcttcctcccgcctggcggcggtgctccccagggtaagctccccgtcgtcgtgtactaccacggcggggcctacgtcgtcggctcggccgccgacccgttcacgcactcctacctcaacggcctcgtcgccgaggctggaattctcgccgtcgcgctggagtaccgcctcgcgccggagcaccacctccccgcggcgtacgacgactcgtgggaggggctcaggtgggtggcctcccacgcgaacggcggcggcggcgtcgagccgtggctgctcgagcacggcgacttctcccgcgtgttcctggcgggcgccagcgccggcggcaacatcgcgcactacgtcgccgcgcgcgccggcgagcacggcggcctcgggctcagcatcaggggcctgctcgtcgtgcacccctacttcagcggcgcggcggacatctgcgcggaggggacgacggggaaggcggagaaggccaaggccgacgagttctggcggttcatctacccgggctcgccggggctggacgacccgctgtccaaccccttctcggacgccgccggcggcatcagcgcggcgcgcgtcgccgccgaccgcgtgctggtctgcgtcgccgagaaggactcgctccgggacaggggcgtctggtactacgagagcctcaaggccagcggctacgccggcgaggtggacctcctcgagtccatgggcgagggccacgtcttctactgcatggatccgcgctgcgagagagcgcgggagatgcaggcgcgcatcctcagcttcctccgcaagtgaagctcctccacgacgcgaaggcttcgccatgatggaataattctggcgctttgtgatgccgccattgttgagctcgagggctcctgtagcttgtcgctcgtcagttcaggcatcttttgtgccaattgacgatcttattcttcaagagttggaaatcatcgaacaaattggaaatttctattcgaatcatcaatcagttatcatataaaaaaaaaaaaaaaaaaggccacatgtgctcgagc

SEQ ID NO: 12004 - DNA, 1246 bp, Oryza sativa
  ref <308>: DATABASE ACCESSION NUMBER: AK109352
  ref <309>: DATABASE ENTRY DATE: 2002-08-28
gctgcggaattcctcgagcactgttggcctactgggtatagacctcctgagttgttactcgggagcacgaggtatggtccagccgttgacatgtggtcagtgggttgtatttttgctgagcttctcaatggaaagccaatattgacaggaaagaatgagccagagcaactgtctaaaatttttgagctttgtggtacgcccgacgagttaatctggcctggtgtcacaaaaatgccatggtacaacaatttcaagcctcaacgaccaatgaagagacgggttaaagagtcctttaagcactttgatcagcacgcgctggatcttttagagaagatgttaactttggatccatcacagaggatatcggcaaaagatgcacttgacgcggagtatttctggactgatcccttaccgtgtgatccaaagagcttgccgaagtatgaggcgtctcatgagttccaaactaagaaaaaacgccagcagcagaggcaagcagaggaagccgcaaagcgccagaaattgcagcatcctccaccacattcccgtttgcctccaatccagaacccaggccaaccacaccaaatcaggcctggccagcctatgcataatgcaccacctgtggcagctggcccaagtcatcactatgcaaagccgcgaggacctggaggccctaataggtacccacaaggcgggaaccaaggaggctacaatccgaaccgcggtggacagggaggaggctatgggagtggcccatatccacagcaaggacgaggtcctcccccttatcctggtggtggcatgggcggagccggtggtccgaggggtggtggtggcagtggctatggtgttggcggaccaaattatcaacagggtggaccttatggtgcatctggtccaggtcgaggcccgaactataatcaaggtggttctcgcaatcaacaacagtatggaaactggcaatagcacggcggtatcatgagcagcaaatgcccttccggtaggactctgtatgttgaaagaacctctgatgttgtatttgagatatactttttgcatggtgtattcagatccaggcatctctcggaagtatgatgtttatgactagctgtatagtatggcactgatgtgattcccaatgtttgatgtactagtattattattactgcaagaatgtggaaagacatgaaaagtttgttatcaggatcaaaaaaaaaaaaaaaaaaaaaaaggccacatgtgctcgagc

SEQ ID NO: 12005 - DNA, 1079 bp, Oryza sativa
  ref <308>: DATABASE ACCESSION NUMBER: AK109353
  ref <309>: DATABASE ENTRY DATE: 2002-08-28
gctgcggaattcctcgagcactgttggcctactggagtagcgtacactaccacagctagcaatggagacctcgtgcttccttacctccaatgcctcgccggtgaagagcatggtgatgccgtcgccggccggcgtcgtgaaggccaggccgcacgtgctcttcggcggccggcgagcggcgagctcgtcggtgaccacctgctgcagctacaacggcgagggcgcggcgccggcgatcgacccggactggcggtcgttcagggcgcagctctacttcaacgagcagtacgcgaagagcgtgaacccggcggtggcggcggtgagggcgacggcgacgacgccggagccggtgaagatcggcgacaagtgggcgcacccgctagtggagccggagaaggggtgcctgctgatcgcgacggagaagctggacgggtcgcacatcttcgagcgcacggtggtcctcctcctgtccgccggcgtgctgggccccgtgggcgtgatcctgaaccggccgtcgctgatgtcgatcaaggaggcgcaggcggtgttcgcggagacggacatcgcgggggcgttctcggggcggccgctcttcttcggtggcccgctggaggagtgcttcttcctgctggggccgcgggcggcggcggcgggggacgtggtggggaggacggggctgttcgacgaagtgatgcccggggtgcactacgggacgcgggagagcgtggggtgcgcggcggagctggtgaagcgcggcgtggtcggggtgagggacttccgcttcttcgacggcttctgcgggtgggagagggagcagctgcgcgacgaggtgcgcgcgggcttgtggcgcgtggcggcgtgcagccccgccgtgctgggcctcgccaccgtcgtcaagggcggactctgggaggaggtgcagggcctcgtcggagagaggagggtgtggtgactgattacttctcaagggtgaccattatgtaattaattaattaattaatctcttaattaactcgcaagtaaagtatttactcctttcagattaaaaaaaaaaaaaaaaaggccacatgtgctcgagc

SEQ ID NO: 12006 - DNA, 1198 bp, Oryza sativa
  ref <308>: DATABASE ACCESSION NUMBER: AK109354
  ref <309>: DATABASE ENTRY DATE: 2002-08-28
gctgcggaattcctcgagcactgttggcctactggggtgcaagtgcgatccccccccccccccccacatctcccgcagagtccacggccgatccatcccctcgtgcaggccgccggcggcggggaggaggaggaggaggcgatggcgtcgtcgcaggccaacctcgacaagatgcagctccgccagagctaccgcaacctctggcactccgatctcaccagcaccatccaggccgacttcccatattgctgcctcgcgctctggtgtggaccatgtgtgtcatacatgcttcgcaaaagggctctgtataatgacatgtcaagatatgtctgctgtgctgggtacatgccatgcagtgggaagtgtggtgaaagccgatgcccagagttctgtcttgctactgaggtgtttctgtgctttggtaattcagttgcttcaacccgcttcttgctccaagatgaattcaacatacagacaactaaatgcgataactgcatcattggcttcatgttctgcctccaacaaattgcttgtatcttctctatagttgccgctattgttggtagtgaagagctttcagaggcttcccaaatcctttcctgcttgtctgatatggtctactgctcggtttgcgcctgtatgcagacccaacacaaaattgaaatggacaagagagatgggaagttcggcccacagcccatggcagtgcctccaatgcagcaaatgtcgcgcatcgatcagcctattccacctcctgttgggtacacaccacaacagccagcatacggtcagccttatggtggctatcctcctgctccgcctgctcaaggttatccaccagctgcttaccctccggcaggttacccccagggtggtgcataccctccccctggctcttatcccccacctggttcctacccgcctcagggctcctaccctcctccacaaggttactacggcaagtaaaggaaatgcagaaattggagatatgtctttgtgacgaaatcggtatattgtgaacaatgtaaacattagggtggttgtagtgttattataggtgatgtcgatatattaatcgatctgtgactggtctgggtggtaaactgcaaacataatttggattcctccgggtgtggtatactgtgaacccgtttcgtagaaaaaaaaaaaaaaaaaaaaaggccacatgtgctcgagc

SEQ ID NO: 12007 - DNA, 1291 bp, Oryza sativa
  ref <308>: DATABASE ACCESSION NUMBER: AK109355
  ref <309>: DATABASE ENTRY DATE: 2002-08-28
gctgcggaattcctcgagcactgttggcctactggtctggtggctgtgattttcctgtccctgtgcttggttataactctgatatttgccaaggaagttccattcaaaggaaatgcagccctcccaacaaaatcaaacgagccagctgagcctgaaggcactggtccactagcagtgttgaaaggcttcaggaacttacctactgggatgccttctgtgcttattgtgactggccttacctggttgtcttggttcccattcatcctctacgacactgactggatgggccgtgagatctaccacggtgacccaaagggaactgatcctcagatcgaggctttcaaccagggtgtcagggcaggtgcatttggcctgctactgaattcgattgtgctaggattcagctcattcttgattgaaccaatgtgccggaaagtcgggccaagggtggtgtgggtgacgagcaatttcctcgtctgcatcgccatggctgcaactgcactgatcagcttctggtcactcaaggacttccatggaactgttcagaaagccatcactgcagacaagagcatcaaggctgtctgcctcgtcctctttgcgtttcttggagtccctctcgccgttctgtacagtgttcccttcgcagtgacggcgcaattagcggccactagagggggtggccaagggctctgcaccggcgtcctcaacatctccatcgtcatccctcaggtggtcatcgcgctgggagccgggccgtgggacgagctgttcgggaaggggaacatcccggcgttcggcctcgcctcgggattcgcgctcatcggcggcgtcgccggaatattcctgctgcccaagatctccaagcgccagttccggtcggtcagcatgggcggcggtcactgaccgccccgctctcgccgccggctgcggcggcggcggcggccggagcagcgccgccggaagtggtgagctttgtagttctcgtttgcaatggatcaaaggagccccctctttttttttacatagggtaattaattaattaaggctgttaattaggaaggggtgaggtggccctgcagctggggcccacgctttgttgccacctcggtagaagagaataagcagatcatgcagataatatggaactgtaaaactgttttgtgttgtgtgtgtgtgcagtgtgcttggtaattagtgtgtaatgaatggtcaggagaagtgcagtgaactaagtgaaagtgagcttccatcatcatcaaaaaaaaaaaaaggccacatgtgctcgagctgc

SEQ ID NO: 12008 - DNA, 2083 bp, Oryza sativa
  ref <308>: DATABASE ACCESSION NUMBER: AK109356
  ref <309>: DATABASE ENTRY DATE: 2002-08-28
gctgcggaattcctcgagcactgttggcctactggaaaaaaaaaaacgcttcctctgaaaaagcggtgtgtatgtgtgctcagctgaggcgctgagcgctcggctcggcacacgtcttccgcatactaaaatcctattctttttgcttgcttggctcgttgctgtctccagaaaggaagagaccttttctgctcttgttcttcttccacggatcgatcgcctcgctcgctttcgcctgttgcttcacgtttcggaagagcttgggtttgggggaattcgtgtgatcgtgttgatgagtaggtgaagaattcgggaagagctttgagagttttggcatctgatctagggcaaacgtgggcgtgggcgcgggcgcgtcgacggcgtcgtagcatcggcgacgtcgccggtcgccggcgagcatggagagcgagcaggtgaagaggcggttcgggcggtgcccctactgccgcgccatgatctaccaggaccccaacgccatcatctactactgcagcaagtgccgcacgcccatccgaggcaagaacccggagccgacggacgacgccgagtacgcgctctcccagctcgagatcctctccgccgacaccgcctccgtgttctccgacgacccggacacgctgagccgcacgtcctccgtcgcatacggcggcggcgagcagcctccggtgcggaccagctcggctccctacgcagcatttgatcggggcagcgttagggctggttcaagaagcggcgagcaatcgggggaagagagaggtggctcgccgatgcacagccgcgtcagcgaactccggccgacgtcgcggagaaccaggcggccgatgagcggcgacatgggtgcgttcagggacgatggatcgagctatggttcggacaacgacgtcccgacgtctgccgccgcgagctaccgccgccgggcgtcgccgctgacctcccaggaactggaggcgtcgtcgtcgtcgatggggtcgtcgggataccaaccgtccggcgtgtcgtcgtcgtcgatggggtcgtcgtcggtgtacgaaccgtccggcgcggcgaggtcgccgctgacggacccggcgttccagagggacctgctgcaggcgctggacaacctccggagggtcatcgccgccgtcgagcagccgtacggcgtcgacgcgcacctgcaacaagccggaatgcccccgaagagcgcgtcctgcaacgacgccgccaccggcggcagcggcggcggcggcggcgcgtacgcagcagcagtcacgcggcgcaactcccgcctcatgcgccgcctcgagtcgcagctcgtgcaggcgctgcccagggacggcctgcgccgggacaggagcacctcctcctcctcgtcggcgtcgagcagccgcccgggcggcgaccgggccagggcggcggggcggaagcaccactgccgcgctgtgctgggcggcacgccgttcgtcgtctgcgacaagtgctcggagatactgcagctgccggccgccgtgtcggcgaacagggcggccaggctggagtgcggcgggggcgttgtcctgggcgcttgagagctgggttgggttgggctgggccatgcctttgcactctattattactccgtctttcctaaatcgatcatcatgtaatagaatctaaaatttctcaaattatcgtcatataattgcatggacacagatttcatcagaatacaattaatacagtatgggagaatgtgtgcaaaaaaaaaaaaaaaaaaaaaaaaggccacatgtgctcgagctgcagtcgccggcgctagacagtctgagaaaaacttccaaactccccttaactgaacataaatgatgcctgtgttgcactgttatgggcgcttatggtacataagcaacatacaattacgtaaggtttaacggagcaaaatgttgccacctaagattaaagtggaccgggaagacacaaaagccagcatcaaaacgccagaccatagagaagacaaggagagaaaacggacaaagaaggaccaaagaagggtatcatcaaagtaggatacctgctccttttagctttttcaaggagggggcgg

SEQ ID NO: 12009 - DNA, 1241 bp, Oryza sativa
  ref <308>: DATABASE ACCESSION NUMBER: AK109357
  ref <309>: DATABASE ENTRY DATE: 2002-08-28
gctgcggaattcctcgagcactgttggcctactggaaaatgcagaaatcagattgtctgaccctttacaataccaatcaatcgtcgatgctgaatggaatatcatttatgacaagttggataaatgtgtcaaaagtggggcaaagatagtcctttctcggttggcaattggtgatcttgcaacacagtattttgcagaccgggacattttctgtgctggccgtgttgcagaagaggatttacaacgtgttgcagcagcaacaggtggtaccgttcagacatcagtgaataatgtcattgatgaggtacttggtacttgcgaagttttcgaggaaaggcaagtgggcaatgaacggttcaatatatttagtggttgcccttctggtcaaacagcaaccatagtccttcgtggtggtgcagatcagttcatcgaggaagcagaaaggagcctccacgatgccatcatgattgttagaagagctcttaagaactcaacagttgtacctggtggtggtgctattgatatggaaataagcaagtacctcagacagcatgcacgtaccatagctgggaagtctcaattcttcgtaaactcatttgctaaagccctcgaggttattccaagacaactttgtgacaatgctggatttgatgcaactgatgtactcaataagctccgacagaaacatgcatctggtgaaggtgctaattttggtgtggacatcaacactggtggaattgctgattcctttgctaactttgtctgggaacctgctgttgtgaagatcaatgctataaatgctgcaactgaagctgcttgccttattctcagcgtggatgagacagttaaaaatcccaagtctgaaagtgcgcaaggtgatgcggctgctagcgcgatggctggccgtggcggaggagcgatgcggggccgtggtggaaggggcatgaggaggcggtaatcaatctacgccacgtttgtttagcttcgtcgctcgtgtggtttaaatttaggagtaggttatttgcagtctgctctttatcgaagtttttcgtgacgctacatgcatgccctgctcgatgtatttccaattgtgcttgtcagattcgtgaaaacatggcaaatatttttgtgatggttgcctactagcttttgtaacttcacatgttgactgtttcaatcaatgggtattcttcttgatcctcaaaaaaaaaaaaaaaaaaaaaggccacatgtgctcgagc

SEQ ID NO: 12010 - DNA, 1890 bp, Oryza sativa
  ref <308>: DATABASE ACCESSION NUMBER: AK109358
  ref <309>: DATABASE ENTRY DATE: 2002-08-28
gctgcggaattcctcgagcactgttggcctactggcagggagatgatcctggcggagcgcggcgcgcggatcgacgactacaagctgaagcagctggcgagggcgtcgtcgtcgtcgtccaaggcggacaagtcgcggagggacagcagccctccgccgccgccgagccgcgcgcggtcgtcggccaggaccgacaggtccgccgccaagagcgcgctggacgagctgcgggccaagcggatgaggcagcaggacccggaggggtaccgtaacaggttcaaggatttgatcccgcagagcggctctccgccgaggcgcagggccggaagcccgcccagcgacggtagtaatgatggtgataacagggggaggatcaccgatgaaacccgggatgatgagtttgatgaatcgccaagcaggcttgaccctctgaagtttgacgatgtgaagagtataaccctcaggagatcaaagcttgtgaaatggttcatggagccgttctttgaggaccttgtgtctgggtgctttgtgcggcttgggattggcaagtcaaaatcagggacccctgattacaggctatgcatagttagaaacgtggatgcgaatgaccctgaccggaagtacaagttggagggctacacgacgtgcaagtacctcaatgttgtgtgggacaatgaggctaatgctgctcggtggcagatgactcaagtatcagactcctttcccagtgaagaggagttcaagaagtggctacaagtggctgagaagaatggtgtgcgagtaccgactcggcaggatgtattggagaagaaagaagccattcaacaggcctacaactttgtgtattcagcacatactgtacagaagatgctaaaagagaagaaatcagctatcagacgtcctatcaatgttgctgctgagaaggatcggttgaggaatgagttggatatggccattgccaggagggatgaagctgaagcagaaaggatccgttcaaagctcaatcagctgcagaagatgtcgaagccaatatcaaataatgagaaggctgccaagttggaggcgatgaacaagaagaaccgtgctgagaacttcaagaacgcatcagaaatgaagcccgttaacacgagtttgaaggttggagaggctggttatgatcccttttcaaggagatggacaagatcaagaaattactacgcagcaaagcctgaaggagagagcgctgaagtccccaacgggaacgatggcagcgcagtagctggcgatgaagatacgaagaacgggccgcgaggtggttcagcagccactgcagcggctctagtggcagctgctgatgccggtaagctggttgataccaatgcacctgtagatctgggaacggaatcgaatttgctgcataattttgagctcggtatatcattggccggcctggaagaattcggcggtcccaagggtctcttcgatggttacatggcgaggaagcagaagattgaagcaaccatgggttacaaggtccctgacaatgatggaaggaggcatgctctaactctgaccgtcagtgactacaaaagaagacggggtttactctgaacttctcaagttatctgtgcctctgcctgctgttcgatggattcatctgcctctttggccacaaagttcatcagctgatcggcaccatgccattgtgactacttgtccagatcaatttgcattttagccttgagtgtatgtaacatgatgagacaagcaaggttacacattttcttttcataaacaggacctgtatgcctgaattgtgttgatgacaatttccgcattaatatttgtggagtgagtccttctgttaaaaaaaaaaaaaaaaaaaaaaaaaaaggccacatgtgctcgagc

SEQ ID NO: 12011 - DNA, 1110 bp, Oryza sativa
  ref <308>: DATABASE ACCESSION NUMBER: AK109359
  ref <309>: DATABASE ENTRY DATE: 2002-08-28
gctgcggaattcctcgagcactgttggcctactggatccaaccgtcgacgccgctcccctcatccttcgccgcgcccccaccacgccttcaccgaccgccactcctgctcgcccgaatcgacgccgccgtcgtcgcgggtcgacatcgccgctcctcctatcgcactcctccccgccggcactgcctccatccatccgccgcgtctcgccgccggtcgcaccaccgatccattcctcctctgccgcctgctctcccggtccctcccgccctatcgccccaacactcccccccccggcaccgcctccatccatccgccgcgtctcgccgtcggccgcacccccgcttccatccatccactgcagatcgccatcgcacgcctccgcctctcaaggtcacacgctcgtcgccaccgctcgtcgcccgacaccccgccgattggggaccggacgctgaccctgcatcgacgccacaacagccgacagatgggagatgttgaagacctcactccaacgacggctgcgcgcggtgacactaccaggcgttgagggagagaatgaagtgcaaggtgcgacggggttgttcgtccttgcccagatcaacgccgccgccgatccctcactcgcccctcgcccaggtcggtgccaagggcgaggttcgccaatctgcttcccagccgcctcgcccgctccatgggagaggtgacacctgtgcccgcctccagcgctccatgcccccggtaccatccgagcacgatccctccggcagaacttctgccggagaagggacgcatggttaattggttcgttctctttacgttgcaacccattcatttgtcaagaatcatcactgtgagtgtcgagggttattacagattgcaggatcactaatgctcttttttgcccaaaaggtgttcaacgaaatgctgcttagccaatgtattaccagaaattgatttctctgtaagtgagaatgtcatattgtcatgtcccctatgttgttatttatactaatgattgcaggattctctctgttgttatttatgctaatgtaatgaaatatccaattactatgtataaaaaaaaaaaaaaggccacatgtgctcgagctgc

SEQ ID NO: 12012 - DNA, 1503 bp, Oryza sativa
  ref <308>: DATABASE ACCESSION NUMBER: AK109360
  ref <309>: DATABASE ENTRY DATE: 2002-08-28
gctgcggaattcctcgagcactgttggcctactggagactacaagccattaaacagagacgaccaacgacttaaccacacttcttctttgtgctgtccaacctccattgttgggtgtgaaagctttggctcatctgccatgtgtggaggatccattctcggcgaccttcacttgccggtgcggcggacagtgaacgccggtgacctgtggggagacgccggcaagggtagagatggtggcgacggcttgaagaagaggaaggggagttcttgggatttcgatgttgattgcgatgatgatgatgatgatgactttgaggctgattttgaggagtttgaggatgactatggcgatgatgatgatgtgggtttcggggacgacgaccaagaatccgacatgaacggtctcaagctcgccggattcagcaccacgaagctcggcctcggcggcagcaggaagaggaagacgcgataccgagggatccggcagcggccatgggggaaatgggcggcggagatcagggacccccgcaagggcgtccgcgtctggctcggcacgttcggcaccgccgaggaggccgccatggcgtacgacgtcgaggcacgccgcatccgcggcaagaaagccaaggtcaacttccccgacgccgccgccgccgccccgaagcggccacggcgttcttcggcgaagcattcgccgcagcagcagaaggccaggtcgtcgtcgtcgtcgccggcgagcctgaacgccagcgacgccgtgtccaagtccaacaacaaccgcgtcagctcggctgggagcagcaccgacgccaccgccgccgccatcgccatcgacgacggcgtcaagctcgagctgctctcggagacggatccttctccgcccatggccgccgccgccgccgcgtggctcgacgcgttcgagctgaacgatcttgacggatcaagatgcaaggacaacgcattcgatcaccagattcacaaggtagaagcggctgtcgctgatgaattcgcgttctacgacgatccgagctacatgcagctgggttaccagctcgatcagggcaactcgtacgagaacatcgacgcgctcttcggcggcgaggccgtcaacattggtggactctggagcttcgacgacatgccaatggagttcagagcttattgagcatttgattctatttaggagggagtgaattatttgggaggaagaatcgatgttgtaacttgtaaaatctctgatgatgatctctgcatcatatgatcaatttgagtgcagttttgtttttgtaaatacgaattctttattatgatgttaggttcttaatttgcccttcttcatcagggatttgttcaggcttttgttgtgatgactgattggacgagggaaagattgcgttttttgttgtcatgttgggtactctactcttctgttcctaaagttgataagtgccaaaatttgtgagaggaaaaaaaaaaaaaaaaaggccacatgtgctcgagc

SEQ ID NO: 12013 - DNA, 1774 bp, Oryza sativa
  ref <308>: DATABASE ACCESSION NUMBER: AK109361
  ref <309>: DATABASE ENTRY DATE: 2002-08-28
gctgcggaattcctcgagcactgttggcctactgggattggctcagtgaagctgcagccaccggagaagccatggcgccgccgacggcgaggtctctgctcgcctcccacgccgccgtccgagccgcggcctccgctcgcaggggccgcctcgccggcgaccaccacccgccgcaggtcgcggccctccggcgcggggactgggtcaagctcatctgcggcgccagcttcgaggatgctgccgatgtcaggaatctctcccttgtatacacgcttgccggagtggattgcattgattgtgcagcagacgcatctgtggtgggtgcagtgaatgaaggtattgatgtagcagcctcaattgtgccagcagttcaaaggccatgggtgatggttagtgttaatgacgattgcagagatcttcatttccgtaaagctgaatttgatcctgaggattgcccaccagattgctcaaagccatgtgagaaagtctgtcctgctgatgcaatattgttagagagggttatgattgaggaagagcactctcagtctgatccttcatgtggaaaacttgagggtggtgtaattacggagcggtgctacggctgtggacgatgcttgtcggtttgcccttatgacagaataagagctatgtcgtatgttcgagatcctgctatgactgctgaactgttgaaaaggaatgatgttgatgcaatagagatacataccactggaaagggaactgatatgttcaataccctctggagcaacttgggtgagtcaatcaataatgtgaagctgattgcagtcagcctgcctgatgttggcgattcaacagttaatttaatgaatgcaatatacacaacaatgcagtcccatcttcaaggctataatctttggcagttagatggccggccgatgagtggcgacataggccgaggtgcaacgagggaaacagtatcctttgctgttcatttgtcttcaatgtcaaataggcctcctggcttctatcagttggctggtggcaccaactcatacaccatagaatccctaaagaaagctggtcttttccaatctacaacttttcctggggcagcaacctctggagtgactgattgtcagcaagcctttattggagggatagcttatggcggctatgctcgcaagattgttggaagagttctacgcaaaataccggcacaatttggccatgcacgcattgaggaccacccagattatctcctggaagcattacaagaagctctatcactagtcgggcctgtgaaaggttacccaaccttgccaagtctctgaaactagtaaatggcatctccaagttctcatccagatataggataactttgatccagttagttagtatggaagttgcattgtgaaggtaagccaaggtgagaaggtattctgccaactgattgcccaatgaacagtttgggagttgggaccaaccatttctggctaagtggcaaaaatcagtaatccaacagtcagcagatcaatcactaacttactcttaagcttggtaagtaggagatattccatctgagattggatgtcacaacatgctttccataaagtccatgtaaaactccataagaaaggtgtaaaaatccatttgttgtttgcatgtacaccttgaatattctatatagttcagtggacaacgaaggttttgacgtggacatgtactatagaataaaataattcaactttgttgcattttaaaaaaaaaaaaaaaaaaaggccacatgtgctcgagc

SEQ ID NO: 12014 - DNA, 1431 bp, Oryza sativa
  ref <308>: DATABASE ACCESSION NUMBER: AK109362
  ref <309>: DATABASE ENTRY DATE: 2002-08-28
gctgcggaattcctcgagcactgttggcctactggcccattccccaatctaggtttttcgcgatggtgtcggcgtcgcgcttcgtcctcctctcgaggctccccgccgccgccgcctcctcccgcttcctccgcccgctcgccgccgcggggagcctcctgccggcggcgcttgcccccttcgccccgcccgcggcgggggccaggtgcttcgccacgcagccggcgacctcgtcgctgcgggactcgtcgccgaactggagcaaccggccccccaaggagacgatcctcctagacgggtgcgacttcgagcactggctggtcgtcatggacccgccccccggcgatccctccaaccccgagcccacccgcgatgagattatcgacggctacatcaaaaccctcgcccagatcgttggaagtgaggacgaagcacggcataagatatactcagtgtcaactcggcattactttgcttttggtgctcttgtatctgaggaactctcctacaaactcaaagagttgcccaaggtccgctgggttcttccagactcatatctggatgtcagaaataaggactatggaggagagccttttataaatggagaagctgttccttatgaccctaagtaccatgaggagtgggtgagaaacaatgcacgtgccaatgaaaggacccgacgcaatgataggcctagaaactttgacaggtcaaggaatttcgagaggagaagggagaacatgcacaacttccagaacagagatgtgcctcctgggcagggattcaacagccctcccccaccagggcagggcccagtcctgcctcgtgatgctcctccgatgcctccacctccatctccaccaaatccaggtgctcctccaagctaccagccccatgcaccaaatccgcaagcaggctatacaaactatcagggtggtgtgcctggttaccaaggtagagcccctggctatcaaggtggcaaccaggaataccgaggtccacccccacccccaccctctgcttaccagggcaacaaccctggataccagggaggagggccaggttaccatggtggcaacccacctccttatcaagccggcaacccacctccttatcaagccggcaaccctgtctttgctggtggtgcaccaggctaccaaggccaaggaggcaaccctagttaccagcaaggcagcgataactacaatgccggtgcgccggcctataagagggatgagccagggaggaattaccagtagaacaacactgctagaacaaatgatatgtagagtctagtacgagcataacgctatttgctgtctgttttggagtctatcgcatgtatactcttaccctgctttgcaaactcagtttcttatgtgtcgactaaaaaaaaaaaaaaaaaaaaaaaaaggccacatgtgctcgagc

SEQ ID NO: 12015 - DNA, 1305 bp, Oryza sativa
  ref <308>: DATABASE ACCESSION NUMBER: AK109363
  ref <309>: DATABASE ENTRY DATE: 2002-08-28
gctgcggaattcctcgagcactgttggcctactgggaacaaaaagacattcgctttcgcctcttctccccctctcctctcctctcctctcctctctgcgtgtgcatctctcgattccgatgccgccgccgctcgaagcgcgagactacatcgggctcgcggcgtccccggcctcgtcctcctcctcctgctgcgcgtcgacccccgtcgccgaggtcgtcggggcgcacctcgcgctccgcctcggcctcccggggtcggagtcgcccgcccgcgctgaggcggaggctgtcgtcgtcgacgccgcgctcacgctcggccctgctcctcctcccaggggcggcgccaagcgcgggttcgtcgactccctcgaccgatccgagggccgtcgtgctgctgccaccgccggtgatgatgagaggggcgtgagggaggaggaggaggaggagaaggggttgggggaagctgctgctggagctccgcgagctgccaaggcacaagttgttggatggccacctgtgcgaagctaccggaagaatacattggccgccagtgccacaaagacaaagggggaagaccaaggcaaaagtgaggtaggatgttgctatgttaaggttagcatggatggagccccataccttaggaaggttgacctcaggacctattcaagctatgaagatctttcacttgctcttgagaagatgttcagctgctttatcactggtaggagcagttcacataaaacatcaaaaagagacaggctgactgatggttctagggctgatgcccttaaggaccaagagtatgttcttacctatgaagacaaggatgctgactggatgcttgttggtgatcttccttgggacttgtttactactagttgtcggaaactgcggatcatgagaggttcagatgctgctggaatggctccgagatcactggaacagacaggtcagaacaaatagttgcccgagctttcatcatctggacagcaaatgtgtggaccaagtttgctgtagcaagtttccgctgaggggtgcagtgttttacctgaagtatctccgctattagtttatttacgtgtgtagtgaaatctgtggcgtattgtaaaacagccattttgcctacgaggttgtcttgtgtcaatctgtagatggtcgattttgtctttgaaagatcaagtcaggctgcttaatgcttcctgtgtgatactttcatcaattctctcatatatatattatctggagttgcacttgaaaaaaaaaaaaaaaaaaaaaaaaaaaaaaaaggccacatgtgctcgagc

SEQ ID NO: 12016 - DNA, 1118 bp, Oryza sativa
  ref <308>: DATABASE ACCESSION NUMBER: AK109364
  ref <309>: DATABASE ENTRY DATE: 2002-08-28
gctgcggaattcctcgagcactgttggcctactggagaatgctgtgttaggcaaggtagagtacactagtcacaaggctcgctctcttgcttaagcttgtgagcttggaaaagagtagtatattgagctgttgcttcgcttgctttagtttgcttgcttaccaggagaaagatatgaggaaggaaattgtcatcaggctgcagagctctgagaagggccacaagaaagctatcaaggttgctgctgcagtctccggtgtggaatccgtgacgctcgccggcgaggacaagaacctgctgctggtgatcggcttcggggtggactccaacgacctcaccgagaagctgcggaggaaggtcggccacgccgaggtggtggagctgcgcaccgtcgacgccgacgagctcatgcgcgtcgccgccgccaaccagtacccgtaccgctactaccccggcgcgccgcccccggccccgtactacggcaacggcgggtaccctcctcctcaccagcgcggcggcggcggcggcggcagcggcggtggctactacacgccgatgacgatggccacgggtggctactacggcggcggcggcggcgggtacccgcagtacgggcagtcgtcgtcgtacccgcagtacgggcagtcgtcgtcgtactacccgccggcggcggcggcgacgacgaacacgcacaccgtcgtgcaccaccagtacgccaacaacgacccggacagctgcgccatcatgtagctgcaccagctagtgtacgatcgatgctgcttctgctcgcgcgcgagcatgccggccgtcgtcgtctcgatcgtcacgatgatcggatgatcggaggacatattgcgaccgaatctagtagctgattgtcccaatcgataactggcccaaagtacgtagatataccttgaattttctgtgtgatgatgaggccgatttgattccgtgtgattactgaacaacagacaggtacgtacctgttgtctgaaactctgaagtctgaacgttatatgtgcaagtgtaaattaggtgtactagggagatatatataaggtgcaagcgactttatagttcaaaaaaaaaaaaaaaaaaggccacatgtgctcgagc

SEQ ID NO: 12017 - DNA, 1294 bp, Oryza sativa
  ref <308>: DATABASE ACCESSION NUMBER: AK109365
  ref <309>: DATABASE ENTRY DATE: 2002-08-28
gctgcggaattcctcgagcactgttggcctactggaaccacctcgtgggctcgtcgtcgtctccacggcgccaccactaaacccaaccaaccccaaaacggagacggcggcgaggaggagggttttgcacccttgcccccccgccatggccgcggcctctcgggctcccctcgctcgccgctccctcctcctcctccgctacaaggccctccctctctcctccccctcctcctcctcctcgtcgacccacagcctcctcccgaggccccccgcgttgtggccgcctccgcctccgccgccgccccacggatgcgagcggcggcgcgcgttccacgacgggcggccgcggggcccgctgtggcggagcaagaagctgatcgggaaggaggccctgttcgcgatccaggggctgaagcggttcaagggggacgaggagaggctcggggagttcgtgaggcggtacgtggcgcggctgctcaaggccgacaagctcgccgtgctcggggagctggagcgccaggaggaggtcgatcttgccgtcaagatgtttaggataatacaaaaagaggactggtacaagccagatgttttcatgtacaaggacttgattgttgctctagccaagtgtaagaagatggatgaagcaatggtaatctgggggaacatgacagatgagaaccttttccctgacgcacagacatatgctgaagtcataagaggattcttgagatacggttccccatcagacgcaatgaacatttatgaggaaatgaaaaagtcacctgatcctccggaagaattacctttcagggtattattgaagggtcttttaccgcacccacttttaaggaacagagtgaagcaagattttgaagaattgtttccggaaaggcatatctatgatcccccagaagaaatatttggtctgcgctgaggttgaggattcaacgacttcatgcaccttctgcgtttggacttcattcggattacctgcatctccagaagttctccagaatttgatgtttggagtggaaatctgtcaggtgaaagattaagttatcgatgatcatgcttaagagaggtagacagaaacaaacagaccattccattagctgtactgtaatatctatggttacggaaattttgttgttcaggcaatctcttaaaatatcaggccttttattcacaaatgccactttgtgtatctgtaatccaggatattttgaaaagtagcataaaaaaaactctttcattgggtcaaaaaaaaaaaaaaaaggccacatgtgctcgagct

SEQ ID NO: 12018 - DNA, 1420 bp, Oryza sativa
  ref <308>: DATABASE ACCESSION NUMBER: AK109366
  ref <309>: DATABASE ENTRY DATE: 2002-08-28
gctgcggaattcctcgagcactgttggcctactggatccgctcccgcacgtttgcatcgccgctaacctccgcctggccccgcacgcctgcgccgccgattccctccgcctgcaccgtcgttctccccatgccgcaccgccgcttccctccgcccgctcctctcccgcgccgccctctccacctctcctcacgtcccgtcacgcctgcccacctcagccgcagcccacaagcagggtccccgatcccgtaaaccctagcctttgcctcgccctcgctgcctcgctggctggatccccactatctgggcgccgtcgatccgtcgccgtctggtctccatcgagccgcatcgccctcgcgtctccaccacacctcgccgtcgattacccgcagtccggccgccgtcgatccctcgacatcttgtgtccgccgcgactcctctgccccctccgcaaactcatccggatcacgtctcccttgctgctcctgtgtaagacaaatgtgaatctatgttgagttccatccggacaactgtgggcgaaaaggcaaagattttaatggctgacgaaggccagcgaccggaatttgacgatgaagtagcgccaaagattgaaagaaagagagaaagagatcacaacctggtggaatatctagcttcagcggaatagaagggtcttccatcgcgtttgctcagataacagaaaagtggcgcagttaagctggtggatctatggagagagatggagcaactgcaccaccgctaatggtgaaacacaatgtgtttgaggagaagggtcatgctaacagataggtgatgtattgatacaatggattgtttccagcaattttcttgagatggccaactaattcaagaagcaaattgaagccataatttccaggttcaatcacgaaaacatgcatctgggatatttaattttccagcatgcaagctagctataaactgcactgaacatcattaatctggcattggcagattttcaggccagtgccataaagccccttgaacttgtcagtgccatatatagtaacttgtacaggtgggatgtggctgatagctgaaccaattctggcaatgtttcacattttgttgaagaactgcatgtagaatagcttgctttggatggagaaatctactggaaggatggtaaatcgtcttttgtacatgcaaagccatcaaaagtagctattttgtgtttgcaggtgccactctagactagattgggtgtttgtggtgcgggcatctgacctgtatttcttagattgtaatcagatgcattttgtgaaggataaagtcatcaacagtaaattaattgtgtaaaaaagatgtatttgtttcatgatcattaatttaattggtgcacttggcaaaaaaaaaaaaaaaggccacatgtgctcgagctg

SEQ ID NO: 12019 - DNA, 1707 bp, Oryza sativa
  ref <308>: DATABASE ACCESSION NUMBER: AK109367
  ref <309>: DATABASE ENTRY DATE: 2002-08-28
gctgcggaattcctcgagcactgttggcctactggaactaacgctaaaaaagtaacagtttctgtactttattgagccgatgtcaacgaagaaggacggtgtgtacgaggcgctgcgagatcccgaacagcccttgaccacgtgcgatattttgaaggaagagatcgtgcacctgaagtggcgcgttctggtctttgcctgctttttgactttcgggtcgtactacatctacgatttccctgggtcgattggcactggtgagcaccacacgattcagagctggttcctttcgcacgggaagtcatacaatcaagaagacaaccaggcgctctacagcgtctactcatggcccaataccgtgctggcagtgttcggaggcttgctcattgacaagttccttgggctgcgaaaggcaatgacgcttttcgtgagcctcgtgttcctcggatccgtcatcttcttcctcggcgtgttgtcgaagacctaccccttgctcctcctgggtcgtttggtgttcggtcttggaggagagtccttgtcggtcgcgcagtcagcattcgttgcgcgttggttcaaggagggccgcggcatggccttggcgttcggcatcacgatttcgttcgcgcgtgtcggaagctcgttcaacttcttgttctcgccgacaatcgccaacaaggatggcatcgtcacttcaacgcttttcggctgcatcgcttgcggcatttccctcatctcctgcgctgcgcttgtcgcactcgacatctacggcgccaagaagggtgttgtgccgcaagaatcaaaggagactggagagcccttcaagctcagtcaaatcaaggacatgcccgtactcttctggctcgcgtctctcgtttgtgtcagcgtgtactgcgccattttccctctgatcggcgtcgcgaagaacttcttccaagtcaagtacggcttgtccgatgacacggcttcttcctacgtttccgtctaccagttcgtttgcgctggatgctctccagtttctggcggtatcgtcgactccgttggccgcttctcgatctggatgatggttgctggtgccggcttcactgcgattcacttgatcttcatcgtcgccagtccgcctccgtggatcatgatggccatcatgggcatcgtgtactcggttcttgtgtcgtcgctgtggcccgctgtgccgtacgtcgtccaaggagacttggttggcctggcttacggaatcatgactgcgatgcaaaactccggcttggccacgtggcccttggtcgcgggcgccatccttgacaagtacacccccccgtcggtgaacaagactttgaacgccaccgacattcccaagctctggatgatcctcaaggatgacgacgatggcaagaaggctactctgccgaccgaggagggctacaagtacacggagctcttcttcatggcgactgctgccgcaggcttcgtggtcgcttgcattctgttcctagtcgatcgtcgaggcgatggcgtccttggcgcgtcacctgctcgacgtgaacagatcaaggccgacaagcaggccctcttggtgacgggagatgttaactaacccttctaatttctaccccaaccccccgcgcgtgtgtttctctctcatcggtataccgtcgcccaaaaaaaaaaaaaaaaaaaaaaaaaaaaaaaaaaaaaggccacatgtgctcgagc

SEQ ID NO: 12020 - DNA, 2442 bp, Oryza sativa
  ref <308>: DATABASE ACCESSION NUMBER: AK109368
  ref <309>: DATABASE ENTRY DATE: 2002-08-28
gctgcggaattcctcgagcactgttggcctactggatagctaagctcactgactatgcatgaagcttccagaggcagtgaggcaccacaaattttcagacacatgctggctggagtagtgtaaatatacacacacacacactctctctctcatagtaacagggctcaagggccaacaagattagcactcactggttcttcttccttgtttatttggtaattactctgtccctgattcttctccggctccggcgagatcatgtatcttgtgaaggatatcggcggcgccattgcgctgatgggcgtgtcactggtgctcctgggcacatggccggtggtcctcgccgtgctggagcgccgcggccgcctcccgcagcacacctacctggactactccatcaccaacttcctcgccgccctcctcgtcgccttcaccttcggccagatcggcgccgacacgccggagacgcctaatttcctcacacagctcacccagatgcaggacaactggccttcaatcttgttcgcgatgtcgggtggcatctttaacggcctagggacactggccacgcagtacgggtgggcgttcgtcgggctttcggtcaccgaggtcatggcgtcaagcctgaaggttgtcatagggacaacactgaactattttctcgatggccggatcaacaaggcggagattcttttccccggtgtcggatgctttctgattgcagcctgccttggatctcttgttcactcttccaatgctgctgacaaccaggagaagctgtctagtgccatggtgaaccacagcaacaccaatggggacactgaaaatgaagaactcaccaagcacctccttgagatagaacaacccaaggattgtgaagaacaagagcctgaagtggcaccggctgcccaggctgtggaaaaactagaggcaggaacagctgatttcctggttgaccttgaggggaagagatctattaaagtgctcggatcgaacaccttcctgggcctcggcatcgtcaccttcgccggcgtgagctactccctcttctcgccggcgttcaacctcgccaccaacgaccagtggcacacgctcggggagggcgtcccccacatggtggtgtacacggcattcttctacttctccctcgcctgcttcgccatcggcatcgccctcaacatctggttcctctaccaccccatggtcggcgtgccgcggtcgtcgctcacggcctacctgaaggattggaaggggagggatcttgctctcgtcgcaggcatggtgtgtggccttggcaatgcgttccagttcatggctgggcaggctgctgggtatgctgctgctgacgctgtccaggcgttgccgctggtgagcacggtgtgggggatcgtgctgttcggcgagtaccggagatcgtcgcggcggacttacactctcctggggagcatgctgttcatgttcgtcgtcgccatggtcatcctcatggcgtcgtcggcgcaccggaggccgctctgatggcggccggccggcggctgccgtcgacctcctcctctcctcatggacatgaccgagaaacatcagaagaagaagaagaagctgcatatgtacagctccattgatctgaccacatcagtgtgtagttcctgaccttctcgacgtaggatctatgcatattgcctcccggtgcttgcgcatcggcgaggctacacatcaattaatttcttctgcaatgagcaaccatgggatgggggagtgaatttggagatgtgattggactagtatatagtgtaatgttgtaatatatgtctcagcttctttgtgtgaagcttctgtgaagggaaccaaaataattttcaaatgtataaaaaaaaaaaaaaaggccacatgtgctcgagctgcaggtcgcggccgctagactagtctagagaaaaaacctcccacacctccccctgaacctgaaacataaaatgaatgcaattgttgttgttaacttgtttattgcagcttataatggtttacgaaataaagcaatagctatcacaaatttcacaaataaaggatttttttcactgcattctagttgtggttggtccaaactcatcaatgtatcttatcatgtctggatccccgggtaccgagctcgaattaattcctcttccgcttcctcgctcactgactcgctgcgctcggtcgttcggctgcggcgagcggtatcagctcactcaaaggcggttatacggtgatccacagaagtcagggataacgcaggacagaacatgtgaggcaataggcatcaagatgccaggaaccgtaaaagggcgcgttgctggcgttttcataaggtccgcccccttagagcatccaaatcgagtcaatccaggtggggaacccgcgggattaaaatcagggttcccctaagccctggcctcctttacccaccat

SEQ ID NO: 12021 - DNA, 1378 bp, Oryza sativa
  ref <308>: DATABASE ACCESSION NUMBER: AK109369
  ref <309>: DATABASE ENTRY DATE: 2002-08-28
gctgcggaattcctcgagcactgttggcctactggagcgaagcgctatccacccagagcggagccttggcatccctacaatggcggcacactcccacgtcatccccttcctctccccggcggcgacgtccgcgcgctgctccccctacggccaccgccgccgcggccgcgcggggctcctgcggtgcgcggcggcggcggggcaggcggggttcttcacccgcctgggacgcctcatccaggagaaggccaagagcgacgtcgagaagctcttctccggcttctccaagacccgcgagagcctctccgtcgtcgacgagctcctcacctactggaacctcgccgacaccgaccgcgtcctcgacgagctcgaggaggctctgctggtgtcggattttggccccaagatttcgttccggatcggacactctacgcgaggaaatccgcgatggcaagctcaagtctggggctgagataaaggaagcgctgaaaaggtgtattcttgaactgctgacgagcaaaggcggcaatccggagctgcagctcggtttcagaaagccggcagttatcatgattgtgggagtgaatggaggtggaaagactacctcattaggaaaacttgcttacagattcaagaatgaaggagtgaaggtattgatggcagcaggtgataccttcagagcagcagctcgtgaccagctagaagtttgggcagagagaacaggttcagagattgttatcgataatgataagaaagcaaaacctgcatcagttctctcgcaggcagtgaagcgcgggaagcgtgaaggatttgatcttgttctttgcgacacgtcaggacgacttcatacaaattatggtctgatggaagaattggtttcctgcaagaaagtcatagctaaagcccttccgggtgctcctaatgagatcttgctggttctggatggcacgactggcttgaatatgctacaacaagcgagggagttcaatgatgttgttggagtcacaggattcgtcctaacaaagcttgatggaactgctcgtggtggttgtgtggttagcgttgtagatgaacttggaattccagtaaagtttattggtgttggtgaagggatggaggatcttcagccttttgatgctgaggcatttgttgaagccatttttccttgagctaggacgctttgttttttgagatggagaatttgaagtttcggagagagcatgtttgcttacttgtacatcattctggtttttcactcctgtgacaatttcactatgtgtccatcctttcatgtaatatatatttgctaacatgctaggaaattagaagcaaaattttggaccaaaaaaaaaaaaaaaggccacatgtgctcgagctg

SEQ ID NO: 12022 - DNA, 1474 bp, Oryza sativa
  ref <308>: DATABASE ACCESSION NUMBER: AK109370
  ref <309>: DATABASE ENTRY DATE: 2002-08-28
gctgcggaattcctcgagcactgttggcctactggctctctctctttctcgtctcctcctatccgcgtccatctctctccccgtctcgattccccaccagcggcgaaaccctaaccctagagcggccaccgccatggagaagcgcgcgaccaccaccagggcggtggtgctccgcctcgacgacctctcccttccgccgcgccgcctcaccgtgccgtcccgcctcccggtctcccacctcctccgcgcgctgccgcagccgctgctcgagtcgtcgtcgttctacctcaccgccgatggccgcccgctcctgctgtccgcgcccgtggcgtcgcttccgccgtcgggttcggtccagctccgcctccgcgcgctccgcggcggtggcggcgacggcggcgccacgggcgccgagtcccgcgactgctacctctccatgtacctcgcgaagaagcccgacaaggccgaccccaacgaggcgcggctctcccgcttcacctgctgcgcgctctccggcgagccgcttgccgcgcctgccgtcgccgatcgcctgggtaacctcttcaacaaggaggccctcgtcgaggcgctcctccacaagcgcctccccaaggcgctctcacacatcaggggtctcaaggacatgatccccatccacctgcatcctaagcctgatgccgatgcggctggtgaggaggtccggttccagtgcccggtcaccgggctcgatttcaatgggaagtaccaattcctcgcgcttcgcaagtgtggccatgtgctcagcgtgaaggctctcaaggaggtgaagacctcggcgtgcttggtatgccataaggagtttgatgaggcggacaagatgccgctcaacggaactgaggacgaggttgcggcattgaggctgaggatggaggaggagagggggaaggtgaaggaaaagaaggagaagaaggtgggaaatgggctaagtgggagtaagcatgctgccgctgccgtgatggcagggggtgctgagaagcttgaaaatgggaagaagggggaggctccctctttgaagcggttcaaggctggagaccatgcaccagcatatgcaaacaaagaagtgtatgcatcgatttttacttcttccaagaagtcagatttcaaggagacatactcatgccggtcacttccccttggaaggaactgaagcgatcttctattgagagatggtaatggcttggaggtgaacatcctgcactgatttgcttcatagcatggttcacctgcaagtttcttcattgtaattttagttgtcggtgttcttcatgctttgattactgatgtggggctctgtgtttccattgtcaaggaagcaaagtgtcggagtatttgaaagatgtgtgaaatatgtaatagtttgataccattaacaagcaataccagctctgaaatcttctgtaaaaaaaaaaaaaaaaaaggccacatgtgctcgagc

SEQ ID NO: 12023 - DNA, 1837 bp, Oryza sativa
  ref <308>: DATABASE ACCESSION NUMBER: AK109371
  ref <309>: DATABASE ENTRY DATE: 2002-08-28
gctgcggaattcctcgagcactgttggcctactggccaaaaaaccacaaacccaacgaagaaggaaaaaaaaaggaggaaaagaaaagaggaggaaagcgaagaggttggagagagacgctcgtctccacgtcgccgccatggccgcccgcgccgccgccgccgcgttcctgctgctgctcatcgtcggcgcggccaccgcggcgccggacatgtcgatcatctcctacaacgcggagcacggggcgcgggggctggaggaggggcccacggaggccgaggcgcgcgccgcgtacgacctctggctcgccgagaacggcggcggctcgcccaacgcgctcggcggcgagcacgagcgccggttcctcgtgttctgggacaacctcaagttcgtcgacgcccacaacgcccgcgccgacgagcgcggcgggttccgcctcgggatgaaccgcttcgccgatctcaccaacgaggagttccgcgcgaccttcctcggcgccaaggtcgccgagaggagccgcgccgccggggagaggtaccgccacgacggggtggaggagctgccggagtccgtcgactggagggagaagggcgccgtcgcccccgtcaagaaccagggccaatgcggaagctgctgggccttctccgcagtaagcacagtagaaagcatcaaccaacttgttactggtgagatgatcacattgtcggaacaagaacttgtagaatgctcaaccaatggacagaacagtggctgcaacggtgggctcatggatgatgcctttgacttcatcattaagaatggaggcattgatactgaagatgactatccttacaaagctgtagatggcaagtgtgacatcaacagggaaaatgctaaggttgtgagcatcgatggctttgaggatgtacctcaaaatgatgagaaatcacttcagaaggcggttgctcaccaaccagtcagtgttgctattgaggctggtggccgcgagttccagctctatcattcgggcgtcttcagcggtaggtgtggcacaagccttgaccatggtgtggttgccgtcggttatggcactgacaatggcaaagactactggattgtccgcaactcttggggcccgaagtggggtgagtctggatacgttcgcatggagcgcaatatcaatgtgaccacggggaagtgtggcattgccatgatggcatcataccctaccaagagcggagcaaacccacccaagccatctccgactcctccaactcctccaacaccacctcccccatccgcccctgaccatgtctgcgatgataacttctcttgcccagcgggcagcacctgctgctgcgcattcggcttcaggaatctctgcttggtttggggctgttgcccagttgaaggtgcaacctgctgcaaggatcatgccagctgctgcccgcctgactaccctgtctgcaacacccgggctggaacctgctcagcgagcaagaacagcccattgagcgtgaaggctttgaagcgcacgctcgctaagctgaacaccgcatgagctcatcgataacatgtaatcggcgaggagaggggatgaggcagcgtggagcctttctgaaatttctgcttccgtgcctccatatatcgttgtcgcattttgaggggacagcttatttactctactgcctgccttttatcttacagtgatctgtgtacatagctcgatccaatttgtactcttatttatcttctccaatttgtactctatataatttatcatctcaagaatacattaacgaagatcctgttttaccgttccaaaaaaaaaaaaaaaaaaggccacatgtgctcgagc

SEQ ID NO: 12024 - DNA, 1631 bp, Oryza sativa
  ref <308>: DATABASE ACCESSION NUMBER: AK109372
  ref <309>: DATABASE ENTRY DATE: 2002-08-28
gctgcggaattcctcgagcactgttggcctactggaaagccaaaaaaacccccgagattttacagccataccccgcacaccacgccacgcagatcttttctcctcttcctcctcctcccttgactttcccccacggcgaggcgagggcgcgaggcggcgatcaccgcgtccaagccggcgatggagggcgcggaggcggaggagcggaggctggcggcgtcgctgacggcgcggtactcggactgggtggtggaggcgctggacgagctcccggggagcttcatcctcaccgacccggccatgccgggccaccccatcgtctacgcctccagggggctcgcctcgctcacggggtacccgccgcgggaggtgctcggccgcaacgcgaggctcttccagggcgccgacaccgaccgcgccgcggtggccggggtgcgggaggccgtgcgcgggcagcggccgcaccaggtctccatcctcaactaccgccgcgacggggaagcccactgggtgctgctccacctcgcgcccgtcttccacgcctccgacggccgggtgctccacttcctcgccgtgcaggtgcccatcgcgccgcccgcgtcccggcgccgcacgccgccgtgccgggccgcccgcccgttcgtggtgttcgcggcgtgccgcgaggaggccagggtggaggaggagtgcccctgcgcgagccacgcgggggaggtgttcgtggatgtggataagagagggcaggatgctgaggaaccgcgggtagctagcgaacatgagaaagaaaaagcactgagtacagctaacagcatcttctctgcgttgaaccgctacagcaaactcactggtctagtggtctgcgggaagagatgtgattctgttggcatcccagcactcagttcttcattaaatctttctcttggtagaatcaaacaaagctttgtattgactgacccccatttgcctgacatgccgatcatctatgctagtgatgcttttctatcactaacaggttactcaagagaagaaatcttgggctgtaactgcagattcttgaatggtcctggcactagtgtggaggttttagaacagataaatcaacatatttgttctgagcaagcttgcacggttcatctactaaactacaggaaaggtggaagctcgttccgtgatcttctacatatatctcctatacgaaatgcatcgggcaaggtagcatttcacgtgtgggttcaccttgatgagggtgcaaagtatgattttaatgggctgacccccgaggtatggcagcttggtgctgttggtgcggtgagagtggcagtcagaagcttgtctgcgtcaggaagcctgttgagaccgtcccaatagcattatctagtttcttgccattttatgacttgtcgacttgccaatgtacattgagttgcctgttgtctgtaaagtaattgcttggtggaaaattttcagctcatttgttcgcgtaaaaaggcgaggtgggtattacatgatggttgtgatttttgtaaatacgcaaaacgaagggaatgggggaaatggttcgtttccatatgaagagaagtggttcttatgacagaaaaaaaaaaaaaaaaaaaggccacatgtgctcgagc

SEQ ID NO: 12025 - DNA, 1189 bp, Oryza sativa
  ref <308>: DATABASE ACCESSION NUMBER: AK109373
  ref <309>: DATABASE ENTRY DATE: 2002-08-28
gctgcggaattcctcgagcactgttggcctactggattttgctttgctttctttgctttcctctcctctctcgccgcccacctcgccgtcgccgccgccgcgagggccaacgccggcgaagtccgcgagccgaagcatcacacagctgcgccagcgatgtcggtggagacggagcggagctccacggagtcgtccgccgcgtcggggctcgacttcgaggacaccgccctcaccctccgcctcccgggctccctcgccgccgccgccgcacctgaccccgaccgcaagcgctcctccccctcctcctccgacgccgccgacgccgcagacaactcctcccccctcgccgccgccgccgatgctccccctgctcccaaggcgagggtggtggggtggccgccggtgaggtcgttcaggaagaacgcgctggcggccaagttcgtgaaggtggccgtggacggcgcgccgtacctgcgcaaggtggacctcgaggcctactccggctacgaccagctcctccgcgcgctccaggacaagttcttctcccacttcaccatccggaagttcgccgacgacgagaggaagctggtggacgcggtgaacgggacggagtacgtgccgacgtacgaggacaaggacggcgactggatgctcgtcggcgacgtcccctggaagatgtttgtggaaacttgccagcgccttcgtctcatgaaaagttcagaggctgtcaacttagcaccaagagccgctcaatgaggcattcccggtgcccatgaccgtgtggttggattgaaagaaagtggaagctttgccccgccgatgttcgcccacgtgtgatatgaacatgtacagttgtctcctactacttttggttccttgatgatgctgagttgagaaaaaggttgtagtttcgttactcgtctgtagtctctccatatatagataatgaagcactgaagcttgaaatatacacctacagtttgtctctttatgaataagaccatatacgcaaaaaaaccgatgttctttgctgcggctcgcgtgtcgtcaggctatatgcagttttttgtcgcaccataggcgatggacatctctggccttatactttcgtaaaaatcttatcatgttaagcgatggtcttgctttggagttcaaaaaaaaaaaaaaaaaaggccacatgtgctcgagc

SEQ ID NO: 12026 - DNA, 1773 bp, Oryza sativa
  misc_feature (1526)..(1526): "n"=any one base of a, t, c, or g
  ref <308>: DATABASE ACCESSION NUMBER: AK109374
  ref <309>: DATABASE ENTRY DATE: 2002-08-28
gctgcggaattcctcgagcactgttggcctactggatcatggtgcgggagacacgtgtccacatcgagagagaggcggagcaaacggtgagcgcgatccagccgtccatcgcgatctggacggtataaagtggtccacctctccccatccactcgtccctttcccgttcgttccaccttcccccgccgccgccgccgccgccgtcgccgtcgacgccagcatgtccgcctccgccgccgtctcctccacctgcgccgcggcctcctcgacgacctcccgccgctcgtcgtcgtctccggcgtccagggttcaggcgacaccccgtcggtctctaccctcccggctcgtagcatcccggacctccccacgctctcccgtcgtgccgccggtctacgccacggcctcaccgggcggcgccggtgggacgacggcggcggcggcgaggaagaagctgctcatattcgatgccgaggagtacctcgcggagtctctggccaagtacacggcgcggctctccggggaggccgtcgcggagaggggcgcgttcaccgtcgcgctctccggtggctcgctcatcaaggccctcaggaagttgacggagtcgccgtacctggaggcggtggaatggagcaaatggcatgtgttctgggtggacgagagggtggtgcccaaggaccacgcagatagcaactacaaactcgccatggatgggttgctttctaaggtgccaattcctgcaagccaaatctatgccataaacgacacactatcagctgaaggggctgcagatgaatatgaaacttgtctaaagcaactagttaatgatggtgtggttgcaatatcagaagtaactggattccccaagcttgatcttatgcttctggggatgggccctgatgggcatgttgcctctcttttccccggtcatccggttgtcaatgaaaacctaaagtgggtcagctacatcaaggattcacccaagccaccaccagagcgaataacatttactttccccttagtcaattcgtcggcacatatcgcacttgtggtcactggtgctgggaaagctggggcagtgcataaggcattctcagataagcaaagctcttcagacttgctgcctgttgagatggtttcacagcaagagggagtgctcacttggttcactgacaaaccagcagtgtcaatgctgtccagcatctgaagcccactgtgttatataagtttgaaactttgatccgaagtataaaaagttcaggggattttcattttattctctgttgcattagtcctctgtggaaatcttgtgctcttttcgtagtattatgcagcataagtgtctgagactccagtttcagtcaattgattaccactttatggggtatttgtcatgcgcttggaaatatctagatcagtacctgtacaatttgatgttacctatttgtttcctttgtacaaagacacttttgttcagcaaaaaaaaaaaaaaaaaaaaggccacatgtgctcgagctgcaggtcgcggncgctagactagtctagagaaaaaagctcctcaacctccccctgtaactgaaacttaaatgatgcgcgtggtggtgttacctgtgtatggcgctcttatgggtgcactaacgcatccttccacattcccaataaggcattttccgcctccatcttgtggtgcggccccggtttatatatgtggcccgggcgagggaaaaaaattcgtccgccaaacacaacggcgggtggagggaacaacggacggtc

SEQ ID NO: 12027 - DNA, 1515 bp, Oryza sativa
  ref <308>: DATABASE ACCESSION NUMBER: AK109375
  ref <309>: DATABASE ENTRY DATE: 2002-08-28
gctgcggaattcctcgagcactgttggcctactggatagcagcgagctccatggggaaagactttgctccttcattttcttcttccctcctaccccactccggcgcgtcacctactctcctcgcgccgctgccccctattctcctcacagtcacagcaccgccgatgcctcttctcgcacccaatcgcatcgccttacctccatgttgctaccgcggggccagatccgccggtgggaaggtcatgcccgccggatccgtcagccatgacctccctgccggcgtattcggtcgctcggaggcgagggctatcacgggaggcacatcggcaacatcgacgacggtcgtctctccatggcagcgcactccacagggaaaggctctgctctcccaccctcttctttattctcactctccctctcaccgtgatccagatccatagctgggtggggaagttgaatatgatctagagctggtggggaactcgtgcaacccccttcactgccggtccatcccatcccatgtgcggctgcgcgaggcgaagataagcgaagatgccgagatcgcggcattggccacggtccgtttgcagcttgatctatcttgattgattattttggttcatccggttgttgtctgcttgccaggatatggtggttgtctctttgtggatgggacatgatggatctagggattatggacaaggttgagtacaactacttcttggacatctctaaaatacaggcccgctcgtccctatgcaccacctactattgatctctgcagaattcaaagttcggtctccatcaaagtgatgtttaatatttatgacatatattacagatgcttgggcatgatgtgctgtaaatttagagggctatgtgtttgtggaattgcttccttggcagcagctgtggaagagtaagaaaggagagggagttcagggcagagctgcctctatccaccgcagcggtacttccagcaaatcatggaccagcggttggtttcacgttgtgcctccacacttgcacgtccaccttcaaatccaagaaggcctccacaattgacaaggacaaagagcagcctgaagaaaagggaacaatggcaatctgcaaaagatttatagcccttcatctggaacctatgttccccccccccccccaaactattgagtactattttttacctcggcctcccttaattcaagctgtaggaattggtggaagcacagttggtttgtttctgctcatcatcattttaggtgctcaacaataggcaaccaacttgcggtgttaccatgaagcttcagttgatgttgagtgttgtcctgcaggttgtaaccaaattatgactagcttgtaccttgtagtttcatcatattcctttaaacatactgatagtatctgctcacaaaaatattgtgcttgcaatgaattaagtgttaaaatcacatacctataatctatgtaaaagatgcacaacaaaaaaaaaaaaaaaaggccacatgtgctcgagct

SEQ ID NO: 12028 - DNA, 1150 bp, Oryza sativa
  ref <308>: DATABASE ACCESSION NUMBER: AK109376
  ref <309>: DATABASE ENTRY DATE: 2002-08-28
gctgcggaattcctcgagcactgttggcctactggatcttcgaatccccaccgaatcgcgcgagagagaaatccaaggcgaggacgaggaggaggagaaggaagcttcgagaatgttccggaaccagtacgacaccgacgtgacgacgtggagcccggcggggcggctgttccaggtggagtacgccatggaggccgtgaagcagggctccgcctgcgtcggcctccgctcccgcacccacgccgtcctcgccgccgcgaacaaggccgcctccgagctctcctcccaccagcggaaggtcttccgcgtcgcagaccacgccggggtcgcgctcgccggcctcaccgccgacggccgcgtcctctcccgattcctccgctccgagtgcatcaaccacgccttcgtctacgacgcgcccctccccgtctccaggctcgcgctccgccttgccgacaaggcgcaggtttgcacacagcgatcatggaagaggccatatggtgttggcctccttgttgctggattagatgagtctggagcccatctatactataactgccccagcggcaactattttgagtaccaggcatttgctattggctctcgctctcaagccgccaagactttccttgagcgcagattcgagggctacaacgactacaccccagagcaacttatcaaagatgccctctccgccataaaggagacgctgcaaggtgagaagctaaccagctccaactgcaccgttgctattgttggcagaaaggacgatggcaccgttgagccatttgagatgatcgacgtgaagaggatccaagaaataatcgattccatggaggctgccgaggaggcaccagcggcagaggctgagtcgagctcgatgcaggaggaggacaagggcacggacgccgcgcccatggacatctaggcccaagatacatcttatctcctcccttacaccgtgtctgagtttccaaaagactactgttttagaaagctgtgactgttgtgtaccctttcttcagtactacaactttgcgacggtctctttgatcaacatcgattgtgttttggaccgattatttacatgtgatgcggacagaaaatctctttggtttaaaaaaaaaaaaaaaggccacatgtgctcgagctg

SEQ ID NO: 12029 - DNA, 1859 bp, Oryza sativa
  ref <308>: DATABASE ACCESSION NUMBER: AK109377
  ref <309>: DATABASE ENTRY DATE: 2002-08-28
gctgcggaattcctcgagcactgttggcctactgggtctccgccgcgagcttcacctgaatccgatccgatcacccttagcaacccagatgttcctcaccgacaagtaccacgcgcttctccctttccacgccagcggcggcggcgtgaaggatcaccggcggaggccgggcaaggcggtgcccggggcggcgggtggtggtcccgggtccgcccggttcggcgccgcgctgtccgcgaggctcgggagtttgctgccgctgccggcgtcgccgttggctgcgttggcgcggctcgcggatctcctcgcgcttgccctcgctgacgctgttcccgcgttggctggtgagggggacgcggccgccgtcgcctcccccgccgctcccttctctcccgttcgaccagccccgcgaccgcgtctccggcgccgcgaccgtcctcctcgccgtcgacgccgtctcctcgctcgcagcggcggccgcgtccgccgtcctctgcggcgacaccctccaccagatcgccttccccctggtctccggcgaattcccgtggaccgaggccttcaacgccgtgtccatccagctcgccgccctcgccaccaaacccagcgaggtggacgccgtcgacgaggccgtcggcaagctcaaatccgtgctcgacaacggcgacggcgacctcgacgaggcggcgctgcgggcggcggtgcaggaggtggagaggcggacggaggagctgacggcgccgttggaccggctgtccgacgccgtcaacggcgtgttccgggcggcgctgtgcctccgcaacgcggagctcgggagcatcatggtgggacccgccgaaaagacgccgtgtaaatagccgtttccaccgtgtgtcgtccgtagccatactggtatgtcactgtataaatacaagtataattctggaagtagtacagttctacaggtacagggcaacatggggtggtgtctcagccaaatgcagtggtttggtgctttttctaccagctgttactactatctgtgtgtcaaggttgccacatatgagaacacagtgcaattcgcacccttttgcagatgtggaatccagtaaaaacttgggaaaaccgtggcaactgttcacctacctatgtaattttgcggcttcatacatactgtatgtataccatgaggaactttgtgaaaaaaaaaaaaaaaaaaggccacatgtgctcgagctgcaggtcgcggccgctagactagtctagagaaaaaacctcccacacctccccctgaacctgaaacataaaatgaatgcaattgttgttgttaacttgtttattgcagcttataatggttacaaataaagcaatagcatcacaaatttcacaaataaagcatttttttcactgcattctagttgtggtttgtccaaactcatcaatgtatcttatcatgtctggatccccgggtaccgagctcgaattaattcctcttccgcttcctcgctcactgactcgctgcgctcggtcgttcggctgcggcgagcggtatcagctcactcaaaggcggtaatacggttatccacagaatccagggataacgcaggaaagaccatgtgagcaaaaggcatgcaaaggcaggaaccgtacaacgcgagtgctgcgtttacatagatcgaccctgagagctacagatcgagctagtcaaggggaaccgacgaattagaacagggtcccggaaccccaggcatcgtcacagcgcacgaaagaagcatactggaaggggctaaacacgagatctcgcagtgccacgagtgaccgtaaagggcagaaataacgaaaaagaaggaaaatggtttcttacttgctcccttactttt

SEQ ID NO: 12030 - DNA, 1249 bp, Oryza sativa
  ref <308>: DATABASE ACCESSION NUMBER: AK109378
  ref <309>: DATABASE ENTRY DATE: 2002-08-28
gctgcggaattcctcgagcactgttggcctactggatttgttcgaaaccaaaccagtggaaagctagggtttcgccgactcgcgagtggagggcgctgctcgtcgccaggctcgtcgccggcgggatggccggtcgtccgtcagcatcctctctccgtcaaactgtttggtttcgccggctctgtctgccacgcccctctctttcgtcgactctctccgttgagctctctggttccatgtagataagatgtcctctgcacacgtatatttgagattcaataaaggtcagacaatcacataagtgaaggtgtgcttgaagattgtggccagcttgtgaaagctaattccattcaaggtaataagactaataacattgatgtggtttatacaccggggtataatctaaagaagactcctccatggatgtgggtcaagttggttttcacaactctaaattggtttgttgtttccctcctcccaaagcctcaacaatgccgcctcccctcctcctcctcttcttcctcctcgccggcgtgggcgccaccaccacggtggaggagcccccggcggcgctgtccccgccgcacaagaacgcgacgctctctgagatcctcctgcgctacggcctgccaccgggggtgttccccaccagcatcaccgccttcaccctcgccgccaacggcagccttgccgtcgacctccagggcccctgctactcccactacgagtacctcacctactttgaggcccgcgtcgtggggctcctccgctacggctctctcaccgacctttccggggtcaaggtccgccgcttcctcgtctggttcgacgtcatccgagtcaaggtcgacctcccgccgcccccgcactacgtctacctcgacatcggatggatcacccgcaagcttcctgccgacgagttcgagtccccccacaagtgcgacgactccaagaaatgccgcctctcgtccgcgctcgccacggctgccgtgtggtttcaggtttgacgtgttcctcccctttgtgattccgagctgtttgtgttcgataggttcttgatttaggcttactgggtgctggttttgcttgccaaattagtctcttgttagaaattaatctgctgccaagtaacaagcgaatttaatttctcggattgtgtttttgtgccgtcaatttcaaagttaatagcggaactatgctgagaatttgtggtgaaaaaaaaaaaaaaaaggccacatgtgctcgagct

SEQ ID NO: 12031 - DNA, 1492 bp, Oryza sativa
  ref <308>: DATABASE ACCESSION NUMBER: AK109379
  ref <309>: DATABASE ENTRY DATE: 2002-08-28
gctgcggaattcctcgagcactgttggcctactggcccagaccaaacaatgtcgacgcctagccagaagaagaggaggagtaaggggaaggacggcgcggtggcgccggtgggactgaggcttaatcgcctgggtcgtgcttctcctcgcgaggccgccgggaagccggtgtaccttgcggtggagcacgacgatgaccaggaggtgcccgcgcactccatcgtcgagctcggcggcggcggcggcggcggcgaagcccaccttgtgcttcacaacgtccgcgggatgtccttcgccaccgtggagtcgcgctacgggccccggatcgtaggcgtcggcggcaagttgttcaccacggtgtacgaccccaagacctcgatggagatccccggccccttcctcgtcgagcctaagctccggcccgtcctcatcccgcggggcagcaagctgtatgcgctctcccgaaccccttccgtcgtgcccggcctcgacttcctgccctggttcgtgtacctcgacctcaactacgtcttggtcgcccctcacgacgcgagaaccatgggatggcaccacttgccgccgccgcccatcttccctgtccgcctcaacccgctcgagtaccgtgacccgccggaggtccgcgtcgcctcctacgccgtggtcggctcccacatactgctctccgtgcagcaagacaagggcacctgcgctttcgacatggacaccaaccagtgggatatggtggacgccaacaacttgcctttcatcggcaaggctgttccccttggtggccacctcttcattgcccgctccatagccaatggcggtgctgctgcagtgtacgacatcagggtcttccccttacagccaacaagttcagggtcacacaagacggagttgtccatcctcaacatccccgtggtgtccaagggcattgttccagggcagcttttctgctccttggggaagggcatcttctcttccatcgacgttcgatctgctgctactcctggtccagacgccaagctgcataaagcgcgtatcgttcatcgcacctactctcaggttggaggggatgacactgaggacaataattatactgtcataaccaaacagcacagacagatttacaaacttattgatcggactcgtcatttggctcatccttcgccggttgttgctgctttaactatggaagcagaatgaccatgtgaaggtttgaacgaacagtggcaagactaggctgtatttggactgaaactgtccactatgatgaatgtaagtttggtgaaagcagcagtaatttagcagctataattttagatttggtgtttcatgcgaaatttgacttggttttggttatgcatctgcttgaactagacaacttctccggtgtctgttgtcttgtttatggtaatttgtggctagcaatggaaaaaaaaaaaaaaaaaaaaaaaaaaaaaaaaaaaaaaaaggccacatgtgctcgagc

SEQ ID NO: 12032 - DNA, 1442 bp, Oryza sativa
  ref <308>: DATABASE ACCESSION NUMBER: AK109380
  ref <309>: DATABASE ENTRY DATE: 2002-08-28
gctgcggaattcctcgagcactgttggcctactgggcaacctcgcccgcctcctgcgctcgcgtgcgccgtcgcccacctcctcagctcgcaccgcaacctcgcccgcctcttgcgctcgcgtgcgccgtcgtcgccgcagctccctctcctctactgtgctgccgccgccgctccctcccaatgacccgccggatctcctagtgaggaggccgggaccgccggatccggtgaccccggtctcctcgccggcggatccggcgcccagacgcccacctcctccgctcgcaagcgccgtcgccgccgcagctcccttctcctctaccgtgctgccaccgccgctccctctctgcggtgtcaaatatggctcggggaccgtctgattcatcaatcttggcctcccctccagttgaatcggtcgcccggatggagtcaatagggtgccgccgctgccctcttctcctgtccctctccggccgccgccactgccatcttctcctctccctctccatgagagcctcgctcagtgccatgagaagggaagggagagtgtcggcttgaccaggaccgcgatgaagacagctgcggctccgcgacaatagctgcctggtcgttcctgttctcttttttccttttcgttctagctcagtgtcatagggccatgagaaggaagtggttggaccttagttgttgatgattacaaccgtgatttgcttctaatgtgtaagccttgatttagttacagtgccagtcttgatttgcttttaatgtgtatggcattattcagttatagtgtgtaggttgtgtggagaaatttccctctgcatgtacttcaacactgtcatgtgtgatcaaactgtttagcttgaaacaacacacgctgctactcaaaattctctatgctgtgattaattgtttcagttaggaattgcatatacaactttggagggcaaaacgatattgttgataggtttatttgttcccatttgtgatgcagggcatatttatgcgatttggggctttcgttcattatatcaagcttaggatacctttgacatgtatgtaatgattctctttggttgccaagatgcaggtatccctcccagtgcatatgaagtggaacatatctatctcagtagtcactggcactttccaagtgctatgtgaaaagatctcattgtttcgtgatgaagatttctatatgaaaaattttcagtggcggcaccaaagatgacagttgtggcgacgacggcggtggcaacggcagctgagtcggtggcgacggaagtggcagcagtgaagtcgatggcgatttattggagggaacgtgtaaacaatggctagctagtgatggagcaattaaaattggataaagttgattatatcgatctaatcttgcatgtgaaaaaaaaaaaaaaaaaaaaaggccacatgtgctcgagc

SEQ ID NO: 12033 - DNA, 1564 bp, Oryza sativa
  ref <308>: DATABASE ACCESSION NUMBER: AK109381
  ref <309>: DATABASE ENTRY DATE: 2002-08-28
gctgcggaattcctcgagcactgttggcctactggactgcgctgctacacgctacgggataagccaagcttgcttgctttcgtagtcgctttgctcgatcgctcctctcgatcccatcctagattccactcggttctgcttctgctccttcgatgggttcccgcgacggatggcggctactcctcctcctgctcggcttcctgctcgtggcgccgacttgccgcgctcgggaggcgcagccgctgccggtactggaggaagaggaggtggtggcggacgcggcaggagggcgtggtggcgcgggcgctgctgccggcggaggaaacaggcgcgcgccggtgcggcacgagctgtcgctggacttctacgccaagacgtgcccggccgtcgaccagatcgtcggcaacgtcaccgcgccgcggttccgcgacaaccccgccgccggccccgccgtgctccgcctcttctaccacgactgcttcgtcgaagggtgcgacgcgtccatactgatcgcgccgacggccaacaacggcggcggggcgccgagggtggagagggacatggaggagaaccggaacctgccgcaggaggcgttcgacacggtggagatggccaaggccgccgtggagaaggcgtgccccggcgtcgtcacctgcgccgacgtcctcgcgctcgccgcccgggacttcgtccacctggcaggtgggccctactacgcggtgaagaagggtcggaaggacagcagggtgtccctggcgggcaaggtgcggggcagcctcccgcgcgccaactccaccgtggacgagctcctccgcgtgttcgccgccaagggcctcggcgccggcgacctcgtggcgctctcgggcgcgcacaccgtcgggttcgcgcactgcgcccacttcctgggccgcctctacgacttcggcgggacgcggcagccggacccggtgatggacgcgcggctggtgaaggcgctgcgcatgtcgtgcccctacaccggcggcagcgcccgcgtggtggtgcccttcgacgtgagcaccccgttccagttcgaccacgcctactacgccaacctgcaggcgaggctgggactcctcggctccgaccaggcgctgttcctcgacgcgcgcaccaggccgctcgtcgaggggctcgccgccgacagggagcggttcttccaggcgttcgcggccagcatggacaggatgggctccgtccgggtcaagaagggcaggaagggggaggtcaggcgagtctgcagccagcacctgtcctgaacgtgtactggtccaaactcggacgatcacactgtctcgatcactcgatcacacttggcgttacaggagttatcttttgctgtaaactgccacatttcggaaagtattagtagttccgttcttttttttttcttttgttgggtgcactagtgctaggttgtgcagggattgttaattttgcatggtcactcgcatccgcagtgtgtgaggcttcctatttgtctgattggattggattggactggattgcagaaaaaaaaaaaaaaaaaggccacatgtgctcgagc

SEQ ID NO: 12034 - DNA, 1419 bp, Oryza sativa
  ref <308>: DATABASE ACCESSION NUMBER: AK109382
  ref <309>: DATABASE ENTRY DATE: 2002-08-28
gctgcggaattcctcgagcactgttggcctactggacccaatcctcacatcgcagagcaatctcgaagagcaaacgacccgcaccaccggccacagacggagagttcgagagcagggaaatctgaaatttggagagaccaaagatggcagcgacgaacaagaagatcgtgctgaggaaccacgtgacggggttccccaaggagtccgacatggagctcgtcgccgcgacgggcgccgcgccgtccagggtgcccgagggcacggacggcgccgtcctcgtgaagaacctgtacctgtcctgcgacccctacatgcgcggccgcatgtccagccatgacggctcttacgtcgacgctttcgtcgtcggcgaggctatcaccggctatggcgtcgggaaggtggtggactcgagccacccggggttcaaagccggcgacctcgtgtggggaatgacgggatgggaggagtacagcctcatcaaggatcccagcagggccctcttcgccatccgccatcccgacctgccgctctcctactacaccggcctcctcggcatggcgggcttcacggcgtacgtcgggttccacgagatatgcgcgccaagggaaggcgagagggtgtacgtctccgccgcgtcgggcgccgtggggcagctggtgggacagttcgccaagctcatgggctgctacgtcgtcgggagcgccggctccgacgacaaggtgaggctgctcagggagaagttcggcttcgacgacgccttcaactacaagaaggagagtgacctgagcgcggccctgaagcggtgcttcccggaagggatcgacatctacttcgaaaacgtgggcggcgcgatgctggacgccgtgctgctcaacatgcgggtgcgcggccgcgtcgcggcctgcgggatgatctcgcagtacaacctggagcaccccgaccccgtccacaacctgacggccatcgtcacgaagcggctccggatcgaagggttcatcgtgtccgaccactacgccaggtacagggagtacgaggagaaggccgcgcggtatgtgaaggaggggaagatcgcgtacgtggaggacgtcgccgaagggctggagaacgcgccggccgcgctcatcgggctcttctccggccgcaacgtcggcaagcaggtggtcgtcgtcgccagggagtaaccgcgagatgtgtagttaaacgtgtagcggtatggttacacttcactagtgctgtgcattgtcctgatggctgatgctgtgtttagatgtgtcaagcttagctgaatgcgttggattttgtatcttgaacatcaataacggtgtattttaacaagtgtttagttgttttgaatacacagtaagacaagattaaagtgaaaaaaaaaaaaaaaaaaaaaaaggccacatgtgctcgagc

SEQ ID NO: 12035 - DNA, 1357 bp, Oryza sativa
  ref <308>: DATABASE ACCESSION NUMBER: AK109383
  ref <309>: DATABASE ENTRY DATE: 2002-08-28
gctgcggaattcctcgagcactgttggcctactggaacacccgcacgcaccgcagtttagccatatcgccgccgccgccgccgccatgctcgcctacctcctccacgcccccgccgccgccgccgccgtggtgcccagcccgctctccctccgctcgccgccgaagacgcccttcctcccgacgtcccccatccgcgtgcccacgccgaggcggcgccccgccgcgttctcctccgccgccgccgcggtggtgcccatcgcggcgtcgctgctcgagggccccgtgctggtctgggccgggaggctctgcctctactacgcgctcctccacatcggcctcgccggctccccgcgcaaccccttcctcgcccacgagattggcgatgatggcgccggggacagcgacctagggttctcgaagtgggcggacaagctgcgcggcggcgcgccaggagaaaacgaagcccaggataagaggaagctagttagcaaatggaaaccaacaactataggcacgctgaagaggacttaccgagttcgttcagtagaagaaggtcggcggattcttaaagaaattgctttggttctctccgaagatgaccactttgtggacgcctccagtcacaagggttgtcaaataaggagggaaagtgcgcacggcgagagtgtgtgctgctataatgtgagagctctgttcgatgagcttcctacccctcacctagttctggagattacagctttccctgctggacctctcactgataatgactaccgcaaggccgagaggctcgaaatggtgctgaggatgagtgcttccatttaatttcagaacacccattttccatttcagcttacttttgcccaagctgtaaattttctaccgatggggctcgaaatggtgctgaggatgagtgcttccatttaatttcagaacacccattttccatttcagcttacttttgcccaagctgtaaattttctaccgatgggcctgtaaattgattcagtcttgctaagaagttaagaactacttgtaaaacctgagttctgctcaatctttctagaattctaataaaaaaaaaaaaaaaaaaaaaggccacatgtgctcgagctgaaggtcgcggccgctagaatagtctagagaaaaaacttcccaaactccctgaacctgaaaattaaaggactgcaatgttgttgtcacctggttattgggcttatagggttcaataagaaagcgtcccattacaactagacttttcacggcattaagggggtggccacacccagataagcggaccgcggcggcgaaaatcatagtacggcaaaatatgataaaagaggaagaaatcaaggaagg

SEQ ID NO: 12036 - DNA, 1371 bp, Oryza sativa
  ref <308>: DATABASE ACCESSION NUMBER: AK109384
  ref <309>: DATABASE ENTRY DATE: 2002-08-28
gctgcggaattcctcgagcactgttggcctactggaaggaaaataactacccataatacaagcttagcaagcctagatagaaggtagcgatgtcgagttcgactactccaatctcgccccagttggtctctcccactgacgatgaactcctacaggcgcaggccaacctgtggcgccacagcctctactacctcacctccatggcgctccggtgcgccgtcaagctcggcatccccacagtcatccaccgcctcggcggcaacgccacgcttcccgcccttatcactgcactgtcccttccgccggccaaacttccattcctccgtcgcctcatgcggctccttgtcagctccggcgttttcaccaccgagaggggcggcgcggccgcggaggcggaggcggtatacggccttgcgccgctctccctcttcctcgtcgacggcgcgttcactggtagcgaggtcgacgacggccacaccaaccagtcggcgtttgtgctcgcggcgacctcggcgcactacgtggaggcggcgctcgggctggacgactggttcatgaaggacaacgtgcccgccgcggcgtcgcctttcgaggccgtgcacggcgcgccgctgttgcacgagaccccggtggacgcggagctcaacaggctcgtcagcgaggcgctggtctcgcagaaccacatggggatcggcctggcgctccgcgagagccgccgggtgttcgaggggctggagtcgctggtcgactgcggcggaggcgacggcgcggcggcgagggccatcgtcagggcattcccgggaatcaagtgcaccgtgctggaccttcctcaggtgatcggcaccgccccggtggccgatggagcggtcgattacgttgccggcgacatgttcagttacattccacctgctcaagctgtcctgctcaagtatgtgttgagccactggagcgatgacgactgtgtgaaaatccttgcacaatgcaagaaagccattccttcgcgagaagccggaggtaaggtgatcataaaggatgtagtggttggcacttcttctggactgatgcttgaagccgagcttctgatggacatggccatgatggtgatgacctctggacgggaaagggattaacaagagtggcgtgagatcttcactaatgctggattcagcgactacaagatcatgaacaaactaggagctcgatgtgtcattgaggtctacccgtgaaggaatttcgatatatgtccatatatagttttatattatgctctaaataagtgctttcttgcaattaattaaatatatagaagatatggatcaagattcttgtcaggtgaaaaaaaaaaaaaaaaaaggccacatgtgctcgagc

SEQ ID NO: 12037 - DNA, 2085 bp, Oryza sativa
  misc_feature (1920)..(1920): "n"=any one base of a, t, c, or g
  ref <308>: DATABASE ACCESSION NUMBER: AK109385
  ref <309>: DATABASE ENTRY DATE: 2002-08-28
gctgcggaattcctcgagcactgttggcctactggaaaccaaggccaaaaccctcctcccctcctctcctctccattccgccgccatggccgccgccgccgccgccgccaccacccccaactccctcctcctccgccgcccggcggcacccaagccggcctccgcggcggcctcgccgctccgtctccccacgcgggcagccaggatctcctgcgcggccgtggccacgcccgcgcagtcctcctcctcccccgccgccgccgccgccgaccgcggggtctacaacttcgccgcgggcccggccacgctgccgctctccgtgctccagagggcgcaggcggagctcgtcgactaccgcggctccggcatgagcatcatggagatgagccaccgcgggaaggagttcgacgccgcgatcaagaaggcggaggccgacctccgcgcgctcctcgccgtgcccgacacccacgaggtgctcttcctccagggcggcgccacctcccagttcgccgccgcgccgctcaacctctgcgcctccccctccgaccccgccgacttcgtcgtctccgggtcgtggagcgacaaggcgttcaaggaggccaagaagttctccgccgcgtccgtcgcctggtccggcaaggacggcaagtacacctccctcccgcccttcgacgccatcgagcagaaccccgaggcaaggttcttccacatctgctccaacgagaccatccatggcgtcgagttcaaggactacccggagcccaagaacaagtcgggcatcctcgtcgccgacatgtcctccaacttctgctccaagcccgtcgacgtctcccgcttcggcctcatctacgccggcgcgcagaagaacgtcggcccctccggcgtcaccatcgccatcgtccgcaaggacctcgtcggcagcgcgcagcccatcaccccggtgatgctcgactacaagacgcacgcggacaacgcctccctgtacaacaccccgccgtgcttcgccatctacatctgcggcctcgtgttcgaggacctgctcgcgcagggcggcctcgccgaggtcgagaagaagaacgcccacaaggccggcatcctctacgacgccattgatgccagcggcggatactacatctgccccgtggagaaatccgtgcgatcgctgatgaatgtgccgttcaccctcgccaagggtggggattttgagaagcagttcatcgccgaggcggccaaggagggaatggtgcagctcaaggggcacaggtcggtcggcggcgtgcgcgcctccatctacaacgccatgccgctcgccggtgtggagaagctcgtcgcgttcatgaaggatttccaagccaggaacccttaatttgactcatggtggttatggtattttgatgctgtcttcagtaggaatggtctctgttcttcatcatagcataattaggctccttgcaagagctgctttgcgcgtaagagattttcgatccatctgttgtatcggtaccagtaactatttcgcgatgctgctgctactgcttttcatgtgttcatgggatctcattcccattttgtgccattgaatgttagtatgggaataaaggtagattcttagctaaaaaaaaaaaaaaaaaaaaggccacatgtgctcgagctgcaggtcgcggccgctagactagtctagagaaaaaactcccagacttcccctggaactgaaacattaaatggactgcagtgttgatgtaacctggttaatggcactaataaggtccactatagcgaagcttcccaattcccaataagccatttacccggctctatttggttggccaccatcaaggttataaggaggaccccggacgaggcgcaataacgctggggctcgaagaaactgccggagtcggtggaggaatcaaaggggangacacacagggatacacaaatagtcgcagccaaacggcgggaaacgcacaaactacaggcaaagaacccctcctgctcgctctccccttcctttgtgccgagcgagcgtagatccagagagcacagacgacgacaacacgagagacacacagccgagaacgagat

SEQ ID NO: 12038 - DNA, 1194 bp, Oryza sativa
  ref <308>: DATABASE ACCESSION NUMBER: AK109386
  ref <309>: DATABASE ENTRY DATE: 2002-08-28
gctgcggaattcctcgagcactgttggcctactggggactcgagcttggaatcgaagaaccagtgaacacgagagcacgacgccggtggcactcgttgaggatgatcaacgcagctgggcaacttcttctcagggggaggagcagaggtgttcgtccgatgttctcttccggcctggccgatcgctccttctcctcgtcggcgtcaagctccagaaagttggatgggaaagtggccgtgatcaccggcgcggcgagcggcatcggcgaggccacggcgaaggagttcgtcaggaacggcgccaaggtcatccttgccgatatccaggacgacctcggccgcgcggtggccggcgagctcggcgccgacgccgcgtcgtacacgcactgcgacgtcacggtggaggcggatgtcgccgcggccgtcgacctcgccgtggcgcgccacggtcgtctcgacgtcgtgtacagcaacgccggcatcgccggcggcgcacctccggccacgctcgcggcgctcgacctcgacgactacgaccgcgtcatggccgtcaacgccaggtccatggtggcgtgcctcaagcacgcggcgcgcgtcatggcgccgcgccgcgccggctgcatcctctgcacggcgagctccacggcggtgctcggcaacatcgggcccctcgcgtactccatgtcgaaggcggccgtcgtcggcatggtgcagacggtattagaagtataatcttgttgttttgttttcagcatgtttatttgtatggtagtagctgagtagaagtcacatgtatgtgtgttgcatgccgtgagtgctagcttagtggttgtgctgcatggcttagtgagtagagagattggcagtgatcagtagtggctgatcgtgttgccaggaggtgagagtacatctagctaattagttagccatgcatgcaaatgtggcgaagggatcaactcaggagcaggaagcggtcgaagtttgcatgggcgcatgcatcggagattgaccaggagatattctgttagacgtgggtgagtttgttatctaggattcttgcatttctttaggcttaagcaggtcatgtgcatctttaaatagagatcaatgtaatcagtttcagtgtgagaaaaaaacaaaaagaagtgctacgcacttgcaaaaaaaaaaaaaaaaaggccacatgtgctcgagc

SEQ ID NO: 12039 - DNA, 1080 bp, Oryza sativa
  ref <308>: DATABASE ACCESSION NUMBER: AK109387
  ref <309>: DATABASE ENTRY DATE: 2002-08-28
gctgcggaattcctcgagcactgttggcctactggagtagccgcagcggaagcggacagcagcatcacaatcagcgagatgcaggcggcgctcctactcccagcgcggccgtcggcggcggcgccgcctacgctcttgcggcggggggcggcttctgcgtcctccgcgcgcgctcccactcccctccctgcggggcgcctcagcggcggcgtgctgagcgctgtgcggcgccttaccgtggcggcggcggggtcgtcgtcgtcgtcgggccctctctacccgacgcctccccccaccgagcaggacatcgagcgggccaagttcgagcaggttgtcaagagactggggaaaacagcgaggtatttcaagaatttgggtactcttgggttctggtcccagttggtgtccacagttgtttccgctggaattttgtcattttctacagttattactgggaaggtgacagcaccttttacattctatgcaactgctgctggtattgccgcgggttttatttcagtcttctggtcatttggttacatccgcctttctgaaagacttagaaaaacagcaagtgaacctgctaaggctcctccacgtgctgatgtaattagaagtctgaaaaatggcattgtgctcaatatgctcgggatgggtgctgcagttctcggcatgcaagcaactgttggggctttggtagcgaaggctcttactacctctgcagtaccttactatcaagcaacttcccctggtcaaagtcctgttttggctctagatgttttcctagttcaggcttcagcgaacatcatcctgtcgcatttccttggcctggcgagctccctggagttgctgcgctccgtggccatccctccagcagaagctgctgcggcgtgagcatatcagcgcatatgccaaaggcaagggctcccgttgatcatcttgctcttcatttgctgcttcgggctttggtattcgctaggagtagcaccgctcgtccgcctgtatgtttcttgtccagacaaaatttaaaaaaaatctagctttcaaaaaaaaaaaaaaaaaggccacatgtgctcgagc

SEQ ID NO: 12040 - DNA, 1560 bp, Oryza sativa
  ref <308>: DATABASE ACCESSION NUMBER: AK109388
  ref <309>: DATABASE ENTRY DATE: 2002-08-28
gctgcggaattcctcgagcactgttggcctactgggaacaagaggaagaggaaggaaggaagctagggttagctagctgtgcatggaggagcctggccctgaggaagagaaggaggaggaggaggcgcgcttcgacttcctcgagtggatcggcccggacacctccgccgccgttttcaccttcctagaccaccccgctgatctcgcccgcgcctccgccgtctcccgttcctggcgccgattcgttgttcggaatggcttcagcaagatccaatgcctgcgcctttgccctgaagcttcaaacttcacccgtattattaccaaacaagccattgcctctgcttctgagtcggatgcggagcaccagcacagggcgtacatgcatctcagctatgcccttctcttggatgacccccaggactgcatcatccgctgcatcggtgcctccaccaccgacaatttccctgaggagaccatacaaaacacccttgtgcccaccgattgggtggccatgatgaggccctcttattggtccagcgccggccacttcgatcctgctgtgcccgaatgcctcttttacaggcttcgctccgatctatgcctcgttcaacaaatcaacatacagccattcagaggtcagcccacccatcctccttccttctttttactcctcttgctaaatactagtattacctgtctcttgcacccagctttcttccagtatggtgatccaatatactccgcaaaatatgtccgcttccagatgggttacccaaagacacctctaccatctcaattacttgtatctcatgataatgaaggccagttggctgctgatgacaactatatctggacgtacacatctccacaatttccaatgctgcaggaaagtgtccttcagtcttttaagcttccacgcgcagttctatgcatcggtggagttgtgaagattgagtttcttggtagggttcagaaacaggaaatggatgatctatattacatatgcatatctcatgtccaaatagtggggattccactgccgcgggaactaggagtagatccttacaagaacggtgtggtcctcaagtactatccagatactcgcagatctggcgtgtgccatggtgagtcatcaggggatgatggtcgcaacagcccctctaagtggcgcaactttaccacaagaatcttgcactcaagctcagctcgacgattaggatggaaccaggccatcttgaacaggctgtttggcgcgcatgatgcatctgaggaagaggaggaagagacttaagaggatatatatggaaattcattttgtcccatgtgatgtatgctcactgtgtttttaagatccttttctcctttttttaacaagatgagaatgcactggtgccttgtatgtaagagatgctgtgagtgcatccttgttgaatgctactataatacatgctgtatacatgaacaaggattaatgagcggagcatagaatggagaagatgctgctactctactgcagttctgttgcaaaaaaaaaaaaaaaaaggccacatgtgctcgagc

SEQ ID NO: 12041 - DNA, 1308 bp, Oryza sativa
  ref <308>: DATABASE ACCESSION NUMBER: AK109389
  ref <309>: DATABASE ENTRY DATE: 2002-08-28
gctgcggaattcctcgagcactgttggcctactgggcaccacctcagctcgccagcagcaaccacggcggcgcttcggatgcacggcggcggagcctccacgacgaccaccgccatcgccgccgcgcgggtagcacatgttgcatgagcagcacgcgccgccgccgcagccggagccggaggtttcgctacagctgtcggcgcccgccaccgccgccgacgatgtcgctgcaggcgacgacgaggaggtcaccgtcgtcaccacgtaccgcgacatccaccctctgacgccgccgtcgccgacgacgacgacgacgccacccacgcggctcgggtccgccgcgtactcgtgggacacggccagcagccaccggtccgtgtcgtccgaggagcagttcatgacgatgagccgggagttcacggccatggtcgccgccgggacgaccatgcagactggccccaacgacggcaacaacggcggtgaccagctcaccagcatcggcgaggacgagctggaggagaccaacccgctggcaattgtgccggacagccacccgatcgccacgccggccaggagcagggcgtcccagctggaggttgtccccgcggcagggccatcgccggcgccgccggtggaggcgaggcaggtgaagaaggaggaggtggagacgaaggtgtcggcgtggcagacggcggaggtggccaagatcaacaaccggttcaagagggaggaggttgtcatcaacgggtgggagaccgagcaggtcgagaaagcatccgcatggctcaagaagatcgagagaaagctggacgagcagcgcgccaaggcgctggagaggacgcagaacgacatcgcgaaggcgcggcgcaaggcggaggagaagagggcgtcggcggaggcgaagagaggcctcaagctcgccaaggtgctcgagctcgccaacttcatgaaggctgttgggagggtgcctaccaagcgatccttcttctagcttcctgcagccagcctctgcaaaccttcgatcttgatcgatctgctgctgctctgtttctttcagtgccttttgtgtgctggattaatctagctgccgttcttcgtgtgatgtttgcttagctgtgcgcatccgagaacctaattgtaaaaaagattttaaaacaagttgtatatttgctgttgctgctgttgccctctgctgcttgtgatcacagagtggcccttgtttttcccctggcttgtattatccatacggcataaatggtttgtttgctcaaaaaaaaaaaaaaaaaaaaaggccacatgtgctcgagc

SEQ ID NO: 12042 - DNA, 1008 bp, Oryza sativa
  ref <308>: DATABASE ACCESSION NUMBER: AK109390
  ref <309>: DATABASE ENTRY DATE: 2002-08-28
gctgcggaattcctcgagcactgttggcctactggatactcgatctattatttggcggcggctgcctctgcttgcttgtgactgtcgtgtctgtgcgtgtgtgtgtacgtacatactccagtatatatatgcattgctgcatgtcgcttcatcctcaccgccgccacggcgacggcgacgtcgacggatcagcatcaggatcaggatcagcgcgcctcaccgccggcctcatcaacttcctcgaatcgcgtcgcgccggcgccatgagcaccaccaacagctcatcctctgtctctgtcccagccatggacgcccatggacaggaggaggaggaggagccgatgcaggtgcagcaacagcaggcgttccgcggggtgcgcaagcggccatggggcaagtttgcggcggagatccgcgactcgacgcgcaacggcgtgcgcgtgtggctgggcacgttcgacagcgcggaggaggcggcgctggcctacgaccaggcggcgttcgccatgcgcgggtcggcggcggtgctcaacttccccatggagcaggtgaggcgttccatggacatgtccctcctgcaggaaggggcgtcgccggtggtggcgctgaagcggcggcactccatgcgagcggcagcagcggggcggcggcgcaagagcgctgcacctgcaccggcggatcaggaaggcggaggaggggtgatggagctggaggacctgggacctgactacctggaggagctgctagccgcctctcagcccatcgatatcacctgctgcacaagcccaagccaccactccatctgatctctactcgtattcctcacacgcgcagaggatgcacatcctctgcactacacttgtactagcagtggttaacatgtggatccggttccatgctctgattgttgcttatatttttcaaggaatataaacaaatccgatcctgagttaaaaaaaaaaaaaaaaaaaaaaaaaaaaaaaaaaaaaaggccacatgtgctcgagc

SEQ ID NO: 12043 - DNA, 1345 bp, Oryza sativa
  ref <308>: DATABASE ACCESSION NUMBER: AK109391
  ref <309>: DATABASE ENTRY DATE: 2002-08-28
gctgcggaattcctcgagcactgttggcctactggaaaagagaaccctatctgcaatcgcctctttgcctccccgtctcggcggaagcgcccatcgattcctctctccggcgaacacgcgggtgggcgggtcgggtctcctctcgccgaagcgccacctcggctcggtgtgaaggtaattcggtgattcggcaagggctgtatttatgcagaatggttctctgtcaaggcttatctgctggacacgctcagctgcttgcctttcctgcggctaagcataatgtctctttcgcgagaacatcgtgcctgggtactccggcgggatcatggagtgtaaaacgtgcgcgacttcatgccgaaaggaagagtttttccatgggagctttgcgagttggcactggttttgttcagaatgacatgcttgcatcgttcggaagggatgattctatcaagggcattccatcactggcagcacgacacagtcagcatcgaagacttgaagttggctgtcgagcatcctctttagcgtcattcagctaccctgagttgacttcgaaacccagatggtggtggaggactgtagcatgtgtgccctacttgcttccactccacaacatgtggtcatatgccgatgtcatctaccagctacacacatacttgcaggggttttcgttggtgtacaccttcatcgatacaatgacactgtttccaggatggcttttgctggtgatttttatgacagtgtacttctttgtcgtgagacggaagtggtcgccgcactttctaaggttccatgtcatcttggctatcctcctggacactggctcccaagcagtggcaacaatgtgcacctggatgcccagcatcgtgtatcaggggacgcctatgcagtatttctggatggctattgctttcatacagatcttcacagtgctcgagtgcatgcgatgcgctcttgctgggatgtacccgaatgtccctttcatatctcacacggcatttatccattctgatctgaatctgttcaggtagccaactgcccaccatatcagtatcagaagactgaagggaagaagagcaagtagggtagtagtttattttgtcatagctgcttacagttatatagactgtatttaatttatttatattttctaagcctcctgtaattgctataaacatcaccttttgctgttgcaacaaaatttgaacagcaataagattagatatctcggatatgttgaattcttcctgtattttagttttctgtcgttctgtttctcgaaatgtgtagatctgcattccctctgctaaaaaaaaaaaaaaaaaaaggccacatgtgctcgagc

SEQ ID NO: 12044 - DNA, 1445 bp, Oryza sativa
  ref <308>: DATABASE ACCESSION NUMBER: AK109392
  ref <309>: DATABASE ENTRY DATE: 2002-08-28
gctgcggaattcctcgagcactgttggcctactggacttaaaaataatgtgtgtccatacacgtcaacaaaattttggacggggaagtagggaactaaacacggccattatcagtttatcaccttatccactgctcctgcactccgcgcagtctaccggcggcgagcaatggaagccgctctcctccgtcctcctcccctcgctgcccgaggcggcgtcagcatcgccatcgccttctccgtctctcgactcccttccgccgccgccgccgccgctgcggggaagcccaggaagctcgctccccccgcatgccgctgccgcgccacgccgcaatggcagctcgatttcctgggcgcggaagcggacacggaggcagacggcggcgacgacgacgacgacctcgacctcgacctctccctccccgccgagaccaacgactggtgcgtccgcgcgcgccgctccgctctccgctccatcgaggcgcgtggcctctccccctcgctccagcggatggtggcctcgcccaagaagaagaacaacaagaagaagtccaagaagacgaacttgaagcagaagaaggccgccgagcccaagcctcctcgcgacaccgacgacgatgaggacgacgaggaggaagcggacgatgatctggaggccctcctggcaggagggggtgagctggacgacctcgagctcagggtcgcgcagttcgccgatggcatgttcgacgaaaagcgccagaggaacagggagcagttcatccagacgctctccgccttctcacccgccgcgccgtccaaccggagccaggaggtgtccctcaacaggtccatcgtcgaggctcgcaccgccgacgaggtgctcgcgctcaccgccgaggtggtcgccgccgtggccaaaggcctcagcccgtccccgctcacgccgctcaacatcgccaccgcgctccaccgcatcgccaagaacatggaggcggtgtccatgctacagacgcaccggctcggcttcgcgcgcagcagggacatgtccatgctcgtggggctggcaatggtggccctgccggaatgctcaccgcagggtgtttctaacatctcctgggctttgtccaagattgggggtgacctgctctacttgccggagatggataggattgcccaggtagccatcaccaaggttgacagcttcaatgcacagaatgttgccaatgtagccggatcattcgcttccatgcgccactcagcaccggaccttatctcagcattgacccggagagcagcagaactagtgtacaccttcaaggagcaagagctcgcccagttcttgtggggatgcgcttctcttaacgagtgtccgtatcctctacttgatgcacttgatactgcttgcagggatgctcctagtttcgattgccaaaaaaaaaaaaaggccacatgtgctcgagctgc

SEQ ID NO: 12045 - DNA, 2062 bp, Oryza sativa
  misc_feature (1961)..(1961): "n"=any one base of a, t, c, or g
  ref <308>: DATABASE ACCESSION NUMBER: AK109393
  ref <309>: DATABASE ENTRY DATE: 2002-08-28
gctgcggaattcctcgagcactgttggcctactggcagatgcctcagccacatgtttgccacagagatcttcatgcatcgcttcctgctgtcgagtgcgatccggacttcgaatccggacgaagccgattggttctacactccagtgtacaccacatgcgacctcacgccatggggccatcccctgaccaccaagtctccacgcatgatgagaagtgcgatcaagttcatctccaagtactggccctactggaacagaacggagggtgcggatcatttcttcgttgtgccacatgactttgcagcgtgcttctacttccaggaggcgaaggctattgagcgaggcatccttccggtgctgcgccgtgctacgctggtgcagacgtttgggcagaagaaccatgcgtgtctcaaggatggctccatcacagtcccgccgtatactcctgctcacaagatcagagctcatcttgttccaccagagactcctcggtcaatctttgtctacttccgtggtttgttctatgatacttcgaatgatcctgagggtggttactatgcaaggggcgcccgtgcatcggtgtgggagaacttcaagaacaacccgatgttcgacatctctacggaccacccccaaacctactacgaggacatgcagcgtgcagtcttctgcctgtgcccgctgggctgggcgccatggagccctcgtctggtggaggccgtggtgttcggctgcatcccggtgatcatcgcagacgacatcgtcctccccttctccgacgcgatcccgtgggaggagatcgccgtgttcgtggccgaggacgatgtcccgcagctggacaccatcctgacctccataccaacggaggtgatcctccggaagcaggcgatgctcgcggagccgtcgatgaagcagaccatgctgttcccgcagcctgcggagcccggggatggcttccaccaggtgatgaacgcgctggcgaggaagctgccccatggcagggatgtgttcctcaagcccgggcagaaggtgctcaactggaccgaggggacccgggaagacctgaagccgtggtagatagatatatacagtatatgatagtgttatggcaccattgccattcaccatggctggtgttcttgtgtaaatgacaccaccggatgagaagctgatcaatgaggatatattgatgatgatgagcgaaccacaccattgaatgtaaagctccctttccttgcttctttttaaggccatgtgcctgtatggcaatgtctgttttgaccattgttgtagtgttagcgtattacaggtcatggattatgtaatactagtcaataacccatacgttacaccgtgcaacttgcacaggctatttgttcatatatatataaaacataaatagtaaaattttgtcaaaaaaaaaaaaaaaaaaaaaggccacatgtgctcgagctgcaggtcgcggccgctagactagtctagagaaaaaacctcccacacctccccctgaacctgaaacataacatgaatgcaattgtagttgttaacttgtttattgcagcttataatggttacaaataaagcaatagcatcacaaatttcacaaataaagcatctattcactgcattctagtcgtggcttgtccaactcatcaaggtatctaatcatgtcggatcccgggttaccgagctccaattaatccactccgttctcgacaatagacgctagcccggcgtcagcgtgggacagcatagaacccaaagggggaaagggatcacaacaggggtaccacgagaaactttggccaggcccaaggcggacgaaaagcgcgtgagagaaaagtcggcctaaagtaaaagaccacatgggatcagcaaaaaagatccgaaactactcgacacaaaaaacccaagagctacagtaaaaaaaagaataccttcgtgcccactttgcttctcanataatagagcagacaaccagagacataatgagaacgactaacgcaaacaacaagacaacacaacgtagtgagccagacaacacacaatcgaaaagacaaac

SEQ ID NO: 12046 - DNA, 1835 bp, Oryza sativa
  misc_feature (1566)..(1566): "n"=any one base of a, t, c, or g
  misc_feature (1624)..(1624): "n"=any one base of a, t, c, or g
  ref <308>: DATABASE ACCESSION NUMBER: AK109394
  ref <309>: DATABASE ENTRY DATE: 2002-08-28
gctgcggaattcctcgagcactgttggcctactgggtgttgcgatggatgcggcggggatggcaggtgcgcccatggcgtcgcccccgccgtacgacaacccgacggctgggttccccatcgcgatcgtgatcgccatcgggttcatggtcacctcgctcatcctcgccagctactacttcctcgtcgtccgctgctggctccgtggcacgggcggcggaggcgccgccggggccgggctgctgcaccgctcgcgccgcgagagcgcggcggagcgcgtcgccgcggtgttcttcaccgactacgaggccgaggttggaggcgggctcgacccggacgtcgtggcggcgctccccgtcgtcaagtaccgccgcgccgcctccgggaagtcggcgtcgccgcaggagtgcgccgtgtgcctgtcggagttcgtccgggacgagcggctcaagctgctgccgagctgctcccacgcgttccacatcgactgcatcgacacgtggctccaccacaacgtcagctgcccgctctgccgcacggtggtcaccggcggcgcgatcggcctcctcgtccgcgacgaccagtatgacgcgtccagccgggaactggccgccggcgagaggcgcatcgacgccgccgcgaggatgggccacgggatcagctcgtgcaggttccccaagaccggggccgagcaggagccgatccggcgatccttctccatggattgcttcctaggcgatctcggccggaagccaccgccgccgccgccgaaggatcccgcaggctcggaggccgggccgagccaccccgacgcggccggtagcagcagtatcgtcggcaccgccggcgccggcgagaccagcggccggtttcggcggttgctgtcgtcgttcgggctcggccggagctcgcggagcacggtgttgcccatccacctcgacccatgaaccacctcgggttcgtgcaacctaattaactcgctcttaccgcttaattaattgagagttactagccatttgtgccacttgtgtgcgtgcaatgtgtacagcagatagcagaattggggttggaattttgccgttccattgattacttcttggctccttgcatctcaagtgttcccgcccggacatgtcaatctttcgtacgtgatcgatcgatattaattagttggtacatcaaaaaaaaaaaaggccacatgtgctcgagctgcaggtcgcggccgctagactagtctagagaaaaaacctcccacacctccccctgaacctgaaacataaaatgaatgcaattgttgttgttaacttgtttattgcagcttataatggttacaaataaagcaatagcatcacaaatttcacaaataaagcatttttttcactgcattctagttgtggtttgtccaaactcatcaatgtatcttatcatgtctggatccccgggtaccgagctcgaattaattcctcttccgcttcctcgctcactgactcgctgcgctcggtcgttcggctgcggcgagcggtatcagctcactcaaaggcggctatacggttatccacagaatcangggataacgccggcaagatcatttgatgccaatggcacgcgaaggcaggaaccgtcanaggccggcgtgtctgcgtttatcatatgctccgccccctaaaagcatactaaatcgagcccagcagtaggtggaacccccggaattaaatacggcgttccccggtaaaccttttgctcctttatactcggctagaaacatcgcttccctgagaggggccacaccaccaattcttatttatctcaccggtgtaacccaccacccacttattt

SEQ ID NO: 12047 - DNA, 1200 bp, Oryza sativa
  ref <308>: DATABASE ACCESSION NUMBER: AK109395
  ref <309>: DATABASE ENTRY DATE: 2002-08-28
gctgcggaattcctcgagcactgttggcctactgggacactactcgagctcgcgagcggcgagcccaaaacctgacaaaccacacgcccacctcgccatggcgcggcacctcgcgccaccaggaagcttccaccgcctcctcgcctcccggcactacccgccttcctccccggcaccgccgccgcgccctctccttctcctccccaaaaccctaataccgccggccgccgccgcaatggaattccctcgccgcgggcggcgcgacgtcgccgccgcctccgccccggcatcctcctcgccggagaccgaggtagcgccgggggcctgggggaaggtctccgccgtgctcttcgacatggacggcgtgctctgcaacagcgaggagctctcgcgcctcgcgggcgtcgacttatttgccgagatgggcgtcgacgtcaccggggacgactttgttccttacatgggcacaggtgaggctaatttccttggaggtgtagcgaagttgaagggagtgaaagatttcaacgctgaaagtgccaagaaacgtttttttgagatatatcttgacaagtatgcaaagccaaatgctggcattggattccctggggctctagatctcgtaacagagtgcaaaaatgcaggtttgaaggttgctgttgcatccagtgctgataggattaaggtggatgcaaatttggcagctgctggtttgcctctgtcgctattcgatgccattgtttctgctgatgcatttgaaaatttgaagcctgctccggacatttttttggcagcatctaaaaccctaggtgttgacacagatgagtgcattgtgatagaagacgcacttgctggagttcaagctgcaaaagctgccgaaatgagatgcattgctgtgatgactactctggaggaagatgcgttacagcaagccagtccctcactcatacggaagaatattggagatatttcaattagagatattttgtatggtggttctaatgcttaccacagtatgtagttcaagcaaagtttatttcaataaaataatgcatctcttgtatttgaaactggaaagaaaaaaaaaatctgcatatcttgttgtgcaaaactcattatatttgctttgtttcattggtttgaataagacccctatcccatttccttgaaaaaaaaaaaaaaaaaggccacatgtgctcgagc

SEQ ID NO: 12048 - DNA, 1034 bp, Oryza sativa
  ref <308>: DATABASE ACCESSION NUMBER: AK109396
  ref <309>: DATABASE ENTRY DATE: 2002-08-28
gctgcggaattcctcgagcactgttggcctactggatccatctcaacatctcatttgttcaggcaagaggcaactatggctaggaagataggagttattgccttcgttttgcttgtgagcattggcttgtccaatgcagcaagagtagctagatacactactgagggaggaggaggtggtggtggcgaaggcggtggtggcggagggggtgaaggtggtggtggagggtcagggtatggtgagggctatggacaaggaggtggagcttctggtggaggttatgggcagggtggaggaggtggaggtggtggtggacagggcggtggtagtggatccggttatggatctggttatggccaaggtggtggagcatctggaggaggctatggaaaaggtggtggaggcggagggggtggaggacagggtggtggggcaggatcaggctatggatcagggtatggttcaggctatggtcaaggtaggggagcttctggtggaggttatggacaaggtggtggaggcggcggtggtggagggcaaggtggtggaaatggatctggttatggatccgggtatggttctggatatggtcagggtggtggagcttctggtggaggctatggacaaggtggtggtggcggcggtggtggaggacaaggtggtggaaatggatcaggctacggatctggatacggttctggctatggtcaaggtggcggagttcatgctggaggctatggacaaggtggagggggaggtggcggtggcggccaaggaggtggttcaggtagcggctcaggctatggatctgggtatggtggcggcgccggtggaagtccatagagtttaattccgaacacaagaaatctatgtgttagataaaaacgcccatttgcatttccatgtaatgcatacttacttacttatttttatttttagtttgaccgttaatgtacttgtaaaatgatgatttgaaataatgggcgctaccttttgcttaaaaaaaaaaaaaaaaaggccacatgtgctcgagc

SEQ ID NO: 12049 - DNA, 2036 bp, Oryza sativa
  ref <308>: DATABASE ACCESSION NUMBER: AK109397
  ref <309>: DATABASE ENTRY DATE: 2002-08-28
gctgcggaattcctcgagcactgttggcctactggaccaccctccttgttacagctgtgccgcctcttgcttcctcctcctcatcgtccgccatggcttctctcaccgatctcgtcaacctcaacctctccgacaccacggagaagatcatcgccgagtacatatggatcggtggatctggcatggatctcaggagcaaggctaggactctctccggccctgtgactgatcccagcaagctgcccaagtggaactacgatggctccagcaccggccaggcccccggcgaggacagtgaggtcatcctgtacccacaggctatcttcaaggacccattcaggaagggaaacaacatccttgtcatgtgcgattgctacacgccagccggagaaccgatccccaccaacaagaggcacaatgctgccaagatcttcagctcccctgaggttgcttctgaggagccctggtacggtattgagcaagagtacaccctcctccagaaggacatcaactggccccttggctggcctgttggtggcttccctggtcctcagggtccttactactgtggtatcggtgctgacaagtcttttgggcgtgatattgttgactcccactacaaggcttgcctctatgccggcatcaacatcagtggaatcaacggcgaggtcatgccaggacagtgggagttccaagttggcccgtctgtcggcatttctgccggtgatcaggtgtgggttgctcgctacattcttgagaggatcaccgagatcgccggagtcgtcgtctcatttgaccccaagcccatcccgggagactggaacggtgctggtgctcacaccaactacagcaccaagtcgatgaggaacgatggtggctacgagatcatcaagtccgccattgagaagctcaagctcaggcacaaggagcacatctccgcctacggcgagggcaacgagcgccggctcaccggcaggcacgagaccgccgacatcaacaccttcagctggggagttgccaaccgcggcgcctcggtccgcgtcggccgggagacggagcagaacggcaagggctacttcgaggatcgccggccggcgtccaacatggacccttacatcgtcacctccatgatcgccgagaccaccatcatctggaagccctgaagcggcttcttgacgccacgacatcctcgtcatcgtcctccccagctcgccgtgtcgctccggttgctccattgatcggacgatctggtgaattgcatttgtgctgggagaagtaaaaaaaaaaggaaagagaaaaaaaagaaaatcacgccaaaaaaaattctcattccatttcgatttggttgcatgctaccactactactacattgctcatctgccatttagattagctcctttttcttcgtcttttgggtgagtgcgtttgggtgctcttgtgtaatcctccaataatggccgtacctacggtacttgtcccatcctgtggatcatcgtcctcctttccacatgtggttttatcatcattgttattagtgatcacctttatataaagttcttgctgggcttccaatagccgtggcttttgcgttaaaaaaaaaaaaaaaaaaaaaaggccacatgtgctcgagctgcaggtcgcggccgctagactagtctagagaacaaaacttccagacctcccactgaaaccttgaacacatagatgatggcaattggtagatggtaaacctggtcattggcgcctataacggcttccactaagcgcatcatcccaattttcaaataagacattttcccgcaatctgagtcggtgtcccaacctcacggtttacaagaggaacccggaaccacccaacaaaccacacacaccccgaaaaatccgacccctcccgttggcagagctaccccaacgagaggaacccaaaggaacacaaatacagacactacacacagaccagaatagacccgcaaaaacgggtcagaaacgccaacgcaccgctacccaccaaatttgcccctccttttgtgagaggg

SEQ ID NO: 12050 - DNA, 1200 bp, Oryza sativa
  ref <308>: DATABASE ACCESSION NUMBER: AK109398
  ref <309>: DATABASE ENTRY DATE: 2002-08-28
gctgcggaattcctcgagcactgttggcctactggcacatttcagctcaccactgctagcttgggaagaggaggaggagcttgagcttggagagagacaacaatggcggctcaggctcttctctctgggaggcagctgctggggaggccattgcaatcttcagtctccaggtcttcttcctccaggaaggcacccttcatggtcagggcagaggccactccccctgccaagcaaggtgctgacaggcagctgtggttcgcatccaagcagtccctgagctacctggatggcacgcttccgggagacttcaggttcgacccgctggggctatcggacccggaggggaccggtgggttcatcgagccacggtggctggcctacggcgaggtgttcaacggccggacggcgatgatgggcgtcgtcggcatggtcgccccggagctcctcggcaagctgggcctcgtccccgccgagacggcgatcccgtggttccagaccggcgtgatcccccccgcgggcacctacacctactgggccgacccttacactctcttcgtcttcgagctcgccctcgtcggcttcgccgagcaccgccgcttccaggactggtacacgccgggctccatggggaagcagtacttcctcggcctcgagaagtacctcgccggctccggcgagccggcctaccccggcggcccgctcttcaacccgctcggcttcgggaccaagagcgaggcggagatgaaggagctcaagctcaaggagatcaagaatggcaggctcgccatgctcgccttcctcggcttctccgtccaggcgctcttcaccggggttggccccgtgcagaacctgcttgatcacctcgctgatcccgtccacaacaacatcctcaccagcctcaagttccattagagatgccatcaactacgtatttaattaattacgagtttttaattatgtatgtatgtacgtgcgtatgcgtatatgtgtgtacgtatgtatgtacgcaactttgtacgatcgatggtgcgtgtgatcgagaggggtatgtatgtacgtacgtatatacgatgtattattatgcatgggtgtagggtgtgggtgtaacatgtaaatttgtgctccaactgatttgcacgcatggtcgcatggatcgatttgctaaaaaaaaaaaaaaaaaaaggccacatgtgctcgagc

SEQ ID NO: 12051 - DNA, 1181 bp, Oryza sativa
  ref <308>: DATABASE ACCESSION NUMBER: AK109399
  ref <309>: DATABASE ENTRY DATE: 2002-08-28
gctgcggaattcctcgagcactgttggcctactggagagtagtgttagtcttagcgaatccagcagcagaagcagcagcagcagctcagccgccgccgatggcgtccacgatcatggccccaacctcccgcgtcctcgccgccaagacccccttcctcggccatccccgcccctccaatgcccccgtccgcgacatcgccgccgccgccaccggccgcatcaccatgagcaaggagctgtggtacgggccggatagggtgaagtacctggggccattctcggcgcagacgccgtcgtacctgaggggcgagttcccgggcgactacgggtgggacacggcggggctctccgcggacccggaggcgttcgcgaggaacagggcgctggaggtgatccacggccggtgggcgatgctcggcgcgctgggctgcatcacgccggaggtgctcgagaagtgggtgcgcgtcgacttcaaggagcccgtgtggttcaaggccggcgcccagatcttctccgacggcggcctcgactacctcggcaaccccaacctggtgcacgcccagagcatcctcgccgtgctgggattccaggtcgtcctcatgggcctcgtcgagggctaccgcatcaacggcctccccggcgtcggcgacggcaacgacctctaccccggcggccagtacttcgacccgctcggcctcgccgacgaccccgtcaccttcgccaagctcaaggtcaaggagatcaagaatggccgcctcgccatgttctccatgttcggcttcttcgtccaggccatcgtcaccggcaagggccccttggagaacctgctcgaccacctcgccgaccccgtcgccaacaacgcctgggtctacgccaccaagttcacgccgggctcgtgaatggcccagccgccattgtagactactctctctctccatcgctcgatgtaccaatgcttgcacagattgtacgatgctgtgatgaatctgatatgatccatccagaattcagaaactgaaaaaagttggggtttgcaacttatgtgtcagctgctgctttaagcttagttaactcttttgatgttttaatttgtacatttgtgtactttgtaatgatccatacgagacctagtgtttgattattgctaaaaaaaaaaaaaaaaaggccacatgtgctcgagc

SEQ ID NO: 12052 - DNA, 1130 bp, Oryza sativa
  ref <308>: DATABASE ACCESSION NUMBER: AK109400
  ref <309>: DATABASE ENTRY DATE: 2002-08-28
gctgcggaattcctcgagcactgttggcctactggatatctaacgcccctctctctctctctctctcactcagcaacagctcgcagctcactctctcactctactactcgtagctaagctagctcgcgccgccgccgccgccgtcgccgccgccatgagcaaggagaagcaccacaagcgggagcaccacctccggcgatgctgcggcgggatggcggcgtgcatcctggcgctggtcctcgtcgtcggcttcatcgcgctcgtcgtctacctcgcgctccgcccctccaagccgtccttctacctgcaggacctccagctccgctccgtcgacctcggcgacccctccctctccgccaccgcgcaggtcaccctcgcctcccgcaaccccaatgaccacgtcggcgtccactaccgccgcctcgacgtcttcgtcacctaccgcgacgaacccgtcacggtgcccgtctccctcccgccgacctaccagggccaccgcgacgtcaccatctggtcgcccgtgctctccggcgagtccgtccccgtggcgggcttcgtcgccgacgcgctcaggcaggacgtcgccgccgggtacgtcgcgctgcaggtgaaggtcgacggccgcgtcaagtggaaggtcggcagctgggtctccggcagctaccacctctttgtcagctgccccgccatgctcgcctccgccggaccaggcggcgtcggccccatgcctctcggcggcgcctccgccgccgtcgtgaacggcaccggcgccggcgccgtcgcgtcgctcaggttcacgcagccgacagggtgcagcgtcgaggtgtgagtcacaaatttgagtagcggctagtggcaatatggtaattaattaagttcatcggtcgcgttaatccgcaagctgttaattttttttttgtgttcatgtagctcatacatactctatgtgagagaataaagttacgtacgttcatatgtataccattgcaacacattaatttcctatatgaagtgtactagtataatttcgttgctgtaatttttgaattattgttaataatatatattcaggtaatatttctcgagaaaaaaaaaaaaaaaaaaaaaaaaaaggccacatgtgctcgagc

SEQ ID NO: 12053 - DNA, 1187 bp, Oryza sativa
  ref <308>: DATABASE ACCESSION NUMBER: AK109401
  ref <309>: DATABASE ENTRY DATE: 2002-08-28
gctgcggaattcctcgagcactgttggcctactgggtgcgctggtgcgggtgggtggccttcaaacctagcccccgtgtggttgcagcggagcaggaaggggaagtcgggggaaaaccgagaagaattcaaggaaggggaatcatgagtggtacgggatacacagttgaagttactaacctgtcaagcagggcatctgaaagtgatcttcatgagttcttttcattctctggagcgattgagcatatagaacttatcagatcaggagaatatggttctactgcttatgtgacattcaaggaaccctattccttggaaactgcagtattgctcagtggggctactattgtggatcagccagtttgtatagctcgctggggacagcctaatgaaccatacaatttctgggacacaccaaattggtatacagaggaggaaattgaatacaggacctatcaaacatgccagttcaattccactccacaagaagctttgacgattgctcaggatgttgtgaagacaatgctagcaaggggatacgtactcagcaaggatgcactggccagggctagagcctttgatgagtcccatcaggtaacagcgactgccgcagccaaggctgcggagctgagcaagaggattggcctaaccgacagggtcagcggcctaaccgacagggtcagcgccggtgttggtgcaatcagatcggtggatgagacataccacgtatccgagacgaccaagaccgtcgccaccgccacaggaagaacagcagttaaggttgtgaatggcatcatgaccagcagctatttctctgcaggagctatgatgctgtctgatgctctccatagggcagcacaggcagcagctgatttggctgctcatggtagacacaattaagtgaaaataaacacccggtacatatattgtcagttattcagacatcaggatgaacacccaaatatggagtacttgacatgatgccgttccaagtatgataataacggtgaaaccggtaacaactgtacctacaaagactgaaggaaatgtgtgcagaacaatgtaaagtatttcaaaccgagtcaagtgatcgtgcagtcatgtttaacagtttctgctcgttttatattcatgctgatagcatccttcaaaaaaaaaaaaaaaaaaaaaggccacatgtgctcgagc

SEQ ID NO: 12054 - DNA, 1141 bp, Oryza sativa
  ref <308>: DATABASE ACCESSION NUMBER: AK109402
  ref <309>: DATABASE ENTRY DATE: 2002-08-28
gctgcggaattcctcgagcactgttggcctactggcattattactctcttactcgctttcatatctaacgcccctctctctctctctcactcagcaacagctcgcagctcactctctcactctactactcgtagctaagctagctcgcgccgccgccgccgccgtcgccgccgccatgagcaaggagaagcaccacaagcgggagcaccacctccggcgatgctgcggcgggatggcggcgtgcatcctggcgctggtcctcgtcgtcggcttcatcgcgctcgtcgtctacctcgcgctccgcccctccaagccgtccttctacctgcaggacctccagctccgctccgtcgacctcggcgacccctccctctccgccaccgcgcaggtcaccctcgcctcccgcaaccccaatgaccacgtcggcgtccactaccgccgcctcgacgtcttcgtcacctaccgcgacgaacccgtcacggtgcccgtctccctcccgccgacctaccagggccaccgcgacgtcaccatctggtcgcccgtgctctccggcgagtccgtccccgtggcgggcttcgtcgccgacgcgctcaggcaggacgtcgccgccgggtacgtcgcgctgcaggtgaaggtcgacggccgcgtcaagtggaaggtcggcagctgggtctccggcagctaccacctctttgtcagctgccccgccatgctcgcctccgccggaccaggcggcgtcggccccatgcctctcggcggcgcctccgccgccgtcgtgaacggcaccggcgccggcgccgtcgcgtcgctcaggttcacgcagccgacagggtgcagcgtcgaggtgtgagtcacaaatttgagtagcggctagtggcaatatggtaattaattaagttcatcggtcgcgttaatccgcaagctgttaatttttttttgtgttcatgtagctcatgcatactctatgtgagagaataaagttacgtacgttcatatgtataccattgcaacacattaatttcctatatgaagtgtactagtataatttcgttgctgtaatttttgaattattgttaataatatatattcaggtaatatttctcgagaaaaaaaaaaaaaaaaaggccacatgtgctcgagc

SEQ ID NO: 12055 - DNA, 1284 bp, Oryza sativa
  ref <308>: DATABASE ACCESSION NUMBER: AK109403
  ref <309>: DATABASE ENTRY DATE: 2002-08-28
gctgcggaattcctcgagcactgttggcctactggctgtgaaccctacgaaactaccgaagcgaagcgaagcgaagaatcggcggcggcggcggcggcggcggtggggagaagccatggagcggctgcagcggatcttcggcgcctccggcatggggcagccgccgtcggactcgccgctgctcgactcctccgagcaggtctacatctcctccctcgccctcctcaagatgctcaagcacgggagggccggcgtgccgatggaggtgatggggctgatgctgggggagttcgtcgacgactacacggtcagggtggtcgacgtcttcgccatgccgcagagcgggaccggggtcagcgtcgaggccgtcgaccatgtcttccagaccaacatgctcgacatgctcaagcagaccgggaggccagaaatggtggtaggttggtaccattcccatcctggatttggttgctggctttcaggagttgacatcaatactcaacagagttttgaagctttaaaccccagggcagttgccgtcgtgatagatcccatccaaagtgtcaaggggaaagttgtcattgatgcatttcgccttattaaccctcagaccatgatgcttggtcaggagccacgacagacaacatcaaatgttgggcacctaaataagccatctattcaggctcttattcatgggctgaacaggcactactattcaattgcaatcaattaccggaaaaatgagcttgaggaaaagatgttactgaacttgcacaaaaagaaatggaccgatggattgattctgaagaggtttgacactcattcaaagaccaatgagcagactgttcaggaaatgctgaaccttgctatcaagtacaacaaggcggtgcaagaggaggatgagctgccgcctgagaaattagcgatagcaaatgtgggacggcaagatgctaagaagcacttggaagagcatgtctccaatttgatgtcatcaaacatagttcagacgctaggaaccatgctcgatacagttgtattttagatcactactgctgttatcccaacactgtacccagagctcgtttattttttatttttttatgtttatcgaagcctaccataattcagtgaacttaacgccagttacatttgggttatgaaagcttaccacttgacaacttcataattcattttgttggagcgctatctcctgtacggtgcatatatgaatgaaggttaatagtgtgtctaaaaaaaaaaaaaaaaaaaggccacatgtgctcgagc

SEQ ID NO: 12056 - DNA, 1169 bp, Oryza sativa
  ref <308>: DATABASE ACCESSION NUMBER: AK109404
  ref <309>: DATABASE ENTRY DATE: 2002-08-28
agctgcggaattcctcgagcactgttggcctactggataaacatcagtagacgacggcgatggcgcccaagcgacttgtctgcttcttggccgtggccgccgcgctagccaccacctgccacgggtggggcgccggcgccggcgatgtcgtgtcgtcgtcggcggcggcgctctcgttcgtggacaggctgaggcagatgatgatcccggcggccgtgggcgacggcgactactgcgacagctggcgcgtcggcgtggaggcgaacaacgtgcgggggtggacggcggcgccgcgcaagtgcgacaactacgtcgagaactacatgcgcggccaccactaccgccgcgacagcaaggtcgtcgtcgacgaggccgccgcctacgccgaggccgccgtcctctccggcgaccccgccgccgacgccaacgccacctgggtgttcgacgtcgacgagaccgccctctcccacgtcaagttctacaagaagcacggcttcgggtaccacagaaccgacgagccggcgttcatggagtggctgatcgccggcagagcgtcggcgttgccgaacacggtgacgctgtacaagaagctgctcctcctcggcgtcaagatcgtcttcctgtcggacaggccggacacgccggagctgaggaacgccaccgccaccaatctcatcaaggaaggcttcgactgctgggacgagctcatattaaggtcggagaactcgacggcgacgggatcggtggtggagtacaagtcgggggagaggaagaagctggaggaggagaaggggatggtgatcatcggcaacatcggcgaccagtggagcgacctgctgggctcgccggagggccgccggaccttcaagctgcccaaccctgcctactacatcgacaactacaagcgcgccggcgccgccgtccgcgccgccgtagccattacagcctcctcctcgtcgtcgtcgtcgtgaagcaaacgatgcctagctagctatagtactcaactttgaattgcatttttttttcagacacataagttcagttaataatcggtcgtgtacgtacctgccgtgctgtgcactgttgtatctttttggtgagacgattgaaatatctttgggtttatcttttaaaaaaaaaaaaaaaaaaaaggccacatgtgctcgagc

SEQ ID NO: 12057 - DNA, 1229 bp, Oryza sativa
  ref <308>: DATABASE ACCESSION NUMBER: AK109405
  ref <309>: DATABASE ENTRY DATE: 2002-08-28
gctgcggaattcctcgagcactgttggcctactggccttggattcaactcagttggcttctaccagatgaccaagctggctatcataccattcaccatgctcttggaaaccatctttcttagcaagaagttcagccggagcatcaagatctccctcatggtcttgctccttggagtcggtatcgcgtcggtgaccgatctccagctcaatctcctcggctcgatcatcgccgtgctcaccatcgccgcgacgtgcgtcagccagattctgacgaaccaaatccagaggaggctgaaggtgtcgtcgacgcagctgctgtaccagtcgtcgccgtaccagtccgccgtgctgctcgtcaccggcccgttcgtcgacaagctcctcaccaaccgcgacgtcttcgccttcacctacaccttccaagtcgtggcgttcatcgtgctgtcctgctcgatcgcggtgtgcgtgaacttcagcacgttcctggtgatcgggacgacgtcgccggtgacgtaccaggtgctggggcacctcaagacgtgcctcatcctctccttcggctacgtcctcctcagggaccccttcaccttccgcaacgtcgccggcatcctcgtcgccatcttcgggatggggcctctactccttcttctccgtctccgagtcccgcgacaagaagctcgccgacggcccctcccctcctctccccatctcttcctcccagatggcggagatgaaggactcggagccgctgctgggcggcggcggcggcgcggcggcgaagagctcgccgtggaacgaggtgaaggggttgcagagcttcgacgaggtgccgaggacggcgaagagcgcgttcagccggccgtgacgacgacgacgacgagggcggacgcgtgcgcgcgtgacagctaggactgtagctagtgcaatttgggctgcgacaccacaaggagaatttggggggaaagaacatatcatatgcgtctcatctcaccgcagttctttctgttctttttttgttgtagatgatgacgtaatgtgttggtttgttgaaatttttaatggttcttgggaagcatcgagaggttctgacagatatgctaactccgttcacaaatataagcacttctagaaagggttaaggttattatcatgaaaaaatccattattttccttgagtaaaaaaaaaaaaaaaaaaaaaaaaaaaaaaaaaaggccacatgtgctcgagc

SEQ ID NO: 12058 - DNA, 1198 bp, Oryza sativa
  ref <308>: DATABASE ACCESSION NUMBER: AK109406
  ref <309>: DATABASE ENTRY DATE: 2002-08-28
gctgcggaattcctcgagcactgttggcctactgggtgctcagtttcactcttatcagtgaattagatcatatacttgtgtccttgacagctcgttaattagcatggctaggtctctcgctgctctccttctccttctggtcgcagccgcgggagccagccatgccgcgtcgccggcggagatgtactggaagatcgcgctcccgacctcgccgatgcccggcgccattcgcgacctcatcagcccggcgagctcagcggcctcagcttcgaaggataaggaggatacggtgggctccgtgttcttcctcgagaaggacctcttcccgggctccaagatgacgctccacttcacccgcgccaccgccggcgccgcgctgctccctcgcggccgcgccgactccgtcccgttcgcctccgaaaagctcccggagatcctctcccagctctccatccccgccggctcgccgaccgccgacgccatgcggtccacgctcgccgtgtgcgaggccgcgcggatcgccagcgagacggcgcccaagcacaagcactactgcgccacgtcgctcgagtccatggtcgagctcgtcgcctccagcctcggcacccgcgacgtccacgccgtgtccacggaggtggtcaacagggccgggccgacgccgaggcaggcgtacagggtggaggccgtgaggcccgtgccggtgcccgggggcgacatggtggcatgccacaggatgccctacgcgtacgccgtgttcggggtgcacgggatcaagggcgcggcgtacacggtgacgctggccggcgccgacgggaccatggcggaggcggtggcggcgtgccacggggacgtggacgggcacggcgtggcggtggcggaggcgtacaagaggctcggcgtggcgcccgggaaggtggcagtctgccacttcctgcctcaggacgacatgctctgggtgcgcaactgaatgaagcagctacctgcgcgccatccatggctaattaagctccttcctatattttcgatctacctgccggctggctatcatgttatcatcgcgtgtgtgtgcacgccgatccgacatgcccacactacacgtcgacactacacgtgttttattttgttaattaataagtctggacaaccaggtcatcttgtacggcaaaaaaaaaaaaaaaaggccacatgtgctcgagct

SEQ ID NO: 12059 - DNA, 1347 bp, Oryza sativa
  ref <308>: DATABASE ACCESSION NUMBER: AK109407
  ref <309>: DATABASE ENTRY DATE: 2002-08-28
aagctgcggaattcctcgagcactgttggcctactggaaaccaagccagcgtcgggccaagccaacgccgaccaccgaggcgaccggagaagcgcggcgaggtaggccccgatggcggcggcggcggcagccggagcgggcgcggacgaggaggtggacttcgagttcttccccatcatccgccgctacaagggcggccgcgtcgagcggttcatgaacatccccccgctccccgccggcaccgaccccgccaccggcgtcacgtccaaggacgtcgtcgtcgacccggccgtcggcctctgggcgcgcctcttcctcccgcctggcggcggtgctccccagggtaagctccccgtcgtcgtgtactaccacggcggggcctacgtcgtcggctcggccgccgacccgttcacgcactcctacctcaacggcctcgtcgccgaggctggaattctcgccgtcgcgctggagtaccgcctcgcgccggagcaccacctccccgcggcgtacgacgactcgtgggaggggctcaggtgggtggcctcccacgcgaacggcggcggcggcgtcgagccgtggctgctcgagcacggcgacttctcccgcgtgttcctggcgggcgccagcgccggcggcaacatcgcgcactacgtcgccgcgcgcgccggcgagcacggcggcctcgggctcagcatcaggggcctgctcgtcgtgcacccctacttcagcggcgcggcggacatctgcgcggaggggacgacggggaaggcggagaaggccaaggccgacgagttctggcggttcatctacccgggctcgccggggctggacgacccgctgtccaaccccttctcggacgccgccggcggcatcagcgcggcgcgcgtcgctgccgaccgcgtgctggtctgcgtcgccgagaaggactcgctccgggacaggggcgtctggtactacgagagcctcaaggccagcggctacgccggcgaggtggacctcctcgagtccatgggcgagggccacgtcttctactgcatggatccgcgctgcgagagagcgcgggagatgcaggcgcgcatcctcagcttcctccgcaagtgaagctcctccacgacgcgaaggcttcgccatgatggaataattctggcgctttgtgatgccgccattgttgagctcgagggctcctgtagcttgtcgctcgtcagttcaggcatcttttgtgccaattgacgatcttattcttcaagagttggaaatcatcgaacaaattggaaatttctattcgaatcatcaatcagttatcatataaaaaaaaaaaaaaaaaaaaaaggccacatgtgctcgagc

SEQ ID NO: 12060 - DNA, 1344 bp, Oryza sativa
  ref <308>: DATABASE ACCESSION NUMBER: AK109408
  ref <309>: DATABASE ENTRY DATE: 2002-08-28
gctgcggaattcctcgagcactgttggcctactggatatgcaaactacgagaagctatcgtagcaaatttctttctcccacagccatgtactcttcctcctccatgaaaccctcctccccttcacaagccaaccaagacgccgatgatgccaaaacctacaaggagctctaccagcgctgcaccgacttggtgtcgtcatggccgagccgccaaggcctttcttacctccagctcttccgccacgagaaaggatggtacaacggcgtcacgcctctcgtcgggacgatggtcgccgacgagctcttcgccgcgcgcccctcggacatcgtcgtccccaccctgcccaagtccggcacgacgtggatcaaggcgctgctctacgccacggtgcaccggagagagcatcccgccgacgccgccggcgaccaccccttcaactccctcggcccccacgaatgcgtcaaattcctcgagtaccatctctacagggcggacgaggcccccgacctcgacgcgctcccggacccgcggctgttcgcgacgcacgcgccgttcgacctcctgccgcgagccgtcgtcgccgccgcgccgccgtcgggctgcaaggtcgtctacgtgtgccgtgaccccaaggacaccctggtctccctcctgcagttcgtcaacgagtacaagtcccggaacgggagggagctcgtcgcagtggacgccgccgtgggcttcttctgcgacggcgtgtcgccgttcgggccgtactgggagcacgtcctcggctactggcgcgcgcaccgggagcgccccgagcgggtgctcttcctcaggtacgaggagatgaagcgggacccggcggggcacgtgcggaggctggcggagttcgccggggtccccttcacctcgccggaggaagacggcggcgcggtggacgccattgtcaggctgtgctcgttcgacaacatggtcggcctggaggcgaccaagggtggccgcacgtagctcacaaccacaaccgtgccgaacagcgcgttcttccggcgtggagaggttggagactgggcgaaccatctgtctccggagatggcgcaacgaatcgacgccatcaccgaggctaagtttgcaggttttggcctagcgcccagcctgatcgagctctagtaaaaagaagggggtgtattttcattagacgatgtgatggttagcggttgcccttctatatatgaatgaaattacggaagtaccatctatatctatatctatactaatatatatctatgaaattggaggagttgcccccctccaattctacaagccaaaaaaaaaaaaaaaaggccacatgtgctcgagct

SEQ ID NO: 12061 - DNA, 1203 bp, Oryza sativa
  ref <308>: DATABASE ACCESSION NUMBER: AK109409
  ref <309>: DATABASE ENTRY DATE: 2002-08-28
gctgcggaattcctcgagcactgttggcctactggaggacaaatcacggcactagacaccaccatcctcttaccttcccggtttcccggcgtgcgtcacacatggaggtggcagccgcggattcctccggcggcgaccgttacaggtctcaccttaccggcgacggcgagaagaacacggtgtggcggcacggcgctccacccacgtacgacgccgtgaacagcctcttcgaggccgagaggacccaggagtggccggcggggtcgctggaggagacggtgcagaacgcgatcaagacgtgggagatggagctgtcttacaaggccaagctcgaggacttcaagtcggtgagccccggtcggttccgtctctccgtgaacggcgggcggccgctcaccggggaggagacgctcgccgtgggcagctacaacgcgctgctcacgagcccgatcctgccgggcgccggcgcgtacgacgccgcggccgagacgttcgagtcctcccacgatctgttccgcgcggccttcccgcgcgggttcgcgtgggaggtgatccgcgtctactccggcccgccggtgatcacgttcaagttccggcactggggccacatggacggcccctacaagggccacgcccccaccggcgacaaggtcgagttctacggcgtcgccgtcctcaaggtggatgagcagctgcgggcggaggacgtggaggtgtactacgacccaggcgagctactggggggccttctcaaggggcccctgctggtgccgtccgcggaggaggaggacgcgcgtcagctcggcgagaggctcggcgaggcggctatcgtgtcggcgtcaggcgcggccccgcagtcgcaggcctgcccctttctcgcctccgcgaagcgggaggagtgaaagggaccgatcgagcggcgacgacatggtcgagccgaatagcgaaacgtgccccgttcatctgtcgtcgctgtaaccgcccggcgtttcgccatcatgatggaggtgacaccggctgaaaacgtttatttgctcgtgtgtagcgtgtgtgcttatggtgttgttaaatgctttgtacgattcggttggattttaaagctggcgtcacaacgcctgacttctttagttgctttagtgatactaatccacttatgtgggaagaaaaaaaaaaaaaaaaaaaaaaggccacatgtgctcgagc

SEQ ID NO: 12062 - DNA, 1252 bp, Oryza sativa
  ref <308>: DATABASE ACCESSION NUMBER: AK109410
  ref <309>: DATABASE ENTRY DATE: 2002-08-28
gctgcggaattcctcgagcactgttggcctactgggtgctcagtttcactcttatcagtgaattagatcatatacttgtgtccttgacagctcgttaattagcatggctaggtctctcgctgctctccttctccttctggtcgcagccgcgggagccagccatgccgcgtcgccggcggagatgtactggaagatcgcgctcccgacctcgccgatgcccggcgccattcgcgacctcatcagcccggcgagctcagcggcctcagcttcgaaggataaggaggatacggtgggctccgtgttcttcctcgagaaggacctcttcccgggctccaagatgacgctccacttcacccgcgccaccgccggcgccgcgctgctccctcgcggccgcgccgactccgtcccgttcgcctccgaaaagctcccggagatcctctcccagctctccatccccgccggctcgccgaccgccgacgccatgcggtccacgctcgccgtgtgcgaggccgcgcggatcgccagcgagacggcgcccaagcacaagcactactgcgccacgtcgctcgagtccatggtcgagctcgtcgcctccagcctcggcacccgcgacgtccacgccgtgtccacggaggtggtcaacagggccgggccgacgccgaggcaggcgtacagggtggaggccgtgaggcccgtgccggtgcccgggggcgacatggtggcatgccacaggatgccctacgcgtacgccgtgttcggggtgcacgggatcaagggcgcggcgtacacggtgacgctggccggcgccgacgggaccatggcggaggcggtggcggcgtgccacggggacgtggacgggcacggcgtggcggtggcggaggcgtacaagaggctcggcgtggcgcccgggaaggtggcagtctgccacttcctgcctcaggacgacatgctctgggtgcgcaactgaatgaagcagctacctgcgcgccatccatggctaattaagctccttcctatattttcgatctacctgccggctggctatcatgttatcatcgcgtgtgtgtgcgcgccgatccgacatgcccacactacacgtcgacactacacgtgttttattttgttaattaataagtctggacaaccaggtcatcttgtacggcacttctcccctctgtcccgaaataaaccaacttataaagattgaagtttgtcgcaaaaaaaaaaaaaaaaaggccacatgtgctcgagc

SEQ ID NO: 12063 - DNA, 1186 bp, Oryza sativa
  ref <308>: DATABASE ACCESSION NUMBER: AK109411
  ref <309>: DATABASE ENTRY DATE: 2002-08-28
gctgcggaattcctcgagcactgttggcctactggatcgcagcggcgatttctcatctgaattgcaggccaattccagttgagtttctccacagaccacagatatggcttccggcaggatagctctgctctgccttcttggcttgctgctggtagcagcctcaccggctgccattgctgccaaagatgacaaaatcttctaccagattactttcatgtggccgggagcgtactgcgcgcagacgaaggccggatgctgcatgccgaagaccgacgtcgcgccggcgtccgacttctacgtcgccggcttcacggtctacaacgccaccaccaactcttccctgtccagctgcagcaacactccattcgacatgaaccaaattggggatgtcacgaggctgatgcagtactggaacaacatcaggtgccccagcaagagcggccagaagggctggaagaacgcgtgggagacgtccggcgtctgctccgacctcaccgagagcgcctactttgacaccgccctcgccctccgcgacaagatcaaccccctttctcgcctcgtcagcaacggtattaagccggactttgggctgtacagcgtgaagaagatcaaggaggtgatcgaggaggggatcggcgcgccggcgctgatccagtgcagcaagggcccgttcaacaagttccagctataccagatatacgtctgcgtcgcggaggacgccaagacgttcgtggagtgccccagcccgaggaagccgtacacctgcggcgacgacatcctcttccaccctttcaagaagtggatgctcaagaccaactccaccaaatcctacgccgccgccgacgccatcgaccagctgctcgaagcggtcatggaaatctgagctcgatcgatcgatcgatcaagaagacaaattaacccttgttgtgatatgcgatttgtgcgtgtgtgttgtctgtttcgatcgtgatgttttctgcgtgtttatttcgtgatgttctctcatcgcgcccgcgcgcggttgggtacgatccgggacacctacgtagcactgaatccgtctctgtgatgcattcagagaataagtccgaatatgtgcggccttgttaatgttttcatgaataactcgtgtagtgggattactttgtcaaaaaaaaaaaaaaaaggccacatgtgctcgagctgc

SEQ ID NO: 12064 - DNA, 1182 bp, Oryza sativa
  ref <308>: DATABASE ACCESSION NUMBER: AK109412
  ref <309>: DATABASE ENTRY DATE: 2002-08-28
gctgcggaattcctcgagcactgttggcctactggttttcccagtttgtgctctctcctctcctcactccgccttatccccaaaaccctatcgatcccatcccctttcctcctcacccatggcggccacgctcttctccaccgccctctccccgcacctcctccccctcccctccacctcctccaaccccgcctcatcctccctctccttcctctccaagccgctgctccccgccctcgccgtcgcgggatggccgcggaggaggaccagccccttcgtgccggtggccgtggccgtgtcggaggaggtcgagacggaggaggacgaggaggaggaggaggagggctccgggggcgaggagttctccgacgacctgagggtcttcgtcggcaacctgcccttcagcgtcgacagcgcccagctcgccggcctcttcgagcaggccggctccgtcgagatggtcgaggtcatctatgataagctgactggaaggagtcgtgggtttgggtttgtgacaatgtctagtgttgaagaagttgaggcagctgtcgagcaattcaatggctatatacttgatgggagatctttgagggttaactcagggccaccaccaccaagggagcaatcatcgcagagagcacccaggggtgaggccaacagggtctatgtaggtaacctttcttggggtgttgacaatgcagctctcgcaaacctattcagtggggaaggggaggtcttggaagccaaggtcatctatgacagggagagtggcaggtcaaggggatttggttttgtcacgtatggttccgctgaagaggttgagaatgcagtttcaaatcttgatggcgctgacatggatggcagacagatccgagttacagtagcagaatcgaaaccacctaggagacaatattgaaattcgtttagatgccctgaagcctatggttagtccagatatgaatcatactatcgtcatgattgttctatagcatcgatggaattctagtcgtaacttccaccatatggttcaaaagattggtttggtgatgagatatatatcattttgttttaactttttgaacccacttttttttgttatgtatggcttgttccttgaattatagagtaaagtgcacggccggtctctaaaaaaaaaaaaaaaaaggccacatgtgctcgagc

SEQ ID NO: 12065 - DNA, 1201 bp, Oryza sativa
  ref <308>: DATABASE ACCESSION NUMBER: AK109413
  ref <309>: DATABASE ENTRY DATE: 2002-08-28
gctgcggaattcctcgagcactgttggcctactgggtgcacagctcttgttctccattaatccagccgtgcgtgcagttgaggtccacctgctgctgctctctgtctgctcccatcgaacaaatcaagaaccaccctctccactctccaatccaatctcgaataggaagaaggatgcttggttttgcgccggcaccaggccggccgctcttcgtgctcttcggttcctccatcgtccagttcagcttcagcaatggcggatggggcgctgcccttgcagacatctacgctcgcaaggctgatatccttctcagagggtatattggttggaactcaaggcgcgcccttcaagtcattgacaaaatttttcccaaggattcgcccgtgcaaccttctttggtaatagtttactttggtggcaatgattcggttgctgcccattcatccggccttggacctcatgtgccactagaggagtacatagacaacatgagaaagatcgcagaccacctgaagagcttgtctgagaagacccgtgtcatcttcctcagctgcccaccacttaacgaggagacgctccgaaaatcaaccagcactgtcctgagtgagatagtgcggacaaacgaaacttgccgcctatactccgaagcctgtgtatctctatgcaaagagatggacctgaaggtggttgatctttggaatgctatgcagaaacgggacgactgggcgacggcctgcttcacggatgggcttcatctgtctgaagaagggagcaagattgttgtggaagagatcctgaggatcctcaaggaggcagagtgggatccatgcctgcactggaaggcgatgccgacagagtttggggaggactcaccctatgatctcgtctcctccagcggccaatccaccgtcaacccctccgactggaccttccacaggactatccaatgggactgaccttccattcgtctcaatctcagtatctcatgatggagcatatacatgcatgctccaacgtgcaacattacatgcatgattcataattaagatccccttcggtcttactatatatgtaggggtctaatgctagctgatgacgaggggtcatggattaggcttcagctcgatcgagctgaaaaaaaatcagatttaggatgaaaaaaaaaaaaaaaaaaaaaaaaaacaaaaaggccacatgtgct

SEQ ID NO: 12066 - DNA, 1259 bp, Oryza sativa
  ref <308>: DATABASE ACCESSION NUMBER: AK109414
  ref <309>: DATABASE ENTRY DATE: 2002-08-28
gctgcggaattcctcgagcactgttggcctactggattgtcctcctctccactacactacactgtgcacttctgcaggttgcaatggccaccatcccggaggtgccggcgagcgagcttatccagaccatgccgcgcgtcggcatgggcacggcggcgttccccttcacctcctcggaggacaccaccgccgccatgctccgcgccatcgagctcggctaccgccacttcgacacggccaggatttacgccaccgagggctgcgtcggcgaggcagtcgcggaggccgtccggcgtggcctcatcgcctcccgcgccgacgtgttcgtcacctccaagatctggtgcagcgacctgcacgccggccgcgtcgtgccggcggcgagggagacgctccgcaacctcgggatggactacgtcgacctgctccttgtccactggccggtgagcctcacgccgggcaactacgacttcccgttccccaaggaggtgatcctgccgtcgttcgacatggagggcgtgtggcgcggcatggaggagtgccaccgcctgggcctcgcgcgcgccatcggcgtcagcaacttctccgccaagaagctggagcagctgctgtcgctcgccgccgtgcggccggcggtgaaccaggtggaggtgaacccgatgtggcagcagaggacgctgcgggaggtgtgccggcgggagggggtgcagctgtgcgggtactcgccgctgggggcgaagggcacgccgtggggcagcgccgccgtgatggactccggcgtcctgcaggagatcgccggagccaagggcaagacgcttgctcagatttgtttgaggtggttgtacgagcaaggtgatgttttattggtgaagacatataatgagaagagaatgaaggaaaatctggacattttcaactgggagctcacagatgaagagagggagaggatcagtcagctgccccaactgaggggcctgcctggattggaattcatctctgaccatgggccttacaaatcagttgaagatttgtgggatggtgacgtctagcaagctacttagatacagtggagtatatatctaaataatcatgatggatcatgatgtggatctatcttaattatgtgcggcaggcatgggcacggcaccattcccgtacacgttctgcgatcaattaatgtatggaccatacatgtatattaattgctgtatacctaaaaaaaaaaaaaaaaaaaaaaaaaaggccacatgtgctcgagc

SEQ ID NO: 12067 - DNA, 1186 bp, Oryza sativa
  ref <308>: DATABASE ACCESSION NUMBER: AK109415
  ref <309>: DATABASE ENTRY DATE: 2002-08-28
gctgcggaattcctcgagcactgttggcctactgggtgctcagtttcactcttatcagtgaattagatcatatacttgtgtccttgatagctcgttaattagcatggctaggtcactcgctgctgtcctactccttttggtcgccgccgcgggagccagccatgccgcgtcgccggcggagatgtactggaagatcgcgctcccgacctcgccgatgcccggcgccattcgcgacctcatcagcccagcgagctcagtgggctcagcttcgaaggaggacacggtgggcaacgtgttcttcctcgagaaggacctcttcccgggctccaagatgacgctccacttcacccgcgccaccgccggcgccgcgctgctcccccgcggccgcgccgagtccgtcccgttcgcctccgaaaggctcccggagatcctctcccagctctccatcccggccgtctcgccgaccgccgacgccatgtggtccacgctcgccgagtgcgaggccgcgcggctcgccggcgagacgaccaagcacaagcactactgcgccacgtcgctcgagtccatggtcgagttcgtcgcgtccagcctcggcacccgcgacgtccacgccgtgtccacggaggtgatcagcacgttgacgccgacgccgaggcaggcgtacagggtggaggccgtgaggcccgtggcggtgcccggcggcgacatggtggcatgccacgggatgccgtacgcgtacgccgtgttcgggttgcacgggctcaagggcgcaggcggtggccgcgtgccacggggacgtggacgggcacggcgcggtggcggaggcatacaagaggctcggcgtggcgcccgggagcgtggccatctgccacttcctgcctcaggacgacatgatctgggtgcgcaactgaattaatgaagcagctaccttgcgcgccatccatggctaattattttagacatgctccttcctatattttggatctacctgccggctatcatgttatcataaatttacgcgtgtgcgcgcgacgatccgacatgcccacactaacgtgttttactttgttaattaataagtctgcatacccaggtcatcttgtacggtgctactccctctatcccgaaataaaacaactatagagattgaaaaaaaaaaaaaaaaaaaggccacatgtgctcgagc

SEQ ID NO: 12068 - DNA, 1694 bp, Oryza sativa
  ref <308>: DATABASE ACCESSION NUMBER: AK109416
  ref <309>: DATABASE ENTRY DATE: 2002-08-28
gctgcggaattcctcgagcactgttggcctactggactctgcaatttgctccccgcctcgcaagcagcacttcccctcccccttcccagcacccatgaagtttgccgccatcctcgcgctcgccgcggtcgccgtctcgagcgtctcgggcgccaccgtccacccggccgtgcaccgcacgctccgcagccagggcgccgtcaacatctttgtcacgcttcgtgccggcacggacacggtcgtgaacgccgtgcagaaggccaacatcgccgaccgcggcaagaagatcacggagctcgtgacggcgctcgagaagaacgccgacacgacgcagacagaggtggcgtccgtgctcgtgcaggaggcggcgtcggcgtcgttcacgcgcgtcgagcgcttctggttgactaaccagatctacattgagggcgcgacgattgatctcgtgctcaagctgtcgggtctgccgtcggtgtcggagatcacggaggaagagatcatcacattggatccgatctcgtccacggccgccaacacgacgggcgatgcgtcgattctcgcgaacgagtacggcgtgacgaagatccgcgcgccggaggtgtgggccaagggctacacgggcaagggtgtcgtggtgggcacgattgactctggtgtgctcggcacgcacacggcgctgagcggcaacttccgcagcgcgttcagctggtacgaccccgaatccaagcgcgcggcgccgtacgacaacaacggccacggtacgcacaccatgggtaccatcgcgggtgccggtggcattggcgttgctccggacgcgacgtggatcgcgtgcaagggctgccgcagctccaactgcccgcaagcggatctgctggcgtgcttccagttcatgacgtgcccgacaaacccggccggcacgaccaaggactgcacgcaggcgccgcgcctggtgagcaactcgtggggcggtggccagggcagcactgtgtacaacagcgcgatcaacgcgtggcgcacggccggcatcatcccgatcttcgccaacggcaactcgggtccgtcgtgccgcacggccaactcgcctggtgacaacgccaatgtcattgccgttggtgcgaccgacagctcggacaagctggcgtcgttcagcagcaagggtccgtcgacgagcggtctcgtgaagcctgaggtgtctgctcccggtgtgagcgttcgctcggcgtggaacacgggcacgtcggcgttcaactcgatctcgggcacgtcgatggcgacgccgcacgttgctggcgccgtcgcgctgctgctgagctacaagcccaacctcacgttcgcgcagatccgcacggcgctgacgacgacagctgcgcgcaacctgccggccagtggctcgacgtgcggcagcacggccgacagcgtgtcgcctaacaaccagtacggctacggacgcatcgacgtgctcgcggccttcaacagcctctaagcaatgttggctttgtctctctctacctccacggccttcttgccgtggaacgtttcctgctcaagactgacgattgccaagggccaaacacgctcttggttggaagcgtttccgtcgtgttaccattattagcgtacttgcaacagaatttggtgttattccctgtttttcaaaaaaaaaaaaaaaaaaaaaaggccacatgtgctcgagc

SEQ ID NO: 12069 - DNA, 1065 bp, Oryza sativa
  ref <308>: DATABASE ACCESSION NUMBER: AK109417
  ref <309>: DATABASE ENTRY DATE: 2002-08-28
gctgcggaattcctcgagcactgttggcctactgatatatatcttcctcgactccgacaagaatagggttccaccgccgccgccgccgctcgccggagagagagagatgaagagcttcccggttgccggaggccgcagcgtctccctcggcctcttctccgacgtctccaacagctgggagctcctcgagctgatgcagtcagggaagctggagccggaggtcgcattcctcaacgcatcactggtgccggatgtgttcccggttctcgcggcggcgcacaaggcggtggtgtcgcaggggagggagtctctgaccacaagaactctgcattcggagctcgtctataactactccgggtctaagcatataacggagtctttgaaacgatgcggaatctccgacgacacgagttatatccttgcagctcgttttgatgcttcgaatgaggagataaaagctgtggagaagctcatctgtggcactgagattgatctagcggaactggaaacaagagcaaaccagccacagatcctgaagcattataaaataactccccaggaactatcaatatctacactgcccgatgcaattgtatgcaggattgctgctcgagatgccctttgagtgacatcacggatcaagattgaaatctgggaggcctggtggttttttgcacatgatgatgtggtaccggtatgtttgttactgtatgatgatggttgctagtactactggactactggtgccttgggttcacgtgctgctgggacagcgttgcagctgtcgtttctgtccaagagaaaaacatggacagagaagctggtaacctgcccgccattgcagctgttactgcaaattccagttcaatgtttcttttgcatgatccatcaatctatcatgcatgtaatttgaaattcaagaaccccactggttttgttttttgtttttttggccaaaacactctgctgtgttctgtttgtttttggagtctgtatgatggtatctgtcagtatcattatcttgctcatcaaaaaaaaaaaaaaaaggccacatgtgctcgagct

SEQ ID NO: 12070 - DNA, 1259 bp, Oryza sativa
  ref <308>: DATABASE ACCESSION NUMBER: AK109418
  ref <309>: DATABASE ENTRY DATE: 2002-08-28
gctgcggaattcctcgagcactgttggcctactgggtgctcagtttcactcttatcagtgaattagatcatatacttgtgtccttgacagctcgttaattagcatggctaggtctctcgctgctctccttctccttctggtcgcagccgcgggagccagccatgccgcgtcgccggcggagatgtactggaagatcgcgctcccgacctcgccgatgcccggcgccattcgcgacctcatcagcccggcgagctcagcggcctcagcttcgaaggataaggaggatacggtgggctccgtgttcttcctcgagaaggacctcttcccgggctccaagatgacgctccacttcacccgcgccaccgccggcgccgcgctgctccctcgcggccgcgccgactccgtcccgttcgcctccgaaaagctcccggagatcctctcccagctctccatccccgccggctcgccgaccgccgacgccatgcggtccacgctcgccgtgtgcgaggccgcgcggatcgccagcgagacggcgcccaagcacaagcactactgcgccacgtcgctcgagtccatggtcgagctcgtcgcctccagcctcggcacccgcgacgtccacgccgtgtccacggaggtggtcaacagggccgggccgacgccgaggcaggcgtacagggtggaggccgtgaggcccgtgccggtgcccgggggcgacatggtggcatgccacaggatgccctacgcgtacgccgtgttcggggtgcacgggatcaagggcgcggcgtacacggtgacgctggccggcgccgacgggaccatggcggaggcggtggcggcgtgccacggggacgtggacgggcacggcgtggcggtggcggaggcgtacaagaggctcggcgtggcgcccgggaaggtggcagtctgccacttcctgcctcaggacgacatgctctgggtgcgcaactgaatgaagcagctacctgcgcgccatccatggctaattaagctccttcctatattttcgatctacctgccggctggctatcatgttatcatcgcgtgtgtgtgcgcgccgatccgacatgcccacactacacgtcgacactacacgtgttttattttgttaattaataagtctggacaaccaggtcatcttgtacggcacttctcccctctgtcccgaaataaaccaacttataaagattgaagtttgtcgcaaaaaaaaaaaaaaaaaaaaaaaaggccacatgtgctcgagc

SEQ ID NO: 12071 - DNA, 1196 bp, Oryza sativa
  ref <308>: DATABASE ACCESSION NUMBER: AK109419
  ref <309>: DATABASE ENTRY DATE: 2002-08-28
gctgcggaattcctcgagcactgttggcctactgggtgctcagtttcactcttatcagtgaattagatcatatacttgtgtccttgacagctcgttaattagcatggctaggtctctcgctgctctccttctccttctggtcgcagccgcgggagccagccatgccgcgtcgccggcggagatgtactggaagatcgcgctcccgacctcgccgatgcccggcgccattcgcgacctcatcagcccggcgagctcagcggcctcagcttcgaaggataaggaggatacggtgggctccgtgttcttcctcgagaaggacctcttcccgggctccaagatgacgctccacttcacccgcgccaccgccggcgccgcgctgctccctcgcggccgcgccgactccgtcccgttcgcctccgaaaagctcccggagatcctctcccagctctccatccccgccggctcgccgaccgccgacgccatgcggtccacgctcgccgtgtgcgaggccgcgcggatcgccagcgagacggcgcccaagcacaagcactactgcgccacgtcgctcgagtccatggtcgagctcgtcgcctccagcctcggcacccgcgacgtccacgccgtgtccacggaggtggtcaacagggccgggccgacgccgaggcaggcgtacagggtggaggccgtgaggcccgtgccggtgcccgggggcgacatggtggcatgccacaggatgccctacgcgtacgccgtgttcggggtgcacgggatcaagggcgcggcgtacacggtgacgctggccggcgccgacgggaccatggcggaggcggtggcggcgtgccacggggacgtggacgggcacggcgtggcggtggcggaggcgtacaagaggctcggcgtggcgcccgggaaggtggcagtctgccacttcctgcctcaggacgacatgctctgggtgcgcaactgaatgaagcagctacctgcgcgccatccatggctaattaagctccttcctatattttcgatctacctgccggctggctatcatgttatcatcgcgtgtgtgtgcgcgccgatccgacatgcccacactacacgtcgacactacacgtgttttattttgttaattaataagtctggacaaccaggtcatcttgtaaaaaaaaaaaaaaaaaaaaggccacatgtgctcgagc

SEQ ID NO: 12072 - DNA, 1757 bp, Oryza sativa
  ref <308>: DATABASE ACCESSION NUMBER: AK109420
  ref <309>: DATABASE ENTRY DATE: 2002-08-28
gctgcggaattcctcgagcactgttggcctactggacagcgttctgtcttaccagaacacgcttctctttcgagccacactcctaagaagactccaaggatagctccaatggaggtgaagtgcttgctgctcctggctctcttccttctgctaggaacacatggtggtgaagcgcagccgctcgtgccggccgtcatgacgttcggtgactcatcggtggacgtaggtaacaatgactacctcaaaaccatcatcaaggcaaacttccctccctacggaagggacttcaagaaccaggtacccacggggaggttctgcaacggcaagctggctactgatatcactgccgagacgttggggtttgaaagctacgcacctgcgtatctcagcccagatgcgtcagggaagaaccttctgattggagccaactttgcatctgcaggatctggctactatgaccacactgcacttctgtatcatgctattcctttgtcccaacaattggagtacttcaaggagtaccaatctaagctggcagccgtggccggaagcagccaggcccagtcaatcatcaacggctcattgtacatcatcagcgccggtgccagcgatttcgtccagaattactacatcaatcctttcctctacaagacccagaccgccgaccagttctccgaccgcctcgtcggcatcttcaaaaacaccgtggcacaactgtacagcatgggagcacggcgcatcggcgtgacgtcgctgccgccgttgggctgcctaccggcggcgatcacgctgttcggctacggcagcagcgggtgcgtctcgaggctcaacagcgacgcccagaacttcaacggcaagatgaacgtcaccgtcgactcgctttcgaagacctactccgacctcaagatcgccgtgttcgacatctacacgcccctctacgacctcgtcacctctcctcaatcccaaggattcacggaggcgaggaggggatgctgcgggacagggacggtggagacgacggtgcttctgtgcaaccccaagtcgatcggcacctgcccgaacgcgacgacgtacgtgttctgggacgccgtccacccgtcggaggcggcgaaccaggtgctcgccgactccctcctcgccgagggcatcaacctggtcacataaattccggtggctttcagccagcagagggctgcattgtagatcgatgacaagaacaacacaggcttcaaactcgacctgtttgattataaatgagaataatgataataatgtttgctcggtggtttggcaaaaaaaaaaaaaaaaaaaaaaggccacatgtgctcgagctgcaggtcgcggccgctagactagtctagagaaaaaacctcccagatctccccctgaacctgaaacataaaatgaatgcaattgttgtagttaactggttatggcagcttataatgcttacaataaggcattagctcaaaatttccaaataagcatattttcacggcatcaaattggttggcaactctcaagattctacaggcggatcccggacgagcgaaaatcctcccgaccgcaaaacgtgacagcaaaagagggacggaagccccagggacagattacacagggtgcgaaacttaagccaagcacaaaaaatggaaagccccaaaaaggatggacacagaatcccgcctctaagaacaaattgtgttccttcttttctccccgaatgagagaaacaactaacccacagagcgaaaggaaac

SEQ ID NO: 12073 - DNA, 1473 bp, Oryza sativa
  ref <308>: DATABASE ACCESSION NUMBER: AK109421
  ref <309>: DATABASE ENTRY DATE: 2002-08-28
gctgcggaattcctcgagcactgttggcctactggaagctgccactcaaaatgagaccaattatctgaatttgcatctctctctctctcccttgattttacacaattccccaagtcaagatccgtctcttctgctgctttgctttatatacaccccattagtccactccaccaccccatagtatattctctcctcacttaaactaatcatctctctctctctctccccctccaaattgtcaatctcatttctgaactcatgttcaggtttgaccttgcaaaatagcagtagctactattcatccaggaataggagttgcaggggaggcatgaggctgattgggagaggaaagagttccaaggccaagaagggctcttcaactccattgcaatccaaggagaagattgctgcaaatgtggagactgttgctgttggttccaacaacaggcaagtggcacctgatgataacatgcccctgggagaagctggctatgctagcagcagagatgaggttttctttgaagcttgcccttggttagagtctgactgcgaggatgaattctacagtatcaatggagatggcacccctgcaagatcattcagaacgaactccagcaaccatgcgatacaacctgaacctcgcaagctgcccacactgggtgccatcctgaaggccgagccgctgaggccgccaccaccaccgcaggagacgcagccaacgccgccgtcgccggcgacgacaatgcgactcgccgacctcctccgggagaggcaagaatcgttcacctgctacgacggccctgcctgcgccatctcccggacgggctcctcctgcggcgccggcaacggcgagcagtggagccattgctgcattccgagcttcgtcccgcgtaccagtgtgagctacgcgaaggggaggaggaagcgcaggtgaagaagcgatcgatcgagagagtgtgcaaagaaatcaagtggtttttgggatgataattgttcagaatgtgcagtgtctcagagagagtccacctgcttgtgtattgtaacaacaactacagtacaacgacgttaattagccgcccaaatcaaatgtatatatgtgatgtgacagtgagatacctaccaaaatactccaaataggaaagaccacctcttgggtgcgatgtcaggcaatcaggcatgatgatctcgatgctgctgttgggcttagtatgcactgggatcgatttggtgtcacatggcatggacaggggtaagaatgtcccaaagtaagatgagtgattttatgatcctcgaggagaacctaagaggcatatcacattttctatttctagtctaaaatttggatccttgtatgtattagaagttaccgaaattcactttggaaatttcggtacctcttggtacctcatgaaattccctctgagatgtggagttgccaaaaaaaaaaaaaaaaaaggccacatgtgctcgagc

SEQ ID NO: 12074 - DNA, 1176 bp, Oryza sativa
  ref <308>: DATABASE ACCESSION NUMBER: AK109422
  ref <309>: DATABASE ENTRY DATE: 2002-08-28
gctgcggaattcctcgagcactgttggcctactggccaaaccaaatccaccaaaacccagccgccatcgcccccttcctcgccaccgccatccactctaccaccgatctcctcacccaccaccatcgacggcgactacctccaccgttgcaatgtcccaccgtgactcctccattggctcatccactgccaccgcgtcgtccaccaccggcggtggcctctcctccctgttccccaacctcgacgtccccctctcttcccctcaatccaccgatccacgccgccacagcccccctcttttcccctctctccatcgctctcgctccccctcaacagccgccgcatctttgtcaggacagcgacactcgctgccctccgctcactcttgtccgggccgcccccgttcttcgcctgcgcgcccgcctctgcgccgccagatcaccatcgtccggagtcgccggggccgttgtcctcacctgccaagccgatctcctacgcgttgccggtgggatttgcaacagggatggcgtcgtgccctgctcgtctctccacagcagtcggcgccgatcccctgcctctcccacgccttgcgttggcctggcaccaccccctcgcctctgcatcgccttgcatcgggctgctcctccgtcggcagatcccaacgccgacatatcaaggactccgcctcgctgccgtcaaggtggtggaggtggttgcctccggagtccctgtgatgacggcaacgcagctcggccacgttgattgcttggatgcggctcagcaaatgcctggcgggtagcgattgttgcgctcaggttttctttctttgttgctaatactgggtccttatttctttctttgcttactaacttctggatccctatatcttctgacttttttttttgcagcagtcgagcctttgggctgccttcctcttccccatttttctttactagtgagcgtgcacgtgcaaggcacgtcatcacgtcgatacctattgaatggaatcaaattagaaggagactgctgagtcttgatactaataaacatatacttactcaaaaaaaaaaaaggccacatgtgctcgagctgcaggtcgcggccgctagactagtctagagaaaaaacctcccacacctcccctgaacctgaaacataaaatgaagcaatgtgtgtt

SEQ ID NO: 12075 - DNA, 1654 bp, Oryza sativa
  ref <308>: DATABASE ACCESSION NUMBER: AK109423
  ref <309>: DATABASE ENTRY DATE: 2002-08-28
gctgcggaattcctcgagcactgttggcctactggtcatgctcgtcgcgctggaggccggggggctcttccgcggcctcctcctgctgctgctctaccccgtgctgctcctgctcggccatgaccgggccaccaagctcatggtcatggtcagcttcgccggagtcaggaaggagaaggacgggtcgccgtccttccgggtgggcagggcggtgatgcccaagctgttcctggaggacgtcagcgccgaggtgttcgatgcggcggcgcggcggcggcggctggtgtgcgtgagctccatgccgagggagatggtggagccgttcttgaaggagtacctcgccgtcgacgccgtcgtggcgccggagctgagggcgttcagggggtattaccttggcctcgcggagtccgacggcgaggtcatgcagaggctggacatggaggaggtgatcgggatgaaggagcgcggcggcgccggcgacggtgacggtgatggacaggtcaccgtcgtcggcatcgccggactcgggaactcgttccatcagctcttccaaaactattgcaaggaggtgtacgtggcgtcggagtgggcgcggcggcgatggcgtcccctccatccccggcgatacgcgaagcccctcatcttccacgacggccgcgtcgcgttccggccgacgacgtcggcgacgctggccatgttcgtgtggctgccgctggccgtgcccctcgccctcctccgcgtcgccctcatcgtcgtcgtcctccccttctccctcgccgccccgatcgccgccgccctcggcatccactgccgctgcatcgccgcctccacgctgcgggccgccgcggtcttggacctcttcgtctgcaaccaccgctccctcctcgacccgctctatgtctccgccgtcgccggccgcgccgacctcgccgccgccacctacagcatcagccgcctctccgagatcctcgccccgatccgcaccttccgcctcacccgcgaccgcgccgccgaccgcgccgccatgcaggcccacctctcccgctcccggcgcggcggcggcggcggcggcctggtggtgtgcccggaggggaccacctgccgcgagccgttcctgctgcgcttcagcccgctcttcacggagctcggcgccgacgtgcagcccgtggcgctgcactcggaggtggccatgttccatggcaccacggccggggggtggaagatgctcgaccccttcttcctcctcatgaacccctcgccggcctacgtcgtgcacttcctcgaccccgtcgccggcggcggcggcggcccggaggtggccaacgaggtgcagcgccggatcgcggagacgctggggtacacctgcacggcgctcacgcggagggacaagtacctcgtgctcgccggcaacgatggcgtcgtcgccaacaacaacaagagcaattaatttactaatcaactactctactgtctactactgttgtgtactccactacgtggcttgtaattagcatccttaatcccgcagttaattaaggggaagtgtaagacacactggttgtactcatccaaatgctcatatcaagttataatgaactgcgaaattcgattgctgcttcaaaaaaaaaaaaaaaaaggccacatgtgctcgagc

SEQ ID NO: 12076 - DNA, 1494 bp, Oryza sativa
  ref <308>: DATABASE ACCESSION NUMBER: AK109424
  ref <309>: DATABASE ENTRY DATE: 2002-08-28
gctgcggaattcctcgagcactgttggcctactggatatcgatagaaaggcgccgcgcgtgctcctcctcctcctcctccgattccaatccaatccaatccgattcagaagtagagcgagcggcggctgcggcgatggcggtggcggcggtgcgggcggcggcggcggacgcggcggtgacgttcctgtgggtgctgtgcgtgtcgacgctgggggcgtcgacggcggcggtgacgtcgtacctccgcatccacgaggggatccactacgcgctcctcgtcaccgtctccctcctctccgtgctcctcttcgccttcaacctcctctgcgacgccctcggcggcgccagcttcaaccccaccgccctcgccgccttccacgccgccggcctctcctccccccgccactcctccctcttccccctcgccctccgcttccccgcccaggccgcgggtgcggtgggtggggcgatggcgatctcggagctgatgccggagcagtacaagcacatgctcggggggccatcgctcaaggtggatctccacacgggtgccgccgccgagctggtgctcaccttcgtcatcaccttggccgtgctctggatcatcgtcaaggggccccgtaatcccatcgtcaagacctggatgctctccatctccaccgtttgcctcgtcctcaccggcgctgcctacactggcccatccatgaaccctgccaatgcgtttggctgggcatatgtgaacaatcgccacaacacatgggagcaattctacgtctactggatatgcccttttgttggcgctgttcttgctgcctgggtcttcagggccgtgttcccaccaccggcacctaaacctaaggccaagaaagcatgaggaaatcaagcacaaacttcaactcaggagttggtacagatgttgggtttgaagaacccaacattatttattagctagaatggtacaaggaataatcctttccaccatatttaattcaaagtaatttaggtaattagcttcggaacactgacaaacccaagagcatgcacattaatttgattggacgacctgaatgtaatttcaatcattcattggtcttgtttgctcttgaactggtggatggtatgaatggatattataaatttatcagtaaaaaaaaaaaaaaaaaaaaggccacatgtgctcgagctgcaggtcgcggccgctagactagtctagagaaaaaacctcccacacctccccctgaaactgaaacataaaatgagtgcgattgttgttgttaacttgtttattgccgcttatactggttacaagtaacgcagtagcctctcatatttcaccacttaagccttttttcactgcgttctagtttggtttgcccacccctcgggtttctttctgtctgcgcccccggtccccgcccacactccccccccccccccacgatctctcccgccctctgcggcgggcgatccctcccccgcggggtcgggtccgc

SEQ ID NO: 12077 - DNA, 1090 bp, Oryza sativa
  ref <308>: DATABASE ACCESSION NUMBER: AK109425
  ref <309>: DATABASE ENTRY DATE: 2002-08-28
gctgcggaattcctcgagcactgttggcctactggatcttcttcttgttcttgtactaactactcctaactcccaccacctccgcctccgcgtcgccccgccgcgcgcctcctccccgcctcgccgccggcgcgcacctcctcgcggatcgcgatgcacaagacggcgcaggcctggttcaccggcggccccgccgcccccgccgcctccgccggcgagtcgcagccgtccctcctcgccgactggaactcctacgccgcctcccgccccgacgcctcctcctcctcccctctccctttcgacatcgaggccgccgtccgctccgccaacgacaccgtctccggcaccttcagcgtggtgaccaagggcgtgcgggagctgccggggagcttccagagcgcgacgagcagcttcccgtcggggaaggcgctcatgtacttcggactcttcctcgccaccggcatcttcttcgtcttcatcgcgttcgcgctcttcctccccgtcatggtgatcatgccgcagaagttcgccatctgcttcacgctcggctgcgggctcatcatcgcatccatcttcgcgctcaaaggacccgccagccagttcgcccacatgacctccatggagaggctaccatttacaggggcacttattggatgcatggttggtaccatttatgtgtcaatgtttcttcacagctatttcctctcagtgatattctctgtccttcaggttctatctcttgcttactacaccatatcctactttcctgggggttccagtggattgaaatttatctcctcgagtctcttgtcatcagtaacgagctgttttggccggtaacctgagtaggatgacaactacttgatcatatatccttcatttttcttgcaatatttttgtatgtagcactgatcaacgatagagagattgtgacacccctcctactcatgcttgttgctgtttagactaagatcaatacggggtgaaaaggtttgtcgtacttatgtatctgaaggtcatattgtggaaataaagctgtcctttccttgtgtaaaaaaaaaaaaaaaaaaaaggccacatgtgctcgagc

SEQ ID NO: 12078 - DNA, 1091 bp, Oryza sativa
  ref <308>: DATABASE ACCESSION NUMBER: AK109426
  ref <309>: DATABASE ENTRY DATE: 2002-08-28
gctgcggaattcctcgagcactgttggcctactggcgcaatatcgcatcgacgcctcgtccctcctaggcctagctagtctactccgaccaagttgtcgccgagaagcgaggagcgccggcgatggaggtgaagtgccgtcggctggaggggaaggtagccgtcgtgacggcctccacgcagggcatcggtctcgccatcgccgagcgcctcggcctcgagggcgccgccgtcgtcatctcctcccgcaagaagaagaacgtcgacgaggcggtcgtgggcctcagggcgaaggggatcaccgtcgtcggggtggtctgccatgtctccatcccggagcagcgcaagaacctcatcgacacggcggtcaagaattttgggcatatcgacatagttgtctccaatgctgctgccaatccttccgtagataacatattagaaatgaaagagcctatccttgacaaactatgggatattaatgttaaggcatctattcttcttcttcaggatgctgctgcatatttgcggaagggatcatccgtgatattgatttcttcaattactggctataatccagaaccagcattgtcgatgtatgctgttacaaaaactgccctgcttggtctcacaaaggctcttgctgctgagatggggccaaatactcgtgttaactgtatagcccctggttttgttcctacaaattttgctcgtttcctcacaactaatgacaccattaaaaatgagcttattgacaggagcacacttaagagattgggtactgtggaagacatggctgcagccgcagctttcttggcatcagacgatgcatcattcattacagctgaaactattgttgttgctggaggaactcgatctaggctgtagatctaagctgggcttggctatggtttgacaggctggcgacttacaaagtgcacttcttgctggtaaataacctatagttcttgctataggcaatataatactatatgtacaaggaccgatgttaaactgcttaaatcgtgaccggaacttttttcgttgctttgaaaaaaaaaaaaaaaaaaaaaaaaaggccacatgtgctcgagc

SEQ ID NO: 12079 - DNA, 1123 bp, Oryza sativa
  ref <308>: DATABASE ACCESSION NUMBER: AK109427
  ref <309>: DATABASE ENTRY DATE: 2002-08-28
gctgcggaattcctcgagcactgttggcctactgggtgctcagttcactcttatcagtgaattagaacatatacttgtttccttgacagctcgttatttagcatggctaggtcactcgctgctctcctactccttctggtcgccgccgcgggagacagccatgccgcgtcgccagcggagatgtactggaagatcgcgctcccgacctcgccgatgcccggcgccatccgcgacctcatcaacccggcgagctcagcggggtcagcttcgaaggaggacacggtgggcaacgtgttcttcctcgagaaggacctcttcccgggctccaagctgacgctccacttcacccgcgccaccgccggcgccgcgctgctcccccgcggccgcgccgactccgtcccgttggccaccgaaaagctcccggagatcctctcccagctctccgtccccgccggctccccggccgccgacgccatgagtgcgaggccgcgccgctcgccggcgaggcgaagcaatgcgcgacgtcgctcgagtccatggtggagttcgccgcgtccagcctcggcacccgcgacgtgcacgccgtgtccacggaggtcgacagggcagggccggcgccgaggcaggcgtacagggtggaggccgtgaggcccgtgccggtgtccggcggcgacatggtggcgtgccacggcatggcctacgcgtacgccgtgttcgggtgccacacgaccacggcggcggcgtacacggtggcgctctccggcgccgacgggactagggcggaggcgctcgcggcgtgccacgccgacgcggcgccgggggtggcggaggcgtacaagaggctcggcgtggcgcccgggagcgtgccggtgtgccacttcttgccacaggacgacatgctctgggtgcgtaactgagcgcgcgcgcgtgaaaggggataaaaattgtgtgatctcaagatagctccttcctatattttggagctatatgcgtatcatgtcttatcatatgtgtatgcgacgacccgaaatgccactactatacttgtggcagcatgttaataagtctgcatgtacgattcatcgatcaaaaaaaaaaaaaaaaaggccacatgtgctcgagc

SEQ ID NO: 12080 - DNA, 1245 bp, Oryza sativa
  ref <308>: DATABASE ACCESSION NUMBER: AK109428
  ref <309>: DATABASE ENTRY DATE: 2002-08-28
gctgcggaattcctcgagcactgttggcctactggatataatctcttggcagtattagtattagtgccgaattgcacctcttctaatctgtttccaaagcaaaattacagccaaatcgctcctcttcgtatatacttagtgccaatagaaggtaggaaagaccacatatccaggtttccttgctaggctctgctcatatcccgcaaattgagggttcagacttcataagttcgagctctgtccacaagaaaggaacaagagattgttcttggcagttggaagaagctaagaacttggcgagttggtggccaaggtgctcttggagggttcttggagcagtacaatgttggccaaaagattgaaaagatgcagcattcttctgttcgcctttctcctcgcagacgcatccgggagtcttcttgagagcagcggcggccaggccgaggcgatcggtccacagatctccccggcgacagagggcgagggcaagaggcggtcgctggcgacggggatgttctgcgtggcgctgccgaacgcggacccgacggcgctgcaggaagggctgaactgggcctgcggccagggccacgccaactgcgcggcgatccagccggggggcccgtgctacaaggcgaacaacctgccggcgttggcctcctacgcctacaacgactactaccagcgcaactccggcgccggcgccacctgcagcttcaacggcaccgccaccaccaccgccaccgaccccagttcagggcaatgcgtcttctcaggaagctccatggccggaggcaccacgccggcggcgaacgcgccgtccgccgtcggcccgttcacgccggggttcggcaacgggtcgtcgccgacgttcccggggacggggagccccggcggcgcgctgacccccttcgacgccgccgacagcgtcatgtccggcgctcgccgggcgctctgcgcgctgctgctggcgtcgccgatcttcctctccctcgttctctgatcagcagttcagcactagttggagtttgtccatgtaaattatgcatatggcattatgtcattcgttataaattcactcaccagagagagtcagtgacgactcaggagtcagagtcaccttgacatgttttattcccgagtaaatgaccagtgtttatatgtcagatgtcagattggatcatgaaattattttatttagaccattttgtggaaaaaaaaaaaaaaaaaggccacatgtgctcgagc

SEQ ID NO: 12081 - DNA, 795 bp, Oryza sativa
  ref <308>: DATABASE ACCESSION NUMBER: AK109429
  ref <309>: DATABASE ENTRY DATE: 2002-08-28
gctgcggaattcctcgagcactgttggcctactggaactctcacctactctgcttctgctgccctcctgcatcgactcactcctccactcccgtgtcgtcgtcgtcgtcgtcgtctgcttcgtcggccgccgcgcgccgcccgcgatggcgtcgtcgggggacagcagcggcaagcagcggagcgacgaggagtggcgcgccgtcctctccccggagcagttccgcatcctccgcctcaagggcaccgagttacctggaacaggtgagtacaacaagttctatggtgatggggtctacaactgtgctggctgtggaacacccctgtacaaatccacaaccaagtttgattctggttgtggctggccagcattttttgagggacttcctggagccataaaccgaacaccggatcctgatggaaggagggtagaaatcacgtgtgcagcttgcggtgggcatttgggtcacgtgttcaaaggagaaggcttcaagacgcctactgatgagcgtcactgtgtgaacagtgtttcgatcaagttcaccccggcctcctaaatcctttcccaggtcattattattggaggtgaattccccagggctaaagctgtggaaagcactacaaaataatgaataaaatcacagagacatatcctgtttgtccatatatgaattcatctcctgttaatttagctgtaaacttgtaacttaacattgctgggaatggtaaatgaatgaataaatgaatctggttcattagttaaaaaaaaaaaaaaaaaggccacatgtgctcgagc

SEQ ID NO: 12082 - DNA, 1340 bp, Oryza sativa
  ref <308>: DATABASE ACCESSION NUMBER: AK109430
  ref <309>: DATABASE ENTRY DATE: 2002-08-28
gctgcggaattcctcgagcactgttggcctactggctcacatcctcccatcgcgccgccacctctccccaaccctagctagctccccctccttccccggcggcgacatcgacgatggcggcggctgcggcaggcggcggcggcggcggcgccccgcgggcgctctcccagcgggagcaggacatccagatgatgctcgcggcggacgtccacctcggcaccaagaactgcgacttccagatggagcgctacgtctacaagcgccgatccgacggcattttcatcattaaccttggcaaaacctgggagaagcttcagctggctgccagagtgattgttgccattgagaacccacaggacatcatcgtgcagtctgctaggccttatggtcagagggctgtcctcaagtttgcacagtacaccggagctcatgccattgctggcaggcacactcctggtacatttaccaaccaactgcaaacctcattcagtgagccacgtcttctcatccttactgaccccaggacagatcatcagccaatcaaggagtctgctcttggaaacatccccactattgctttctgtgacactgattctcccatgcgctatgtcgacattggtattcctgccaacaacaaggggaagcagagcattggttgcctcttctggctgcttgctaggatggttcttcagatgcgtggcacaattctccctgggcacaagtgggatgtcatggttgatcttttcttttatagagatccagaggaagctaaggagcaggaggaagaggaggctgcagtaggtcctgaatatgctgcagttgctgagtatggtgctgctccaactgacaattggggtgaccagcaatggggtggagaggtccagcctcctgccctccctgctgcaccgactggggaatggggtgctgctccagctcctgtggctgcagaagggtgggatgcagttgctgttcctcctgccgccgctgctgctgttgcacctcctgccgcccctggatgggaggaaggcagtgctccggcacctactggctggtaggaaatgtgcggatcatcattcgtcagctactggaggaaaactgagttacttaacattatgtaatgtatttggtagatctgtttaagtagctccatgttaaagtattgcataatgttaagtgagaatcaattttgaatgccgatgcatctggttactgcgtgttagcttccttcctgtcaacgttcatggattacattgcttcaagtgcattttgtgagcaaatgctatgacttgcaactctggtaaaaaaaaaaaaaaaaaaaaaaaggccacatgtgctcgagc

SEQ ID NO: 12083 - DNA, 2102 bp, Oryza sativa
  ref <308>: DATABASE ACCESSION NUMBER: AK109431
  ref <309>: DATABASE ENTRY DATE: 2002-08-28
gctgcggaattcctcgagcactgttggcctactggatacaagttggccaagatcaccaataaggatttgcctatccttctctggcgctcctgaatcctcttagatggttataccttggtgttcgtccatgatgcggcttttgtggttcttgttcgcgcttcttcttgccagatcggtggcagatgctgcaactgcgaactacactttcactgtggaaagcatgcgagtcagtcggctatgcaacagcactgacattattgcggtgaacggcctactgccaggcccaatgatagaagtgaatgaaggtgacgcagttgctgtcgaggtcatcaacggatcaccatataacttaaccatacactggcatggcatactccagctactgacgccatgggcggacggcccgagcatggtcacgcagtgccctatccagccgaacagctcgtacacgtacaggttcaacgtcaccggacaagaaggcacgctgtggtggcacgcccactcctccttcctgcgcgccaccgtgtacggcgctctcatcatccggccaagaaacggctccgcctatcccttccccgcgccggaccaagaggtccccatcgtgcttggggaatggtggagccggaatgtcgtcgacatcgagagcgacgccgtctcatctggccagcttcccagagaatccgacgcgttcaccgttaatggtgttaccggcgagctctaccaatgcgcaaatgacacgttcacggtggacgtgcagcccaacacgacggtgctactccgggtcatcaacgctggactcaacacgcacctcttcttcaaggtggccggccacgcgttcaccgtcgtggccgtcgacgcgtgctacaccgccaactacaccacggacacgctcgtgctcgcgccggggcacaccgtggacgcgctcatggtcaccaacgcgtcggccggcagctactacatggcggtgcaggcgtacgacagcctgtctccgaccaccatggccgtaaccgacgacaccaccgccacggccatcgtgcactacaacaccacgtcgaccaagaaaaacgcgacgcccgtcatgcccaccatgccccagagctccgactccgcgacggccaacgccttctacttcgggctgaggggcccgccgtctcccagcgcgccggccgtgccgaccaaggtggacgtgaacatgaccatcgagctgggcctcggccagctgccgtgcgactccacacagagcagctgctcggggaaatccgtcgcggcggcgatgaacggcgtgtcgttccgcctcccgtcgcagatgtccctcctggaggcgcagttcaaccgcacgccgggggtgtacaccgccgacttcccggacgccccgcagccgagcggcacgccgatggtcgaggggaccaaggtgcggaggctcaagtacaactcgacggtggagatcgtgctgcagaacccgaccgccttcccgtcggagaaccacccgatccacctccacggcttcaacttcttcgtgctggcccagggcctcggcaacttcacgccgggcaacgtgagcggctacaacctcgtcgacccggtttcgcgcaacaccctcgccgtgccgaccggcggctgggccgtcatccgtttcgttgccaacaatccaggcatgtggttcttccattgccaccttgacgcgcacgttccgatggggctcggcatggtgttcgcggtggataacgggacgacgcctgactccttcctccctccgccgcctgccgatctgccgaagtgctagaacctgcaagattctggcgttggtgtcaaattgtaatgcactttcgtagccaaattttacttcatatttgttcttgtgtttgtgtaaatggagtacaggaggcacgaaacgaggtagtgccgttcgtttatttgttctgtgtatgtgtatcatgtgtaaactgtaaagaggtctgtttttttttcctctccgggggaacgtgtaaactgtaaagcaacaaatgtcaaacttcagattcctttgactgtgttaaacatgaatttattccaggataccaattaagcaaaaaaaaaaaaaaaaaggccacatgtgctcgagc

SEQ ID NO: 12084 - DNA, 1254 bp, Oryza sativa
  ref <308>: DATABASE ACCESSION NUMBER: AK109432
  ref <309>: DATABASE ENTRY DATE: 2002-08-28
gctgcggaattcctcgagcactgttggcctactggactcttgcctgcatcgatccttgagtttaattaactcaaggaagaagcaatcttcgcttcggtggatgaagagcaggaagaacagcacgacgagcacaaaagcagcaggcagctgccacaccagcagcagcggaggaggaggaggcggcggcaactgctatagcagcagcagtagcaagatggagcgcaaggatgtggagaagaatcggcgcctccacatgaagggtctctgcctcaagctctcctccctcatccccgccgccgctccccgccgccatcaccaccactactccacctcctcctcctcatcgccgccctcctccaccaaggaggctgtgacgcagctggatcacctggagcaggcggcggcgtacatcaagcagctcaaggggaggatcgacgagctgaagaagaggaagcagcaggcggcggcactcaccaccagcaccagcaatggcggcggcggcgggatgccggtggtggaggtgcggtgccaggatgggacgctggacgtggtggtggtgagcgaggcgatcagggaggagagggagagggcggtgcggctgcacgaggtgatcggcgtgctggaggaagaaggcgcggaggtggtgaacgccagcttctccgtcgtcggcgacaagatcttctacactctccactcccaggcgctctgctccaggatcggcctcgacgcctccagggtctcccacaggctgcgcaacctcctcctccaatattaattcacaccactctttcactctgctcagaatgagataatactctctactctactctactctgtactgtgatgataagaagtataaagagtagcagaccagagagcctctaggtagctaggttaattagtgagaaacaagagtttacactaagctaatggatggcatgagcgggagcaagctgttattactactaactcttggctaacgtttttgtatcccctagctagctgcctgccctacgtatatgtctccagtctatcatgtaggagtactccagtagtatactgtgtgtgagtgttctcttttgtgcctgaaattaatccagtccgatgtaagtacgtactagtatttggtttactgcatgctctctagcctcgcatcattatttttgagaggcaatgatgtgataatccttaaaatgggggcagtctcttcttaattctaaaaaaaaaaaaaaaaaaggccacatgtgctcgagc

SEQ ID NO: 12085 - DNA, 1575 bp, Oryza sativa
  ref <308>: DATABASE ACCESSION NUMBER: AK109433
  ref <309>: DATABASE ENTRY DATE: 2002-08-28
gctgcggaattcctcgagcactgttggcctactgggaaggttccactgaatcatcgaatccctctcctctcctcactcgtgtgtttccctccactccttcccgccacaacggataacacctcacttcctcaacactcaacacagcagagcagcgcaaaacagagcagaccaagagcaaggagacgacgacgacgacgacgatgcaatccctcctctcctcctcggtgctcgccaacccatgcaccaccggctccccgctcttcccgccgaccgctgctaagctcgccgccgctgcctcggtcccggtggccgcggcggcgaggagtggcgccattgctgccgtgtcgaggagatcggccagtggcggccggtgcgtggtggcggctgcgtcgtcgtcgtccccggcggtgaccacggcggaggccggcgaggtgcccgcgacgatgaaggcgtgggcgtacgacgattacggggacggcagcgtgctcaagctcaacgacgccgcggcggtgccggacatcgccgacgaccaggtgctggtgcgcgtcgccgccgccgcgctcaaccccgtcgacgccaagcgccgcgccggcaagttcaaggccaccgactcccctctcccgacggtgccggggtacgacgtggccggcgtggtggtgaaggccgggaggaaggtgaaggggctgaaggaaggggacgaggtgtacggcaacatcagcgagaaggcgctggaggggcccaagcagtcggggtcgctggcggagtacaccgccgtggaggagaagctgctggcgctcaagcccaagagcctcggcttcgcgcaggccgccgggctgccgctcgccatcgagaccgcccacgagggcctcgagcgcgccggcttctccgccggcaagtccatcctcatcctcggcggcgccggcggcgtcggctccctcgccatccagctggccaagcacgtgtacggcgcgtccaaggtggcggcgacggcgagcacgcccaagctggagctcctcaagagcctcggcgccgacgtcgccatcgactacaccaaggagaacttcgaggacctgccggacaagtacgacgtcgtcctcgacgccgtcggccagggcgagaaggccgtcaaggtggtgaaggaagggggcagcgtggtggtgctcaccggcgccgtcgtgccgccggggttccggttcgtggtcacctccgacgggtcggtgttggagaagctcaacccatacctggagtccgggaaggtgaagccgctggtggaccccaaggggccattcgccttctcacaggttgtggaggccttctcctacctcgagacagggagagccaccgggaaagttgtcatctcacccattccatgagagcttgacatcaatggcagagcttatgatggtctctcgcacctgagattctgattctgaagtgtgtcagcatagaccaaaatgaagtttatctcatattacagttcatagagttacactgttacacaagttgtatgcactgtgatgaactgctgagcaatgtccacaaaaaaaaaaaaaaaggccacatgtgctcgagctg

SEQ ID NO: 12086 - DNA, 1036 bp, Oryza sativa
  ref <308>: DATABASE ACCESSION NUMBER: AK109434
  ref <309>: DATABASE ENTRY DATE: 2002-08-28
gctgcggaattcctcgagcactgttggcctactggaaaccatccaacctcacacagttcacacaaccacaagcttcaaagctccctactacttctcctcctccttcttctccggcgccggcgacgatgacgctgacgatcccggacgacgtgcgggcgaaggcggaggtgtacgtcggcgacgaggccgggcaggagaagacgcggctgctgctggaggagacggggctccccagcggcctcctccctctccgcgacatcatcgagtgcggctacgtggaggagaccgggttcgtgtggctgaagcagcggcggaaggtggaccacttcttcgccaaggccggccgccacgtcagctacgccgccgaggtctccgccgtcgccgagaagggccgcctccgcaagatcaccggcgtcaaggccaaggagctcctcatctgggtcaccctccacgagatcgccgtcgacgacccccccaccggcaagctcacctgcaaggccatcggcggcctctcccgcagcttccccgtcgacgccttcgaggcccccccgccgccgcccaagaacccctcccccgccgccggcgacaccaccaaggtcgatgaggagaagaagaaggaggaggaggtcgccggcgacgccgccgccgccgccattgacgagatcgaggggaagatgaaggagatgaacagcaaggaggtgcaggtgcaggccgagggagtggcagccaagaactgaagaagatcgatcgatcgatatacacagatcatcatacatctcatcatcatcatcagcagcagaagcagcagcacgagatctcactatcatatggagattcagatgagctagtagctgagatgatgagttattattaattaatcgttttatttggttctgaataatctgcatctgcatgcatgcactgctttaaattaattattattaagttgttactacttcttttcttgctgctgttaaacagagagaaaatgatataaaaaaaaaaaaaaaaaaaaaaaggccacatgtgctcgagc

SEQ ID NO: 12087 - DNA, 1303 bp, Oryza sativa
  ref <308>: DATABASE ACCESSION NUMBER: AK109435
  ref <309>: DATABASE ENTRY DATE: 2002-08-28
gctgcggaattcctcgagcactgttggcctactggaaagaaaatcgagagattggtggagagaggaagaacactgggggagaagaacacaagtgtgcagcgtgcgtgtgtggaggcgagaggaggaagacgaaggcgaggagggaggaggtagctgcgcgcgggcgatggaggtggggttcctggggctgggcatcatggggaaggcaatggcggccaacctcctccgccacggcttccgcgtcaccgtctggaaccggactctctccaagtgccaggagctcgtcgcgctgggcgccgccgtgggggagacgccggcggccgtcgtcgccaagtgcagatacaccatcgccatgctctccgaccccagcgccgcgctatctgttgtattcgacaaggacggcgtgctcgagcagattggggaagggaagggttatgtggacatgtccactgttgatgccgccacttcttgcaagataagcgaggctataaaacaaaaaggtggggcttttgttgaagctccagtttcaggaagcaaaaagccagctgaagatggccaattggtcattcttgctgcaggggacaaggtattgtatgatgatatggtccctgcatttgatgtacttgggaaaaagtcgttctttttgggagagattggaaatggagcaaagatgaaactggtggtcaacatgatcatgggaagtatgatgaatgctttgtctgagggactctctctggctgataacagtggtttgagcccccagacacttcttgatgtcctggaccttggcgccatcgcgaatccaatgttcaagctgaaagggccctcgatgctgcaaggcagctacaaccctgcatttcccctgaaacaccagcagaaggatatgaggttggcacttgccctaggagacgagaacgctgtctccatgccagtggcagctgcttccaacgaggcgttcaagaaagcaagaagcttgggactaggggacctggatttctcagcggtttacgaggtactgaagggcgcaggtggctcaggcaaggcgtgaaactctgaacgctagaatccattcttcagaatctgcccattgccgtgcaggtttgctacagtgatcggcatcgaaccacgcagcatatgtcatcgtattgatactactgggtaaccagtgtgaacgatgtagttgcaggttaagtactacagcttgcgtgaacttcatcccaataataaagatatatatagctctgttatgcgatgcaaaaaaaaaaaaaaaaaaaaaaaaaaaaaaaggccacatgtgctcgag

SEQ ID NO: 12088 - DNA, 1255 bp, Oryza sativa
  ref <308>: DATABASE ACCESSION NUMBER: AK109436
  ref <309>: DATABASE ENTRY DATE: 2002-08-28
gctgcggaattcctcgagcactgttggcctactgggaacgactcggcgctccattctgcccaccggcggtgatctccacccccgcggagatgggaacggaggccgcagctccggcgagggccatgggccccaccaagctcgcgtacttcgatgacatgtgggccctcagctccaccgccaccgtcgtctccctcctccaggaggaggggggccggcgagcggtgttggtggactccaccgtcttctacccgcagggcggcggccagccggccgacaccggcgtcatctccgctggcggcggcaccaggttcatcgtcgatgatgtgcggatgaaggatggagtggttttccactatgggagatttgaggatgctggagatggatgcaattccgggttcagtgaagggcagagcgttagcttggaagtcgatgcggaacgccgcaacttaaattccaggcttcattctgcagggcatttgatagacatctgcatgagcaatattggcttatcacatttcgaccctgggaaaggacatcatttccctgatggacctttcgttgagtataaaggagtcattccaccagatcagttgcaggataagaaaaacgagttggaaaaagaagcaaatgagttaattactaaaggagcaaaagtattagcttatattttaccttatgaggaggcagctcaattgtgtggaggtgctctgcctagctacatttcaaaagatagcacccctcgcattgtgaaatttggtgattatcctggtggcccttgtggtggtacacatgttgccgatatctctatcatcaacaacataaaggtcacaaacataagagtcaagaaaggcctcaccaaagtctcctacagtgtcagtctatgattctttttacccatgcatttggcacctggaatttgtcagaggagtgaagaggcaaacattcagtgaaatcagaaggctgataccaaatgattttttttaaaaaatctatgtttagacaaagagtaattacatgtaatattttggaaagcactgttagttctatgctaaatttcgtgtcacatcactatatgtaacttcctgtaccaccatggactatatgtgtctttttcctgaattatatccaggaaattgtactagattagatttgctggtttaatcttcagattgttgttctgaattgatcagtcttcgatgacagatttttttttgtgtgaaaaaaaaaaaaaaaaaaaggccacatgtgctcgagc

SEQ ID NO: 12089 - DNA, 1248 bp, Oryza sativa
  ref <308>: DATABASE ACCESSION NUMBER: AK109437
  ref <309>: DATABASE ENTRY DATE: 2002-08-28
gctgcggaattcctcgagcactgttggcctactggactcgcacagaaaccggcgaaatggggcacgagaaggagcaagaaacggccggcgacgagctccggcggcccgagccgccggcgttgccgtggacggtgcggctccagctcttcgccctcgtcaccgccgtcgacatcgtgcagcgcggcgacggcaccgtcaaccgcttcctcttctccctcgcagaccgccagagcgccgccgcggcgcgcccggacgcccacggcgtccgctccggcgatgtcaccgtcgacgcgtcccgcgggctgtgggcgcgcgtgttctcccccgcgagcagcagcgccgtggaatccccgccgctccccgtcgtcgtctacttccacggcggcggcttcgcgctcctcaccgccgcctccagccagtacgacgccttgtgccgccggctctgccgcgagctccgcgccgtcgtcgtctccgtcaactaccgcctcgcccccgagcaccgctaccccgccgcctacgacgacggcgtggacgtgctccgccacctcgccaccgtcggcctccccgccgacgtagtagcggccgtccccgtcgacctcacccgctgcttcctcgtcggcgacagcgccggcggcaacatcgcccaccacgtcgcgcaccgatgggccgccgccaccacctcctcgagccgccgcgtccgcctcgccggcgtcgtcctgctgcagccgttcttcggcggcgaggagcggacggaggcggagctgaggctggacggcgtggggccggtggtgagcatggcgcgcgcggactggtgctggagggcgttcctgccggagggcgccgaccgcgaccacccggcggcgcacgtcaccggcgagaacgccgagctggcggaggagttcccgccggcgatggtggtggtcggagggtacgacacgctgcaggactggcagcggcggtacgccgggatgctgcggcggaatgggaaggcggtgcaggtggtggagtacccggcggcgatccactccttctacgtcttcccggagctcgccgactccggcgagctcgtcaaggagatgaaggcgttcatggagcgcaacgcgccgcccaaatcgaatgcttaattagaagcgttttatttacctttggcatttcaaaatgttaacctggactgctatttcatatatattttgctgaaatttgatcaaaaaaaaaaaaaaaaaaaaaaaaggccacatgtgctcgagc

SEQ ID NO: 12090 - DNA, 1782 bp, Oryza sativa
  ref <308>: DATABASE ACCESSION NUMBER: AK109438
  ref <309>: DATABASE ENTRY DATE: 2002-08-28
gctgcggaattcctcgagcactgttggcctactggatctcacctcacctcacctcccgataaggcacgaggagactatctcctccccctcctcctcctctccccgccgacgaccccgccgagctacatctccgccgtgctgatcgcgtggagccgaggagaggagcggcggccaacgctacgaggagaggagagtgggggaggggaggggagcgagccttatcttacccgctccgccgaagcctatggactcggagcactggatctcgcgcctggccgccgccaagcggttctacgccgcgcagctcggccacgccgatcgagcggggatggaggaggtggacatggacgaggaggtgaggccggagttcgcgtgcccctactgctacgaggaccacgacgtcgtctccctctgcgcgcacctggaggaggagcaccccttcgagccccatgcggcgccttgccctatatgttctgataagattgcaaaagatatgcttaatcatatcactgtgcaacatgggtacttgttcaagaatcgtcgcaggttgcgcagattcgttattccaggcagtcaagccctatctttgctgagtcgagatctacgtgaagcccatttgcaggtgcttctgggaggtgggggacataggtcaaacaacagcagcaacacaacaaatatttcagctgaccctcttctgtcatcgtttggccttagctttccaacatcagacacagaggaaacatcaaaaccacctatttccattccagatgatgcatctgtgataaaagagacacctgctcagccatgggattcaagtattgactcatccctcacaagggaagaaagggaacagaaacggaagcaagcgagtgtcagagcaacatttgtgcaagacctgctgctcactactttatttggagattaataaatcaagatgagcctaagtagtcgatagatgcatgggtaaatcctggtgcatatttgcatagataagtgcccggtcaaattgctgaaggtaatatccatggcagataggcacgcttctgcggcaccaggcgtcgtttcctcccgtaaggtgcagagttgatgtgggcacgggggcatcttaagtgttattgtagccggtctgtaatctgtatctccagttccataacaatccgcgatcagcatacgatacacgtagcagatcgcggttgtgtttgtagcgcttctatgtttagaagcattggtttcttgtaccaacgtaataattatgttacgggacagcagaatggtatgcagtttgtctacttctgtgagagtataataaaccaagtttacaactggttggttttggaagattatgctgtaagatgaagcaaaaaaaaaaaaaaaaaaaaggccacatgtgctcgagctgcaggtcgcggccgctagactagtctagagaaaaaagctcccacagctccccctgaacctgaaacatgaaatgactgcaattgttgttgtaacttgtttatgcagcttataatggttaccaataacgcatagcatcacaatttccaaataagcatttattacggattcaaatatggtgtccaaatataaagttctacagttggacccggtacgaccgaaatacacatcggacacggcacgaaccgaccgaaaagatgcaagagaaccacacagggaaagatccgaagggaacggaaaagcatagcaaagaaaaaaaggcaagtataaacgcagagaaaacacagaacaagaataaacgaccccgtccaacaaaacggcaacaac

SEQ ID NO: 12091 - DNA, 1322 bp, Oryza sativa
  ref <308>: DATABASE ACCESSION NUMBER: AK109439
  ref <309>: DATABASE ENTRY DATE: 2002-08-28
gctgcggaattcctcgagcactgttggcctactgggtcttcgtggtgataaggagtaggagagaaggccatggcgtcgaaggaggaggtggccgtggagacggtggagggcggagcggcggcggcgaaggcgccgtactgggacccgccgccggcgccgctgctggacacgagcgagctgggtaagtggtcgctgtaccgtgccctcatcgcggagttcatggcgacgctcatcttcctctacgtgagcatcgccaccgtgatcgggtacaagaaccagagggccaccgtcgacgcgtgcaccggcgtcggctacctcggcgtggcgtggtcgttcggtgccaccatattcgtcctcgtctactgcaccggcggcgtctccggcgggcacatcaacccggcggtgacgctgggcctcttcttcgggcggaagctgtcgctcgtccgcaccgtgctgtacgtcgtggcgcagtgcctcggcgccatcgccggcgccggcatcgtcaaggggatcatgaagcgcccctacgacgcgctcggcggcggcgccaacaccgtcagcgacggctactccgccgccggcgccctcggcgccgagatcgtcggcacgttcatcctcgtctacaccgtcttctccgccaccgaccccaagcgcaccgcccgcgactccttcatccccgtactcgtgccgctgccgatcgggttcgcggtgttcgtcgtgcacctggcgacgattccgatcaccggcacgggcatcaacccggcgaggagcctcggcgccgccgtgctgtacaaccagcacgcagcttggaaagaccactggatcttctgggtggggccggtgatcggggcgttcttggcggcggcgtaccacaagctggtgctgcgcggcgaggccgccaaggcgctcagctcgttcaggagcaccagcgtgacggcgtgaggaagacgacgatgttcatttgatacgagagatcgatcagctgcttgattaattgttcttgatttcgttgttcaatttacaatctacgactatggacgatcatgcatatgatatgatcgatgcatgcgtctgttgtcagttttatttgggactttcagtgtgagagtgtgaatggttgtaaaataagtggagtgcctgtatgtatctgtatgcatgcacggcacggtacgcgtgtttatggatgatgctttgttacgtagcaggcttaattatgtcaatatgtgtgcgtatgttgtcgtggtaattattatactgggtatatatatatattgtgcagcttaaaaaaaaaaaaaaaaaaaaaaggccacatgtgctcgagc

SEQ ID NO: 12092 - DNA, 1289 bp, Oryza sativa
  ref <308>: DATABASE ACCESSION NUMBER: AK109440
  ref <309>: DATABASE ENTRY DATE: 2002-08-28
gctgcggaattcctcgagcactgttggcctactgggatgctacctcgaattggctctggatgcttgccaaggcccatgtcagctccaacgatgctggtgtccatcagctggtcaatcactggcttaggacgcatgcaacaatggagccgttcatcctggcggcgcaccggcatatgagcgcaatgcaccccatcttcaagctcctgcacccgcacatgcggtacacgctcgagatcaacgcgcttgcacggcagagcctcatcaacgccgacggagtgatcgagtcctgcttcacccccggccctgtctccggcgagatcagcgctgcttactaccgtaaccactggcggttcgacctggagggcctcccttccgacctcatccgcaggggagttgctgtggaggacgcgacgcagccccatggcgtcaggcttctcatcgaggactacccatacgcgaatgatgggctcctgctctggtcggcaattcgaagctgggtggagtcctacgtgcagctctactacccggacgccgggacggtgcagtgcgatcttgagctgcaggggtggtaccacgagtcgatccatgtcgggcacggcgacctccggcacgcgccgtggtggccgccgctctccacgccggtggacctggcgtccatcctgacgacgctggtctggctcgcgtcggcgcagcacgcggcgctcaacttcgggcagtacccgctgggcgggtacgtcccgaaccggccgccgctgatacggcggctgctgccggacctggagcgcgacgcggcggagtacgccgcgttcctcgccgacccgcaccgcttcttcctgaacgcgatgcccggggtgctggaggcgaccaagttcatggcggtggtggacacgctgtcgacgcactcgcccgacgaggagtacctcggcgaggggcgggacgagggcggcgtgccgtggacggcggacgaggcggccgtggcggcgcacggcatgttcgcggccgatgtgcgacgcgccgaggagaccatcgagaggcggaacgccgaccacggccggaagaaccggtgcggcgccggggtgctgccgtacgaactgctggcgcccagctcgccgccgggggtcacctgccgcggcgtgcccaacagcatctccatctgatctggcgacattgccgatccattcattcctctttgtgttctggatcaataattttagtaaaatgaatatgaaataggagtattaatcagtaaaaaaaaaaaaaaaaaaaaaaaaggccacatgtgctcgagc

SEQ ID NO: 12093 - DNA, 1201 bp, Oryza sativa
  ref <308>: DATABASE ACCESSION NUMBER: AK109441
  ref <309>: DATABASE ENTRY DATE: 2002-08-28
gctgcggaattcctcgagcactgttggcctactggtagatggagccgtcggcgtagaagctccggtcggcgagcatgaggacgcggtcgaactcatcgccgcaggggaggccgagcggcgcctccaccgccgggttgcggatgacgtaggcgccgaggagtccggcgaggaggttggcgcgggtgaggccgagggcgtggtcgtggtaccagagcacgccgggggactgcgcgttggggtaggtgtacgtcggcgtcgaccacgccgggccggtctcgccgaagccggcggtgaaccaggcgaaggcgctgccatcggactgcggcgggtgggcgccgccgtggaggtggacgacggtggggacgccgccgcggcgcgggatggcggtgggcacggtggggtcccacgggaggatgtggcgcgcggggaggtagttctgccacgtcactgacagtgggaccccctgcgctgcctcgatggtgggccccgggaacgtggccgtcgccgccgacgtcccgaacacgaacacggtgctcgccggcaggtcgcggtggaatttctatttgaaaaaagctaaattttgtccgaaattttgcgtacccatttcttctggtacatgccgatggtgagacgaatgggagaggggtgaccgtgtctcatggagaagccgtagatcttgggcatctgagggagctcgtcgacgtacatttccagcgagccggccaccttctgaagtgtgtcctccgtcaccggcggcggcgccgacggcggccgggtcccggcggcgacgccgacgaggaccaagaggaggacggctagctccactttggcgcgcatttttgcaggttgctacaccttaattcttgctgcttttccctctgcattatgcatagcttcttcataagtagtagtacaaaaaatccatatcttttttgttgaaaaaacaaggatatatatgtagtgtgcttgagccatcaagtggtgaactagtgctgtgtgtgtcaaagactctcaagagacaggaaataatgtgcctccaaatgtacaccgatcatcctttgcacttttttgtgatgagcactatatatgcatgttatgttaagtagatggtacaccatgcatgtatgtatatatgattatatatgtggagcttccactagctagataaaaaaaaaaaaaaggccacatgtgctcgagctgc

SEQ ID NO: 12094 - DNA, 1319 bp, Oryza sativa
  ref <308>: DATABASE ACCESSION NUMBER: AK109442
  ref <309>: DATABASE ENTRY DATE: 2002-08-28
gctgcggaattcctcgagcactgttggcctactgggaaaaacgccaccaccaacaacacgcgaacgctgaagagataagtcgagagaaccctgcgccgtcgccgacgatggggctcgccggcggggcgcgcgtggtgctcttcgtcgtggcggcggcggcggctgcggctctgactgccgccgccgatcagatcttcaccagttcaggtgcgccgtttgggcggaattcgcgtgagccgaggtaccatgttgagttccatcctgtcgatgcgccatttaatccagagaatggccaggaatctgtaccaatgactagccacgtggggaaacattatacatgcttcctacctgttgaggaaacaaaaaccatgaagtcgataatcccacaaaacgcaaccaatgttatcatagaaagtgaacggagagttaagccaaaggatccagatgaattgctggaaattctcaaggatcagtgcttctacaggcatgaaggttggtggtcttatgaattttgctactacgggaaaatccgacaagtccacgtagagggcgagaaggttattcaagaatatgttctgggtgaatatgatgctgatgcaactgatgcttactatgaaaatcaaacatctgactctgctgatgaagatgataacctgatagacacctctaagaggtatcatgtccacctgtacacaaatgggactgtctgcgatctcactgatatgccccgggaaacagaggttagatttgtatgttcagaacccactgtagtgattagttcaattaaggagatctcttcctgcaaatatgttttaacagttcaaagcccaatgctttgcaagaatccgctatttcagcaagaaaaacgtaccctctccattcactgcaacgagttgctagctgaagctgaagccactgtggatgatgactctcttccaaaagaagctcagatcatcatcccagatccagatggattgcataattatgcagcttatgctacttgattatgcatcattgttatagcatcagacagtgaagaaaatcatcttccgggtgcaacggcaatttggcaatgctaacaatggtataggttgttcgcggagcatattatccattcatgtgaagcaggtttgagatcatcagactaacattgatcatgaggaacattacgggcgatgagtgcttctgtactagtgcaaacgaagtactaaatttcagtgtcaaactgtagacagtaacattttcttgatatatgtttatagaagaaaatcttgtgatgcggaaaaaaaaaaaaaaaaaaaaggccacatgtgctcgag

SEQ ID NO: 12095 - DNA, 1723 bp, Oryza sativa
  ref <308>: DATABASE ACCESSION NUMBER: AK109443
  ref <309>: DATABASE ENTRY DATE: 2002-08-28
gctgcggaattcctcgagcactgttggcctactggactcgctcacactctgatcagctctctaatcacatatatatcgtatcgatcaacgacgacgacaatggcggccgtcgacaatgccccgccgtcgccagtggtcaccgtcacctccacccgcaccgtcgccccagccgccgccaagtgcgtcctcgccacattcgacctcccctacatcaccttctactacaaccagaagctgctcctctaccgcctccccaacggcgcctccgacttccccgacgccgtcgcccgcatgtccgcctccctctccgacgccctcgcctacttctacccgctcgccggccgcatccgccaggacgaccacgacggctccctctccatccacggccaacacggcgccgaggtcatcgaggcctccgccgaccatgtctccgtcgaccaactcgccggagaggagtgctcggaggaggcggagaaggtgatgcagctcctcgtcccctacaccggcgtcatgaacctcgagggcctgaaccgcccgctgctcgccgtccagttgacacgtctgcgggacggggtggcagtggggtgcgccttcaaccacgccgtcctcgacggcacctccacctggcacttcatgacgtcatgggcggagctctgccggggcggcggcgcgccgtcgctgctgccggtgcacaaccgcggcatggcgcgctccgtccgcgtcaacctcccgctcccggcgtccgccgaggcgcacgagaagaccgaccccaatgggcccaaggtgcccctcgtggcccgcgtcttctccttcccgccctccgccgtggcccgcgccaaggccgccgccaacgccgccctgccccccggcgccaagcccttctcctccttccagtcgctcgccgcccacatctggcgcgccgtctcccgcgcccgcgccctcggcccctccgacatcaccgtcttcgccgtcttcgccgactgccgcgcccgcctcagcccgcccctcccgcccgcctacttcggcaacctcatccaggccgtcttcaccggcgtgcccgcggggatgctcctcgctggcccgcccgagctcgccgcggggctgctgcagaaggccatcgacgaccacgacgccgccgccatcacccggaggctggaggagtacgaggcggcgcccaagctgttccactacagcgacgccggccccaactgcgtcgccgtcggcagctcgccgcgcttcagggtgtacgacgtcgacttcggcttcggccgcccggagcgggtgcgaagcggcgccaacaacaagttcgacgggatggtctacctctacccgggccgcggcggcgacggcggcatcgacgtcgagctctcgctgcagccggagccgatgcagaggttggacaaggaccaagacttcctccaaatgcgagccccttaattcttttttttttcttttatactcctatatattatgatgattcatcagctgcatgttactccctagtagtcttgttcctcctaaattgcaacttctcctactactcctttatgtttagttggatgcatgcatggattccttgttgcttgctactatttatatatagtggagtactatgttgtgtactatgttgcttgcaagctacatttatatgtggatttgcatatattgaattggtccattacttaaataaaaaaaaaaaaaaggccacatgtgctcgagctgc

SEQ ID NO: 12096 - DNA, 910 bp, Oryza sativa
  ref <308>: DATABASE ACCESSION NUMBER: AK109444
  ref <309>: DATABASE ENTRY DATE: 2002-08-28
atctgcttccggcgacactcagactccctccaccgcagccggcgaggcgacccccaccccaccctcgccgggattcaccgcccgctccgccactccgcaaccaagcaatcaagtcgctctcgcctggggacgaattggggtgggggatttggggatggaggagcagttcatcctccgggttcccccctccgtcgcggagcggatcgagcgcctcatgaacgaatccgccgccgcctcctcctcttccaaccccgaagacgcgtccctcgacctctccttctcagaggatggaagaaatggcacatttatgattgggaatgaaagctttcctgcatcactcttggatctcccaactgttgtggagtcatacaagacatatgatgattcagtgctaattaaaacagctgatattggtcagatgattatggtaagagaagaagaagatcctgctccagaaggagttgaatacaagcatggtcttactcctccaatgagggacgcacgcaggcggcgtttccgcagggagcctgatttgaatgccgaacttgttcaccgagttgagaaggatctcattagtattatgcatggggtatctatcaaccagaatgccagtgcaattctaagggcaggagaaggtggcgatcgtaagaaagcgggaccagctccagcaaccaaacctaatgtcaaacaacctgctgcaaatggcgaagaagctgaggcagagaggagtgactctgatgagtccgttgacccgtagaattcaagtggacaggaatgataaataatcctgctcctatgcccgagcacacccagttgacttagcagttcatatcacagggaaggttactatgtacggacttgctgtcactgttacggcatgttaatatttgtgtatgtaaaatttgatgcg

SEQ ID NO: 12097 - DNA, 938 bp, Oryza sativa
  ref <308>: DATABASE ACCESSION NUMBER: AK109445
  ref <309>: DATABASE ENTRY DATE: 2002-08-28
tagatcattgcaattgttggtcttcaacgaggaatgcctagtaagcgcgagtcatcagctcgcgttgactacgtccctgccctttgtacacaccgcccgtcgctcctaccgattgaatggtccggtgaagtgttcggatcgcggcgacgggggcggttcgccgcccccgacgtcgcgagaagtccattgaaccttatcatttagaggaaggagaagtcgtaacaaggtttccgtaggtgaacctgcggaaggatcattccgccatttcctcctccaccgcctaccgcatctcctcgcgttcacaccacgcacccgaatcttccgcgcctaccggacgccggtgggccacgccgcgcttcggtcggcgcgtcgccggaggaaggaggaggagccgtctcgttgccatgaagtgggggatcgccgccgccgtcgggaggtgcgacgccttcctcgtccgccacaaccagggttcgtcgttgtcaagggacgcggaacgcgcggcggcggcggcggcgggggagcagcgtgtggaggggaagaagttcgcgccgcggttcgacggcctccgattcatcgagacgctcgtcacggcgcaccgctgaactggggctgagattccttccttccttcctcccgtgattcggcggaggaagaggaggaggagacgccagatgcgcgcgtgatccttcggcgatttagatgcagcgccaagaagttttgttaggacaattgagaaattgaggctttgaaatctttcctcttctttctgtttgcttttctttctaatttcttcttattttcccccctttctattgttactgctattgctgttgacaattatggtgatccttgttaagctgaggcgataattgtgatgatttatgtaaattgcgagccatgattgattcttcatccaatttcttaggactgttcatgat

SEQ ID NO: 12098 - DNA, 810 bp, Oryza sativa
  ref <308>: DATABASE ACCESSION NUMBER: AK109446
  ref <309>: DATABASE ENTRY DATE: 2002-08-28
acgatgcagttaggcatgggctagctatagctaatagctaagctcgatcgatctcttcttctcctcctcctcctatccactgtccaaaagacggtgatcgatctgtctccgactgccgccgccgatgtcgtcgtcgtcgtgcgcggcgggcgccgaggccaccgggctggtggccatggactgcctggtggtgtgctgctgctgcccgtgcctggtgctgcagatcaccgtgttcctcttcgtcaggctgcccaagaaggtggttgtcaagtccaagaggatcatcctccggagatggcacgggagaagatcatcatcatcggcggcggcggcggcggccaagagaggctgcagcacggtcgacccggctgcaggcgtgaagaaacagctggaggagctatttgacgacgacgatctattccaaggcgcattcggcggcgggatcaacggaggcggcggcgacgacgaggaggggtggtggaaagagaggtgcttcgccgtcgacgacgacgacggcggcgtgtgggaggcgctgatcgagcaagaggggctcttctggttcgggagcttctggggccggacgacggagcaggtggatcgtccggatcagtttggagacgacgaacatgcccacccagccttgaggtttcctctcgttctcgagagagtttgtgactaaattagctagagtacttaatttatcaatgcaagcttaattagggacagtcgcaacataattcaggcgttgagctcggtttctggctgatgattgctcattgagttcttaatcaattacatcctgttccggcc

SEQ ID NO: 12099 - DNA, 1220 bp, Oryza sativa
  ref <308>: DATABASE ACCESSION NUMBER: AK109447
  ref <309>: DATABASE ENTRY DATE: 2002-08-28
gaaaaacaaataatgtcagaataaaacgcggcgcagcacacaccccagctcctcctccggcgacgagaaaaaaaaatggacgcgcagtacaacccgcgaacggtggaggaggtcttccgcgacttcaagggccgccgcgccggcctcgtccgcgcgctcaccgcagatgtggaggatttcttccggcaatgcgacccggaaaaggaaaacttgtgcctttatgggtttcccaatgagcattgggaagtaaatttgcccgcagaagaggtgccacctgagctcccagagccagcattgggcattaactttgcacgagatgggatgcaggaaaaagattggctgtccatggttgcagtgcacagtgatgcatggttactttctgttgcattttactttggtgctcggttcggatttgataaaaatgacaggaagcgcctgtttggtatgattaatgatcttcccacgatttttgaagttgttagtgggaagagtaaagccaagccaccgagtgctaataaccacagcaatagtaaatcaaaatccagcaataaaacgaagtcttctgagcctcgggcgaagcagccaaagccgcagccccagcccccagtgaagaacgaaggccgcgaggaggaaggcggcccggacgacgaggaaggcggcggtggcggcggaggaggcggtagggaggaggagcacggggagacgctgtgcggcgcgtgcggggagagctacggcgccgacgagttctggatctgctgcgacatctgcgagaagtggttccacggcaagtgcgtcaagatcaccccggccaaggcggagcacatcaagcagtacaagtgcccctcctgcagcggcggcaacggcggtggcggcggcgtcagcggcaacggcaagcgtgcgcgcccgtcctaaggtgtggcacggcgagcccatccagagttaagatttgggctcgccgtgtggtaggagcagtctgcatagtgcagtgcagcggctattcttatttgcaatggctgtaactcgtgaggatgatttttaactttgttaagttattgtatggcagtggctgtaacttgtaagggtgtttttaacttgttaggcatgcagttgtgctgccccttagggggctaagactgcttatccattgtactcctaatctaatcttaatttggtttttttttaattaagtagatggctgtatttagctggtctaccagctt

SEQ ID NO: 12100 - DNA, 698 bp, Oryza sativa
  ref <308>: DATABASE ACCESSION NUMBER: AK109448
  ref <309>: DATABASE ENTRY DATE: 2002-08-28
attccaccctccgcgcccacgatcccttctctctcttgatcgaaaagcgatggcggcggttccggcgcccgccctcctccctaccacgagcggctgcggcggtgcccttccccctctccccgcgagcggcggcggcggctccctccgacctgtctcgctttcctcgccggcggccgctccctttgtcctgtctcgcctcctcgctccctcctcctctcctcctcgcctccctcccgcggtggcgcgggttgacggcggtcgcgggcgaatccgagggtggtggcggcggctccctccatcccctctagccttcctcctgtggcagatccgccggcggcggcggcctccgcaggcggatcaagcggcggtggctccctccgccccctctcgccaagtcccgcggtcgatccgacggtggtggcggcgttggcggcgtccgcgggtggatccattaacagtggcggtgggcagatccggtagcggcggctccctccgccgcctctcttctccctccggcggcggtggtggtgtcggcggcggccgcggatggacccagtggcggtagcaacggccgagggcagcggtggcaacggccgagggccacggtggcgatggccgagggcggatccggtggcaggcgagtgaagtttgtggtgtatattgttgttcttcttggatgattattttgtgattttgtg

SEQ ID NO: 12101 - DNA, 2037 bp, Oryza sativa
  ref <308>: DATABASE ACCESSION NUMBER: AK109449
  ref <309>: DATABASE ENTRY DATE: 2002-08-28
aagcgatcgattcgagtccccttcccttcctccctaaaccctaaccaaacccccaccactctctttccgcgcgccgcgtgcgacgatggcgcgcccgccagccgccaccgctccgcctcctcctccgccgccgccgccaccgccaccgccaccgatcgaccgcctcgtctggctcgcctgcgccgccccgctgtcccgcatccccgtcgtcggcacccaggtctcctacttcccagagggccacgccgagcagtgtcccgcccctctcccggatccgctcccctccgcccaccgattcttcctctgcaccatcaccgccgtcgacctctccgccgacaccaccaccggcgagccctacgccaccatctccctcctccctcttcgccacgacgcccccgcccccgcccccgcccccgcccccgccgccgccgaattagcagaagcagaatcacaggagttccgctactacgccaagcagctgacgcagagcgacgccaacaacggcggcggcttctccgtgccaaggttgtgcgccgatcacatcttcccggcgctcaacctggatgatgacccgcccgtccagagcctcaccatgggggacctgcagggcgactcgtgggaattccgccacatctaccgcggcacgccgcgccggcacctgctgacgaccgggtggagcaagttcgtgaacgccaagcagctggtggccggggacacggtggtgttcatgtggtgcggggccccggcccccgagaggaagctgttggtcggggtgcgacgcgcggccaggtactcgggcgagtcggcgtgcaacgcgcgggggcgggtgcagccccaggaggtgatggaggcggtccgactggcggcggagcaggcggcgttcagggtgacctactacccgcggcatggggcgggggagttcgtggtgccgcgggtggaggtggataagggattgactactccgtggaggtgcgggatgcaggtgcgcgcccaggtgatggaggccgaggacacccgccgcctcgcttggctcaatggcaccctcactaacctccgccaccaacaaatctggcgcactctcgaggttgaatgggatgcctccgccgcgtcatcttccatgaaaaacagatttgttaatccttggcaggtccagcctgttgatttccctcctcttcccatggggctaaagatttctaacaacaatattagtgcacctgtgtgcaatggggattcactgctggtgccaccgatactaatgcacccgcaacctcaacctcccgctgacattcagggagccaggcataacaatggccatgcctatgcagatataccctcttcatcaacaccatcaatggtgaggactcagcagctgttcccaagggatcttcagattttagttccccacaccgacattgtcactcctcaaaatggatcaccgcccgacaaccccgtaaacacgcctctttctgcatctgacggaatgaagaccatacagctgtttggcgtcacaataacatcacctgtgcaaggagacaccaatggcgctttcgcttcagcacaagtgaatcaggttccagagggtgtagatgatgaaactgctaccgaagaagcttctgacacaagcctacctgactctcttaccaatggccacaatcaagatggtgctaggctttgaaggaatatcccattaaacgtttccaagatatggctggaccagatttgtttctaacattttggtctgttctgtttcaccctccggcagtttgacgggatgtggtgttcttatgcatgcatttaatctggagtttaggctggcaactatgccgcatggtccagttaagtttggagtaatctggagaaacgttcatttctttgttagaattgttatagagcagcactgctctgttttattttccttgaattttcacacctgcactttgtttgcttgttgtttgtttacctgtattgatctgataaacatctttaatttcctggggaaccgttgaactctgctttgctgttgcggctagcttttcc

SEQ ID NO: 12102 - DNA, 1535 bp, Oryza sativa
  ref <308>: DATABASE ACCESSION NUMBER: AK109450
  ref <309>: DATABASE ENTRY DATE: 2002-08-28
tggaccaagttgccgatgtgcttatctggtcctggtgttttctggggtaagagctagcaaccgaatcttgtatttcccacacagatccacggcaactgtcagcaacattgctgcgagtacttgatactgtatcagtgtattgcatctattgttggtgatcactgtgtagatcgacaagggtccaaaccgaccacggcgataagccatgcgtcgtctgggactttcccttcaccacgacacgagtccaagcttcgctgcccttgcttgcaaccagcggccgccaccgaatggcaccgttcacgcgtgctccaaaagccgcccacctcagttggagccgggaaaagttggcaaaaagccaataaaaaagacgatgcgcattgcccggattcccacttcgatcccccctcaccttcgtcttcctctcgacctctccgctgtctctccgatgggctcagcttcagagcatgatgtcagggagcacctgctggacgtggacggcgtcggggaagaaggggcggcggcggcggcggggccgaagatacgggtgcgggggctgacgcggcggtcggaggcgagaggcgaggagatcctgcggggcgtcgacctggacgtgccgcgcggggtggtcgtcggcgtcatcggccccagcggcagcggcaagtccacgctgctccgcgcgctcaaccgcctctgggagcccgcgccgggcgccgtgctcctcgacggcgtcgacatctgcggcatcgacgtcctcgcgctccgccggaaggtcggcatgctcttccagctccccgccatgttcgacggaaccgtggctgacaacgtgcgatacgggccacagctgcagggcaagaagctgacggacgccgaggtgcagagcctactgagcctcgccgacctggaccctgctctctgctccaagcccgcctccgagctctccgtcggccaggcgcagcgcgtcgcattggctcgcaccctcgccaacgatccggaggtgcttctgctggatgagccgacgagcgcgttggatcccatctcgacgcagaacatcgaggaggcgatcgtgcggctgaagaagacgagggggctcaccacggtgatggtgtcgcacagcgtgaagcagatccagcggatcgccgacctggtctgcctcctcgtcgccggcgaggtcgtcgaggtgctcccgccgtcggagctgtccgagaccaagcaccccatggcacggcgcttcctcgagctcagctgaagactggcacgacgatctcctcctcctctgtatgacgcttcttccgtttgtgtgattcggatgtgtacctgtaatcttgagaagttgagattatgcctgtatactatgtcggaaattttgtggtgagatgatctcaaccctactggccataaaatgcattttggtaaatattcttttatctaaaccctagtggcctccgaggctccgacattgtatttttgcctgtaatattggtacactactaaaatgaaatttggtactccctccgtcccagattataagggatttt

SEQ ID NO: 12103 - DNA, 2482 bp, Oryza sativa
  ref <308>: DATABASE ACCESSION NUMBER: AK109451
  ref <309>: DATABASE ENTRY DATE: 2002-08-28
aaaaaaaaaaaaaaaaaaaaaaaaagagtcgaggagaagagcaaaaaagcaaaacagcaaagcgaggagagagatggcggcgaggcgaggtcgagggcgcgggcgcgagtgggaggacgacgacctcggcgtcggcggcgggcagcccccgcacctcgccgcgcccgtcgtctgcctcgcccgctccgccggggacctcgccgccggcgccttcgtcggctccctcgtcggatacggtctctctcttctcttcttgccatatcctctttgtttgttgatgacttgatatagtctaactagcggttagttttgagatgttagctcgagttttattataggaagaattctggctttgtttctttcttcttcttcttcttgttttttttttttggggggggggggggattttttgggatgaacagcgaatctgttcttggtactgggggttaactgtagatggcatggaaaatgtacttctttttatattatctggaggttctagtgccgttgcctggacacggattctcaattgaaatggataaaagcttggaaatgacaatgcgagtttttttctttcccccaaagaacattgtcataggtctgttcttagtctatctgaaatgtcctgacaaacctgaccagtagagagtcctactgaaactgaagcaagttgaggggggcatgtaactaaaaaaaatttgaggattgttgttaacctgtgccagaatctggatagctcattggagaagaggtgagtacttggttataattccaaattttagaagcaggataaacatgaactttaaaaggaatcatgttgtgcgctcaacctaattatggtatatggaatgttagcaagactaaagaaaaagatccttagttatataattggaaaaagattatccataatggcaatcaaatagtaaagtctgcaaaatgccatcgcgcaaggttcttttaaatcactttcaatttggatgctaaaatatgcttgagtatttagtttttattctacaagtgtttacttacagtacctgtatgactttttccccagggcaaggtttgctcactaacaaaggtatgaagggttcactcagcagtgctggatcttctgccaaggttaattgatcataatttattcaatatttggatatagaattagtgctgtccagccgtacataaggttgctcatgacagaacttttgtattagactttcgcagcactgtctggtgtccaaagttttatcctgtgcttgctgagaagattgcgagggaaagatgatagtatgtgcttaactttaatttcattactctgttagcatataaagagtaaatatttagttatgactatcccttctgtggcagtgatcaatgctggcgtggctggttgttacacaggacttgctttgagctttccaggtaatttacatagaattgtctttattcagtagcttatttgtagcacatttattgtctgaaatagtactccaggacccctcaacaattagatgattgatgatactttatattatttcttggagatatgtctaatttcatctactgctgagtttcatcaagtaaatcttttgatatcttcttgctgtgcagacctttctgtatatgatggtccctagaaaaatattatttcaattactgtgaattctgtgtcactgtgtgttacacataagtggacattaaaaaaaaatcctgtttaattacatgccaaaccacataaaattttatagtgtttaggatgtccataaaatgctttactcacatcataacaaatgtcttcgtgtgctctgatattttacatgatatcctagaaaactgtcaatgcttatgcagctttatcagtagcccatgctccgttcatcaatctgttgttgttttttttttaccaactgtaaatctgccattgattcggggtgaaaattgcacatttgtcaccttttgtctaaactagtggatgaatagatagccaaaaaagcaatggcagatctgcaaagtccaataagtatcatggccacttgtatagatttccctttttgttagattgcttgtatgctttactagagccactcaacagaattgcaagcctgcaattacttgtatcttattcttctgtaattttagccgagttaatgtaatttcaacagagttaatgggttagggaatgtggacctaaatccatgcaggctgcccttcatcacacaccatatgcatcatcagtccagtatttctctctcattaaaacaatatgccaatggtccctctggtttttgataaagccttgcagtccatgaacattcatggaatattgaattggtttttagtcaatctaatgaaagacaataatatagttcatgagttgatttctgagtggtccttttgatgtcatattttgttaatagattttgccaaaatgcattttccattagttttgtactacagattttaagttgtagtttggttaacttgt

SEQ ID NO: 12104 - DNA, 576 bp, Oryza sativa
  ref <308>: DATABASE ACCESSION NUMBER: AK109452
  ref <309>: DATABASE ENTRY DATE: 2002-08-28
gagtagcattagcaaaggagcaaaggaaaggaacctcgatctccatctccatctccgcccccaaaccctaacacacacacgccgactctccaaaccctacacccccccaacccccaaccccgccgatccccccgctcgccgccgatgggtcgcaagaagaacgtcgccatcgatgacgatgagtactccttcccgcaggaggacgccgcccccgcccccgccgccgacaaggacaagcccatcaagaagggcggcggcaagaagggcaagaagggcgccaaggccgccctgcccgacgacgacgactacgagccccccgcgcccccgcccccgcccggggacgacgacgacgacgaggagcccatcaacctcgtcttgaccggtaagaagaagaagaagaagggcggcggcggcgccgtgagctccttcagcgccttcgacgccctcgcggccgacgaggaccagggagaagacgacgacgaggcccccgcccctgcccccgcccccgtcgagcccgatgccgccgccaaatcagacgccgaggacgacgacctcgatttcgacttcagcaaagcc

SEQ ID NO: 12105 - DNA, 1564 bp, Oryza sativa
  ref <308>: DATABASE ACCESSION NUMBER: AK109453
  ref <309>: DATABASE ENTRY DATE: 2002-08-28
gtctctccccgcgccattgccaatctccgacgcgttgtggaggtagttgttgtcggtggtccggctatgccgtcggccgtggtcgtccgccgcgcgcgcgtgcgcgcccggtcgcagtcgccgccgggggagttcgattcggcgcggcgcacgcggccgcggatggagggggaggaggagatgcgcggtcgcggcgggaaggcatcggcgcgggcccggtctcagtcgccgccaggtgggtccggttccgcggcgcgggtggaggtggaggggatgggggcgtcggcagtgcccgacgacatgctgctcgaggtgttcaagaggctgtcgccgctggcggacatcgtccgcgccgcggcggtgtgccgccgttggcggctgctcgtctccggcgccggcgggctccccgcgccgcctccgtacttcgggttcttccgcaactacgcgccgtccgcgcttccccctttcgtccctgcagccggcgtcggcctcggcctcgaccacggggcgctctcggtgtcgcccgcgtgcggcgccctcctcgtcgactgccgtggccggcgcctcctgctccgcgagctcggcgccgggtcggcgagagagctcaagctcctcgtctgcgacccgctgaggaagacgtccgtgtccctcccctcccgcttcgtcgccggacacaaggtcgcctgctgcgcgctcctacctggcgccggcgcggcgttccgcgtcgccgtcgtcctcttcggcgctgctgcccacttcgacattctagtgtactcttccgccgcctccgcatgggaggcggccaccggagcgctcaagaagtccatgaacccacaccaaggcccgacggtcgtcatcggcgacgtggtctacaagctccagagcgaagaagacaaatacgtaatggcagtcgacgcgaccaagatgacgctctcggcggtgccattgccgaacaccgggatgctcctgtacgccgggaaccactggatcggcaagacacacgacggccgtctctgcttcttcgcgctgcgggagcagctcgttcttgcgaagtgggttctcgagtcgccggggaaatgggtggagcagccggcggtggacctgcgcgcgctgatgaacccggccaccgtcggtgacctctcccgaatcaagctctcggcgaaaatctcggaccagctgcgcggctgcaagctcgtgagcttcggtggattctgcgagggcaccggcgcgctgttcttcgtcatggccgactgggtcgtatccctcgacctcgcgacgtggaggtttgagaggatgtggcgcaacaccgatgagtcgaggccgctcggcgacatcttccccgtcgagatgatggtttggccaccggtgcgccgcggcgatcttggcgagaaggaatgaggtgcaaggtgttcgacgaaatggcaggctacttgaattgaaggtgtttttttgctgtaggcctgtagcgatgaaaagataacaaattaagaatgcagtttgcgaatttgtcgtcaatttccattgttactcaaaaatgtgattaacaatgtgatacaattcactg

SEQ ID NO: 12106 - DNA, 623 bp, Oryza sativa
  ref <308>: DATABASE ACCESSION NUMBER: AK109454
  ref <309>: DATABASE ENTRY DATE: 2002-08-28
ggaacacctctccgtcgtgaaaaccaactgccggcggcgtggaagtcgccggcgagttcatggccgccgcgctcatcgtccccgcaaacccaaaccctactccaaaccccacctcctccctccgtcccccatcgcgtgccgcctccagtgtgctccgcttcccccgccgcgaccgcgctcgaacccatctcactgccgcgtttgggaggggatcacccgcggcggcggccgagcgcggcgggaaggactactacgctacgctgaacctccgccgcgacgccaccctgcaggaggtcaagacggcctaccgtaccctagcgcgcaaggtgctgcacctgcactccccccccttcactctccgatgtcatgtcccctcgaagtgttagattgtgtgatactgctagttttagtgtatgcgcagttcaatttatctggaattgaaccggtagcgtgatatagttgcgattgagttgggccacttgcattatctgcttgttccaacctgggtaattatcgtcttctgcatcccctgcacaatcctggttacagtatatgttaaaatgagtaaaatgactatgtaattcttggtaatgtggatcatggaaatcgcacggtatcattgc

SEQ ID NO: 12107 - DNA, 1504 bp, Oryza sativa
  ref <308>: DATABASE ACCESSION NUMBER: AK109455
  ref <309>: DATABASE ENTRY DATE: 2002-08-28
atgcggaacctccgattcgcctctccaaaatccaaagcaaagctaacccactctgcgagtgcgccaccgcgacccacccccactccggcgagccaatggacgtcctgaagcgcgagctacagcggaagcgccagctgctcgacgccgacttcggcggccgcaagctcctccgccgcgccgagatcgagcgccgcgagatggagcggatccgggaggccgagcgccggctcctcctccagaagcagctccggtcctcctcctcccaccaccgcgccgcgtcgcgctccacgaccacgccgggggctcccgacggcgacgagtcgtcgcggaccgagcaccgcggcgacggggaggagaaggagggcgcgccgctcctccccagggaggaggtcatccggcgcctgcgcgtgctgcgccagccggccacgctcttcggcgaggacgacgccgcgcgcctccgccgcctccacgccgtgctcgaggaccccgcggcgctcgccgacgtcgaagcggcggagatcggggagggccagaccaacgacttcctccgcgacatccaggcgctgcgggcgaaggccgttgcggcgtcggcgtcggcggcggcgaagcccaaggctggcgctgcaactgcagagagcgggggcgagacgagggaggaggtgccgttcgaggagctctgcgacgaggacaagatcatgaccttcttcaagaggctgatgagcgagtggagccaggagatggacgagatgcccgaggcggagaggcggacggcgaaagggaaggctgcggtggccacctgcaagcagtgcgcgcgctatctcgagccgctgttcaagctgtgcaagaagaaggtatgtgacagtattaattcacgcacacacttaagaatctgatgttctttggtgctgtaatcgaatttattgaatgcctccgatgctttcaaaacccaaagttagtggagtgagtctgtaagatgtgctaaaagaacagtatgaagcattacaattttacaaccaatgtttgctgcataaggacatgttaggagcttgggatgcttcactgtggaaggggaaatgcaagccttacagaacacatgatatagtgaagaagccaaataggttatgtgagcttccattttgaaaatgcacttcataagacatgcaacagtttcgatgaaacaccaaactgcctttgtactggtggcacattgtagatattgcaaaattcgtttccaatatcggctataattttgtaggcatgaactaagtggtaatgctactgagtgatttgagtgtgttgcaaatattgtttaatgtgttctcttcttagttccttgtagcatgaagatgttgacagacagaagctggtaatcatcatacattccggcgaacaagacagcagatattacatgtattcttctcaagttccaacctttgcgctttcttattatcaaagtgtctcatgatgtgttcagacttcagagttataaatctctgttccccgc

SEQ ID NO: 12108 - DNA, 1535 bp, Oryza sativa
  ref <308>: DATABASE ACCESSION NUMBER: AK109456
  ref <309>: DATABASE ENTRY DATE: 2002-08-28
caattacgctccagatcgggcgttatgcgatgcgttaccgatacggaggcggagcggagagaacgtgacctagccgcctcgagcgccgccgccttgcggcgcaccgtcgccggcgttgctccccagctccgctcgcgttgaagccacctcgccaccgcacgcgtcgccccggcgccgcttcccctgcccggcgtgcgccgtcgacaccgctgccccccccctcccctcgcgcgctccacgaccgcccggagacacgggcggggatggtgtcgtcgatctcgatgtaccgcgggaacctccaccgggccggggccgacaccgaccaccgctggccggcgccgcgccccaccatcaccccgtcgcggttccgcagcctgctccgcagccgcactctctccctcgcccgcctcgacggcgcggcgcgggccgactccgcggcctcctcctcctccacctcccgtctcgcggatggagacgcgggggtggacgaggaggagcaggacgaggaggggatggagatggaggaggaggaggaggaggagcaggagcaggagcaggaggaagaggatgggcaaaatgagcagcaaccccaagaggcgggggaggagcaggatgagggggcagtggaggatgctgatatggatgatgccggagaggtgctcgtcggaggtgaagatgcccatggcaatggtgatgctcaagaaggtcaaggcgaaagcgaaggctttgatcctaatccagaggggagttgtcttgatgtaattgaagaaaggaaaaaagaattgagtgacaagctggatactttaaacaagaaaaagcatgatcttgtgcagatgctgaagcagattttaaatgctgaagaagaaatcaggatgcgcaccatgcaggcctcattgcgcactactgtgcctcagccatcagaaaacgcagccgatggaagttctatttctaggctggtgcccagaatgaccgttgatgtcaattttagtgatgttgctggcgagtctgaggcgggttccaaccagggcactcctggacgtcccttgcatcatgttcatagtatttctccttcaacagcctcttttgctaggtctccgttcggttctctccaacacaattctggtcacactccaagaagtccagcgactttctcgacagcaagtccgtcccgctttgcagctactggaaatcaaggacatcctattggccatccctcaatatcattgccaggaattaactttgtagcctcttcgccttcccccgctgcctccggcggttcttcctccgtgttcagggattatcgcccacccaattcaacataacatccatgggctaatcaggactgtacatattctggaggacaactccgttattaagtttttttttctctttttcttgagaagggggggggattaatgttattttgtgttattatgctgtattaagggaaacactaccgaaatatttttccatgactctcgtccaaaattatccaatatgtgtaaagtttatcatggctgtaagacgttttatgg

SEQ ID NO: 12109 - DNA, 1849 bp, Oryza sativa
  ref <308>: DATABASE ACCESSION NUMBER: AK109457
  ref <309>: DATABASE ENTRY DATE: 2002-08-28
cccctccattatccgatacatcggagatttggacttcgttggtagctgcactactgccgtgcatgcagccgcgcgcagccagcgaaatgagccaagaatcagcagccgccgcggccacgggcatggcgccggcgccggcgaaggctcagccgcacgtgctactcgtctccagccctttccagagccacgtcaaccccctcctgcgcctcggccgccgcctcgccggcaagggcctcagcgtcaccttcactacggctctccgcgacggcatccgcgtcttcgacgacggcgacggcggcggcggcggcgtccgcgtcgagcgcctccgcggtggagggatgtgggagcccgacgacccacggctccgcatccctggggacatggcgcgccacgtcgaggccgccgggccggcggcgctcgaggagctcatccgccgggaggccgaggccgggcggccggtggcgtgcgtcgtggccaacgcctttgtctcctgggcggtccgcgtcgccggcgacgtcggtctcccgtgcgccatactgtggatccagtcgtgcgccgtcctgtccgtgtactaccactatgtctactcgctcgcggccttcccgtccggcgacgaggctgactcctccggcgccgtgaccatcccgggtctcccggagctggacatggacgagctacggccactccggatttacacttccgaccaggaaatgtggcgccagatgctcgtcggggatctcggcagcatgacggagaaggcgccatgggttttcgtgaacacgttcgacgagctcgagcacgaggccgtggcggggcttcgcaagcatataccgcttataccggtcggtccactcgtcgagccagacgacggcggcgtcgacgacgacgacgtccacggttgcaccgcgtggctcgacgcgcagccacggaggtcagtggtgttcgtggctttcgggagcctcgtggacatcggccacgacgaggtggtggagatagcggaggggcttgccagcacgggccgcccgttcctgtgggtgctgcgcgacggcaaccgcgcgctcctccccaaggacgccctcatcgacgcctgcggcggcgaccggggaaaggtggtgccgtggtgcgagcagcggcgcgtgctcgcgcacgccgccgtgggctgcttcgtgacgcactgcgggtggaactccaccgccgaggcgctcgccgcgggcgtaccgatggtggcctccccgaggtggtccgaccagcgcatcaacacgcggttcgtcgtcgacgtctaccgtgtgggcgtccgagccccggcgacgccgctgacgagggaagcgctccgcctgtccgtcgaggaggtcacggccgggccggaggcggaggcgatggcggcgcgcgcggcgatcctgggggagaatgcgcgcgccgccgtgggcggcggcggctcgtcggaccgcggcgtccaggcgttcgttgaccggataacgtccggaggcgcggagccgtgacttgcccgatcggatcacgtcgcgttggcggtttggcgcgtagtagtttgcatgggtcaccttgaagcttgaattccttcctggataggcatgtgaggatctgtttgcatgttcaatgggtcacttgacctcccgaataaagtttagcaaaactagatatagtttaacagacattgcatgtgcagtggatgctgtcggcctgttgctacttgcacggtcatcttctacccctgattttccagccttgcaggaacaggaaaccagaggttcgtggccatctgactgctgagtgcatgtgcttattacctgtgttttgcagcaatgatctgttttgtgctttgtgtttgccc

SEQ ID NO: 12110 - DNA, 2623 bp, Oryza sativa
  ref <308>: DATABASE ACCESSION NUMBER: AK109458
  ref <309>: DATABASE ENTRY DATE: 2002-08-28
gtgccccaccgcctcagcgcctctccctcgcttaaaaccaaacccacacacccacctcttctctctctctcatcgtctccgcgactcagcccactcctctctctccaccaccaccaccaccaccaccaccgcccgccaagcgcggcccgcccgacacagcagcagcaggatcggcggagaggaggggggatcatggcgacggcggcggggatggggatcggggcggcgtgcctggtggcgccgcaggtgaggccggggaggaggttgcggctccagcgggtgcggaggcggtgcgtggcggagctgagcagggacggtgggtcggcgcagcgcccgctggcaccggcgccgctggtgaagcagccggtcctgccgaccttcctcgtgccgacgtcgacgccacccgcgcccacgcagtcgccggcgccggcgccgaccccgccgccgttgccggactccggcgtgggggagatcgagcccgatctagaaggtctcacagaagattccatcgacaaaacaatttttgtggctagtgagcaggagtctgagatcatggatgtgaaggagcaagctcaagctaaagtaacacgcagcgttgtctttgtaaccggtgaagcttctccttatgcaaagtcaggtggactaggagatgtttgtggttcactgccaattgctcttgctcttcgtggtcatcgtgtgatggttgtaatgccgagatacatgaacggggccttgaacaaaaattttgcaaacgcattttacactgagaagcacattaagattccatgctttggcggagaacatgaagttactttttttcacgagtatagggattctgttgattgggtgtttgttgatcatccctcatatcatagacctggaaatttgtatggagataattttggtgcttttggcgataatcagttcagatacacactcctgtgctatgcggcgtgtgaagccccattaattcttgaactgggaggatatatctatggacagaaatgcatgtttgttgtgaatgattggcatgccagtcttgtgccagtccttcttgctgcaaaatatagaccatatggtgtttacagggatgcccgcagtgttcttgtcatacataatctagcacatcagggtgtggagcctgccagtacatatcctgacctgggattgccacctgaatggtatggagcattagaatgggtgtttccagagtgggcaaggcggcatgcccttgacaagggtgaggcagtcaattttttaaaaggcgcagttgtgacagcagatcgaattgtgactgtcagccaggggtattcatgggaggtcacaactgctgaaggtgggcaaggcctcaatgagctcttaagctcccggaagagtgtattgaatggaattgtaaatggaattgacattaatgattggaacccatccacagacaagtttctcccttatcattattctgttgatgacctgtccggaaaggccaagtgtaaagctgaattgcagaaggagctgggtttacctataaggcctgatgtgcctctgattggctttattggaagattggactatcaaaaaggcattgatctaattaaacttgccattccagatctcatgcgggacaatattcaattcgtcatgcttggatctggtgacccaggttttgaaggatggatgagatccacagaatcagggtacagggataaatttcgtggatgggttggatttagtgttccagtttcccaccgaataactgcaggttgcgatatattgttgatgccatccagattcgaaccttgtggcctcaatcagctatatgctatgcaatatggtacagtgcctgttgttcatggaactggaggcctcagagatacagtggagaattttaacccgtttgctgagaaaggagagcagggtacagggtgggcattctcgccactaaccattgaaaaaatgctgtgggcattgcggatggcaatttcgacatacagggaacacaagtcctcttgggagggtctaatgaagcgaggcatgtcaagcgactttacatgggaccatgccgcctcacagtatgaacagatcttcgaatgggccttcatggatcaaccatatgtcatgtaaatggatttgaaggaagcagcgaatttctccgaggaccctcaatcttcctgtctttcatgagcggaatgaaaactttgtacactacatggaaagggaaccagttatgcaaagttgcaaacgatcactcaaggttacccttgtaggcctgctacttggccaatatggttccagtgaccatatgcagagtcaggttcagatgaatggcacttgtgagtagtgaagaataagatgaggatgcttgaagcggtttcacatgtggctgataccacgcaagcaacctctcaatgcatcgaaatgtgagtcttggaatcaataggatttagctcccatcaattacagttgtacccttttttgcttaatactttgtcgcctgtgctgttcttatatttgtgtgaagataaattttagtccattaggtaactgtattgttgagtcttaaggtgaagactaaatagtgtttggaagctgtagctactgcgatgtcaagtgtcaaaagagatcttgg

SEQ ID NO: 12111 - DNA, 1959 bp, Oryza sativa
  ref <308>: DATABASE ACCESSION NUMBER: AK109459
  ref <309>: DATABASE ENTRY DATE: 2002-08-28
ctaaaattaaatttaaagttctcataaattaaaattaaaaagtacaagatattatttgtatttttctttgaaaaaaaagttagtgctggagaggcgccaaaattttggtgtggctggaaccaaatttttaggcgccaatcttggcggtcatgccaaaaataaaatttaaggtgaaatgttcgttttatccatacaatttggtaaatactgttaagggtgtgtttggttgagcttttcaacctgcttttgcttttgcaaaagctaaaagccaaccaaagggctcaaaagccacagctacttttgccaaaagccagcttttggtgtagtacagctcaaaagcacctctacccctgctttcacctgcttttggggaaaaaaaattacccacctataccattaaaaaaaacggttcgcttcttttctctcccatccttctccctcctcctcacttcgccgtcgctgccgctcctcctcgcccgaggccgacgccgccaccgccgaggactccgacgacgccacagccgactccgtcgtcgctcctcctcaccatcgaggccgactccgccgatgcccgaggccgataccgccgccgccgccgactccgccgccgcccgcgtctacctcccctccaccgccgccgccgaggactcctccgccgccgtgcgatctgcctccccgccgccgcccgaggcctccgccgccgccgccgatgtctccgacgacgccgcggccgactccgccgcccgcgtctacctcccctccaccgccgccgccgaggactcctccgccgccgtgcgatctgcctccccgccgccgcccgaggcctccgccgccgccgccgaagtctccgacgacgccgcggccgactccgccgccgcccgtgtctactccccttcgccgccgccgccgccgaggactctgccgtcgccgttgaggccgaatccgtcgccggctcgccgccgaggccgactccgacacagccgaggtcgactcccgcgcgttcgactccgccaccgctcgcgtttgcctccccgccgccgccgggccgccgaggtcgactcagccgccacgcgcgtctgcctcccgcgcatctgcctcctcctccgccgccgcgcgcgtcttccgccgccgccgaggccaacgccgcgctgccgacgccatgcgcgtcatttttttctttcctctttttttcccttcttttccgacggcgactaccactgccgccgcgactcctcctccaacggctcatccgccgcggcggtctctcctccctattcccctacctcagcgtcccccggaggtcggcggcctatgggtacggggtgctcgtcgcctcgtcccgcaccacgggcgggaagccactcacctacatcccgtaggcggcggcaggccggcctcagggccaccagatctggcctcccgccggccagatccagcgaggagcatggggcagggcactcccggaggcatgggcaagcagggtggcacccccggtgagcgcaagtctggcggcgacggcgacaagaaggagcgcaagttcgagccccccccccccccccccccgcggcgccctccggcgaaaaagttaccggtggcggcggcgtccaccatgcaatggagcaccgaccatgacagggctctccgctcccgccaccccagtcagtacactagacaagtcccttcacttcatctccctcactcttaaatctcaatctcccccaacccccgcgacgtaagtgaggtcaaaaccctggtctccggagcggagttgctagatctggggggtttgattttatttgttttactcgtgtgagagctcgtgtagttggcgattcctccgcgtgggaagcttagattagtgtgtggtctagtcgcgtctcgcagatacgatcgaacactacgatgaattcgtgtttctggtgttcctttacggatgaaattgatcgaagtgtttctggc

SEQ ID NO: 12112 - DNA, 1401 bp, Oryza sativa
  ref <308>: DATABASE ACCESSION NUMBER: AK109460
  ref <309>: DATABASE ENTRY DATE: 2002-08-28
gcggccataagacgccacctccccttcccaccacgccatcaccaccaccaccaccacctcaccgccgcctcgcacgcagacggcgaggcttccggcgcggcggcggaagagtagcgcgagcgagctgagagatggagcggcggccggagctgcggcggacgatgacgctctcggagcagctgtccgcgcccgaccaggccatccgcgacttcctcaagatcccacacgacggcctcggcggcggcgacggcgagggagggaggatccccgccgccgcgggcgcctccggtggcggcggtggcgtcggtggcatgatcaactggaagccgctgcgtgaccggctccggctacgccgcgccgcgagcgcgtggatgtccgcgtcgcccaagcccgccgcgtcgaacagcggcggcggaggcggcggcggcgcgacgctgagcagcagcaacagcggcagcaaccacagcaacaagtacaactactcccccggcgaggccgcggcggcgttctcgcgcaccttctcccgcacgcggtcgctccgcccgacgccgaccttctcgcgcgccacctccacccgcctcggagccacagccttctccagcggctccaggcgcgccgcggtcgacggcggcggccacgccaatgaggacgacgacgaggaccacaccgacgacgacgacgacgacgacgaagaggagcaaggcaaggacgacgcgcccgcggcgcagatgtcgctgatggcgctactggagcaatcggacagccagtgggactcggaggacgaggacgaccaaggccacggcggtggcggcggcggcgggggcaacggcggcggcggcggcggcggcggcgcgcgcaagaacggcgacggcgacgacgacgaggacgacggcgaggggcgggaggaggagatggtgcacgtgtgctgcgtgtgcatggtgcgccacaagggcgccgccttcatcccgtgcggccacaccttctgccgcctctgctcccgcgagctctgggtcagccgcggcaactgccctctctgcaacggtttcatccaagaaatcctcgacatcttctaatcatcttcttcagaattcagatgcaaaccaagaaatcctcgacatcttctaatcttcttcagaattcagatgcagatagaacgatcatgcagcatggcggtagtagctataagatttgttggttggattggttgatggcgtacgagtggccaattcatgcgccgctccgctgaaaattaacctgaaaaaaaaattgaaacttataggggattcgatcgatcgattgatttgtgtgcaagtgcaacatgaaacgctgaaaacacttgtaatttattggcgttgctgaaagataaataattaataggcggcactgtctcattgatgaatt

SEQ ID NO: 12113 - DNA, 3605 bp, Oryza sativa
  ref <308>: DATABASE ACCESSION NUMBER: AK109461
  ref <309>: DATABASE ENTRY DATE: 2002-08-28
ggcaagagacaacccactcctcttctgaactaacccaaagatcaggtcggaggcggaggcaaacacgagaagaagatgccgcggcggcctagcggcggcggcggcggcgctggtcccgcggcggccgcggtgcgcaaggtccccctgcggaagcttctgcgtgcggcgtcggtggcgtgcggcgtgcagttcgggtgggcgctgcagctctccctgctgaccccctacgtccaggagctcggcatcccgcacgccttcgccagcctcgtctggctctgcggccccctctccggcctcctcgtccagcccctcgtcggccacctctccgaccgcatcgcccccgccgcctcccccctcggccgccgccgccccttcatcgccgccggcgccgcttccatcgctgccgcagttctcaccgtcggattctccgccgacctcggccgaatcttcggcgattccatcaccccgggctccacccgcctcggcgccatcatcgtctacctcgtcggcttctggctcctcgacgtcggcaacaacgctacacagggaccctgcagggccttcctcgccgacctcaccgagaatgacccaaggaggactcggatagctaatgcttacttctcattgttcatggccctgggaaacatacttggatatgccactggagcatacagtggctggtacaagatattcccgttcaccgttactccatcatgtagcatcagctgtgccaacctcaagtctgcctttctacttgatattatcattttggtggtcactacatgcatcactgtagcatcagtgcaagagcctcaatcctttggaagtgatgaagcagatcaccctagcacagaacaggaagctttcctctgggaactttttggatcattccggtactttacattaccggtttggatggttttgattgttactgccctcacatggattggatggttaccatttatcctctttgataccgattggatgggtcgagagatctatcgtggaagtccagatgatccaagtataactcagagctatcatgatggtgtgagaatgggttcttttggtctgatgctgaactcggtccttcttggattcacttctattgtactagagaagttatgtcggaagtggggagctggactggtgtggggtgtctccaatatcctaatggcattgtgctttgtggcaatgcttgtaataacatatgtggcaaagaatatggattatccacctagtggagtaccaccaaccggcattgtcattgcttccctggtagtttttacaattttaggagcgcccctggcgatcacgtacagtataccatatgcaatggctgctagtcgggttgaaaatctgggacttggccaaggtctagcaatgggcattcttaatttggctattgtcataccacaggttattgtgtcactgggtagcgggccctgggaccaactgtttggtggtggcaatgcaccagcctttgcagtggctgctgctgcatcttttatcggtgggctggtggctattctgggccttccacgagcccgcattgcatcaaggaggagaggtcaccgataagaatattgctacatataaattgtcggccattctttgcaattcgactcataagaggcactcggaacgctatgcagtgcatgggggaattgtatattatctccgaatcaagaaggggataatgcttgctttctccatgagctatttttgcctttttcatgccggatcatcatatgctgtcgtacattggatgatcttatgctgttgtacattggatgttggtcatttgtagagatactagtgaataaaagttgcaggagttggttcactcgagaaaattctggtcagtatgtcgtccatctgctgcacgacagcagttaggagccgaatagcatgtccatgggttttcatcaaatgttgtatcatcatttgttttttgatacgttcagacggcttcagtgctgtgtgaatatatatgtatggaatatatcgagaaaaaaaaaaaaaaaaaaaaaaaaaaaaaaaaaaaaaaggccacgtcggcctggaggatgacgacgacggcgggatgttcggccaaggcaagggcgtgcagccaggccggccaggcagcgccggcatgcgcagcgacgacggcggagacagcgacggcgcgcgcagcaagctggtgttcttcggggtggacggcggcgaggacgacgacgacgacgacggaggcggcagcgacagcagcgccggcaggagggcaaccggcggcggctggacggcggcgccgcaccagcctcacgggaggaggagcaggttcgcgctggaggagcttctccgcgcgtcggcggagatggtcggccgcggcagcctgggcaccgtgtaccgcgccgtcctcagcgacggccgcatggtcgccgtcaagcggctgcgcgacgccaacccatgcgcccgcgacgagttccaccgctacatggacctcatcggccgcctccgccacccaaacctcgtccccctccgagccttctactacgccaagcaggagaagctcctcatctacgactacctccccaatggcaacctccatgaccgcctccacgggcaccggatgtcgggggagtcgccgttggactggacgacgagggtgaggcttctcctcggcgcggcgcgcgggctggcatgcgtccaccgggagtaccgcacgtcggcgatcccccacggcaacgtcaagtccaccaacgtcctgctcgacaagaacggcgtcgcctgcgtcgccgacttcggcctggcgctcctcctcagcccggcgcacgccattgcccgcctcggaggctacatcgcgccggagcaggaggacaacaagcggctgtcgcaggaggccgacgtgtacagcttcggcgtgctcgtcctcgaggcgctcaccgggaaggtgccggcgcagtacccgcagccgtcgccggtcgtcgccgccgacgccgccgcagacgcgcagaggaaagacaagaggtgctcgacggcggtgagcctgccggagtgggtgcgatcggtggtgcgggaggagtggacggcggaggtgttcgacgtggagctgctccggtacaaggacatcgaggaggagatggtggcgatgctgcacgtcgcgctggcgtgcgtcacgccgcagccggagcagaggccatccatggccgacgtggtgcggatgatcgagagcatcccggtggatcagtcgccgttcccgggggaggacagggacatctccaccatgtcgccgtcgatcggcattaccactgacgacggagatggtcgtctcagctgctagctcatcatcatcctcctcctcattgatcttcttttctgaattctgaacaactctgcctgctgcattttttctgatttctgaaatgatgctctgctcgatcttggcattctgaagtctgaaattgctactgcagctggtattatcttgagctgcttttcacttctgctgaaatgtcgaattgtcgatgtgcctgtgcttggaagatggtgcttgtgttcttgtaagataattttggattatgatgtcgaatgcatgctcctggataacgctggcagttgctgct

SEQ ID NO: 12114 - DNA, 1576 bp, Oryza sativa
  ref <308>: DATABASE ACCESSION NUMBER: AK109462
  ref <309>: DATABASE ENTRY DATE: 2002-08-28
aacacaaaacgggagaagagatgatgggtcggtgcgcgtcgccgctttgcgctctcgccgccgcgctgatcgccgccgttgtggcggccacatcgtcgtcgttggcggaggcgacggcgacgccgccgctgccggtgctgccggtgccgacggcggcgcagctgaggtggcagcggcgggaggtgatcatgttcttccacttcgggatgaacacgttcacggactccgagtggggcacggggcgggagccgccggcggcgttccgcccggcggcgctggacgcgtcgcagtggatggacgcggcggccgcggcgggcgcgtcgctcgtcgtcctcgtcgccaagcaccacgacgggttctacctctggccgtccgcgcacacggcgcactccgtccgcgccagcccgtggcgcggcggccgcggcgacgtcgtgcgggagttcgccgacgccgcgcgcgcccgcggcctcgacatcgggatctacctctcgccgtgggatcgccacgacaagcggtacggccgcgaggtcgcctacaacgagtactacctcgcccagctccacgagctcctcactgggtacgggagcgtgtcggagatatggttcgacggcgccaaggggaagaacgcgacgaacatgacgtaccatttccaggagtggttccagacggtgcggcagctgcagagctccatcaacatcttctccgacgacggccccgacctccggtgggtcggcgacgagaatggctccgccggatccacctgctggtccaccatcaaccgctccaagatcaccatcggcgaggccggcatcgagaagtacctgaacaccggcgacccgagggggaaggactgggtgccgccggagtgcgacgtgtcgatccggccggggtggttctggcacaagaacgagacggcgaagccgctgccggagctgctcgaggtatactacaactcggtgggccgcaactgcgtgctgctgctgaacgcgccgccgaacaccacgggcctcgtcgacgccgccgacatcgccaggctgcgcgagttccgcaccgccgtgacggccatcttcggcaccgacctcgccgcgggcagcgcggcgagggcgagcagcgagcgcggcggcaggttcgcggcggccaacgtgctcgacggccgcgacgacacgtactgggcaccggccgcggcggaggcggaggacggcggcgggtactggatcgagctgcggcggccggcgtcggcggcggcgaggaagttcaacgtggtgaggatccaggagcacgtggcgatggggcagcgggtggagcggcacgaggtgtacgtggacggcggcggcgcggcggtggcgagcggcacgacggtggggcacaagcggctgcacaggctgggcgcccccgtggcggggcggacggtgagggtgtggctggcgtcgcggcgaggcccgccgctgctgtcggcggtggggctccacctcgaccccttcgccgccggcgggggcacgatgtgacgtcacaaaaacagtagtaatatggaataatttggtgagatataatatcatcatgagcaataattggtttg

SEQ ID NO: 12115 - DNA, 1979 bp, Oryza sativa
  ref <308>: DATABASE ACCESSION NUMBER: AK109463
  ref <309>: DATABASE ENTRY DATE: 2002-08-28
ctaaaatttctatataagcatatgcagattgcagagtatagtagagccacttcccctagttgcgagttcatgtcagtcttcgaaggcggacaccaactccggcaccggctccggcacggtggggagcaccgggtaattccgcgagaagcaggcgtcgcagagctcatgcgcctcgtcgccatagatggtgtggagcttgtcgagcgagaggaacgcgagggagtcgcagccgatcgccctgcggactccctcgaggtccatcctgtttgatatcagctcgccctcgctgggcgtgtcgatgccgtagaggcaggagccgatgaccggcgggctggcgatccgcatgtgcacctcgcgcgcgccggcgtcgcggagcaggcgcacgatcttgctcgaggtggtgccgcggacgagcgagtcgtcgaccaccaccacgctcttgcccctgatgacgccgtgcacgggcgcgagcttgagcttgacggcgaggtcgcggatcgcctgcgacggctggatgaagctgcggccgctgtagtgccaccggatgaggccttgctggaactcgagccccgacgtctgcgagaatcccagcgcggcgtagaaccccgagtccggaacggggatgacgacgtcggcggtgggggcgggggactcctcggcgagcgcgcggccgtaggcgttgcggcgctcgtggacggcgtggccgaacaccacggagtttgggagcgcgaagtagatgtgctcgaagacgcacgacttgcgggggcggtgcgggacgaggcaggcggaggacaccgacatgtcgcggcggtcgacgacgacgacctcccctggctccacctcgcgctcgtacgtggcgtcgatgaggtcgagcgcgcaggtctccgacgcgaacacgatggcgccgttggcgcggcggcccatcaccaggggcctgaagccgaacgggtcgcgcacggccaggagcttgtccgccgtcaggaacagcagcgagtaggccccggcgaggcgctcgcaggcgtcgcagatgcgcgcgagcagagggcgcgagagcgaggtggcgatgaggtgcaggatcacctccgtgtccgacgacgtgctaaagatggagccctgcgcctccagcttgttccgcagcgcctggtagttcaccaggttgccgttgtgcgccacggcgagctgcccgaacctgtacccggcgaggaacggctgcacgttgcgcagggaggcggcggcgccggcggtggagtacctcacgtggccgatggcggcctggccggggagcttgccgaggcgggccgggtcgccgaacacgtccccgacgagccccagccccctctccagcttgatcgtgccgtcgtcccccgcggcggcgatgccagccccctcctccccgcggtgctgcagcttctgcaggccgaggtagcagagcgacgtggcgtccgggtccccgacgacgccgaacacgccgcactcctcgcgcgggtggtcgtcgccgtcgccgccgtccacctcaccgtcatagtcgaaaggcgtgacgcggtcgtattcggggaaggcctgcagcggcgcggggcggcccgcgcggtggcgcagcgcgagaggggacggcttggcggcggagcacctgaacacctggtggtggccgtgcgccggcgcgcctcccgtggcgcagcggatgaggccggaggaggcggtggcggtggcggcggcggcggcggcggccattggtggtgtgcgtgggagttttgggagggtgagggcttccgaggatgccctcccgaacgtaagtgaagggacgagatttaaggaggcccaggtgggcgtgtggcgatcgtatttcttactaaatttttttttatacgtacgcagtgtgtattgtaccgtataatatacggtccgtgttatccggaatggtatctttgggcctcgtatttcccagttcatcccagcgaaaagaaatggaatcgtttaattgt

SEQ ID NO: 12116 - DNA, 1862 bp, Oryza sativa
  ref <308>: DATABASE ACCESSION NUMBER: AK109464
  ref <309>: DATABASE ENTRY DATE: 2002-08-28
atccgtgcttactactacagttactactactccatggccaaaatgaaacccattaaagggtaaaaatgaagggggaaaaaggaaaggaaaagaaagaataaaacatttgcatccagcccaagatgacgctgcaaatgcaaattcccgaagaaaaaagaatcaacaaaagacgagtccttgatcatcaatcattgagtccacgctccacctccctcgccgtcgacggcgagctcaccggcggaggcatctggctgctgcggtgaaggaacgtcgcgctcgtagggtgaaagccacttggcgcgcatgtactcgggcttgcgccatggcgggaggtggaggccgcgcttcttgaggctggcgcgcgcggcgtcggcggccgcggccacgaggaggcggaggcggtcctccttcccgacgaacaccgacggcaggcgctggagcacggcgcggtacgccttggtgggccgcgcgacctcgaactccgaccggaagtcgacgtcgacgaggatgcgctcgcgctcggcgcggtcggaggcgggagggaggaggacgtcgaggtaggcgtgctcgccttttgggtgggaggaggacttgtcccagcgggagatgcagaccgcggcgtcgtgccccgccgcgcggagcgagtcggcgaggaggcggaggaggtcgcgcttgcgcgcccccgcggcgcggtggcgctcgacgagcgtggagacgtcggcgaggaggttgcgttcccggaggctggcgcagtggacgaggccctgaggagaaatgcgagaaacggtcagcaccggcgttcgtcgccttctcgccgccggcaacgcggcgaacatgggaggataataactagcggtggcggagacaccacactaccttgatggtctctgcggcgtcggaggtggccgccgcctcggcagcagcggggccgtcgtcgtcgtcgtcagacgcctccccgccgtggaagcaattgcagcagcgcgcggcgcccgccggccgctcgacgccgacgccgtcctccaagaagctccgcaccatgccgtccaggcacacggagctcggctccgacgactcatccttctccccgacacccgcgaccgacgggagcctctccgccggcgacacccgcagcagctgcctctcgaacagcctcttcagccgcgacttcgccggcgccccaggggacggatcgatctgccccgccgccgccgccgccgccctcatctcctcacaaccgaacgagacgacagtgcagggtttcactggatgcgggtgcggcggcggcggcgatcgtggtcaccgacgatcgcctcacgcatagccgtcggcggcgtctcactggcttcgatcggtgcggctagggtttgtttttcttttctttttttccttttcttttcttctcctttttttgcttcgaattttcggtgtcgatctgttggaagaagacgaagaggagagcctggttttaaagggatccggaggggtgacgtggcgcgaggagatcggcgtggcatgctgcgtggtcgtgcctatctaaacgttgtcctacgtggcgactgacacatcggtcccaccggaaatgaccctgttacccctgcttggcctttagcgtgtgagggcattgagtgcagtgtcgaagctgtaaatgttgctgtattttgtgggtagttttggtatttagcgggtgacaggagaagttaaggctgcagacctgcagtttttactactctcgtgtcagtcctgccgctcgtttcgtgatgctcccacttccatcgatcaggtgatcgttggatggcaaaaaccgagtggaaagcctttttttttcaagcgatttagaaggaaacaaaggatgtgtttagttc

SEQ ID NO: 12117 - DNA, 1541 bp, Oryza sativa
  ref <308>: DATABASE ACCESSION NUMBER: AK109465
  ref <309>: DATABASE ENTRY DATE: 2002-08-28
atcctgtgatgttgcacactgtctcacttcatttggctcatgagctcatgctcatctcttcccagtcccaccacatgactcaacaacacattctctgtctctctctcgctttctagttcttggcttcttgcaatgaactgattactacgttttgttctactactaccaccaccaccacatcatctccggagactgcagaaatggctgagcagaacaagaggagctcgtcggcggcggagaacggccacgccggcggcaagaaggcgagggccaacgtcgaggtgaagcaggaggaagaggaggcggaggaaggagagatgagccaagaagaagagagcgcaaagacggggcctctggtggtggccaccgccatggacgacctgcagatcgacgtcaggatcgccgtcggcttgctccactgccatgcctgcctcctccccctcaagcctcccgtcttcaaggtctcactctcactctcacttcatttcaagattcctctcttgatttcatttgtttctttttgtttttcttctcatgtcgtcgaatgtttgatagcttttgttgtaatcttggatttttgtgtttggatcaaatcttcttttgttgtgtggttttgcagtgcgaggcggcgcacgtggtgtgctccggctgccgcggcaaccacggccagctctgccgccgcgccgccgcgtacgcccactgcgccgagctggacgccatcgtcggcgccgccaaggtggcgtgcgcccacgcgccgtacggctgcgacagctacgtcgtgtacggcgcggccgccgagcaccagcgcgcgtgcccgtgcgcgccctgctcctgcccggaccccggctgcggcttccgcggctcgccggcggcgctcctcggccacttcgccaccgaccacccctggtccgtcacgcagatcagctacgcgaagccgtgcaggctcgccgtgccgctgccccggcggtgccacgtcctcgtcggggaggacgaccgcgccatgttcctggtggtgtccccgtccccgtgcggcgtcggcgtcggcgcggcggtgtgcgtggcgtgcgtccgggcgaacggcgacgacgcggcggcggcgcagtacaagtgcaagctgtgggtggaggtgccgaccaacagcgacaacatggtgatgatgacgtccaaggtgaggagcagcgacctctccggcgggttcccggcggcggagcaggggatgttcttggtggtgccgccggagctgcttcacgaggtgtccggcgagacgccgatcctcagcatccgcatcgatcgagctgctcccgccattgccaagcccaccactccacgagccaggtccctgaggagattgcagtgaagcttatgtgaatccaatagagtatatgcttaagatgacagtctggtattagtacttgatcttttgtgtattgactagcactagccaatatatgagtaatggagtatggtttaactcatgacttgtgtaggaattttgtacggtttgactctaatgttgttagtaatttaacttgagatttgtg

SEQ ID NO: 12118 - DNA, 1838 bp, Oryza sativa
  ref <308>: DATABASE ACCESSION NUMBER: AK109466
  ref <309>: DATABASE ENTRY DATE: 2002-08-28
agcagcccaggtgcacatgggcccagcaaccgcagccgcggaggcagcactcgcccgccgcgccgccgacccgctgcccgcgctccgccgccgcgacgcgctcccgctcccggcgcgcctcttcgcgcagctccacgctctcgtcctcaccgccggcctcgcgcgccattcccccaacttctccctcctcctccgcctcgcctcccctctcctccccgtctcccaccgcctccgcctcctcctctcctccccgctcccgcccaccaccttcctcgccaactccctcctcctcgcctcctcctcctcccgctgcctcccctccgcgctctccctctacgccctcctcttcctctcctcctcgccgccgctcctccgccccaacgccttcacctacccgccgctgttccgcgccgcgcctccggccctcgccctcgcgctcgccacccattcggtcaaattcctcggcgcccatgctgcctcctgcgaccgcgtcctcggtgccgcgctgctcggcgtcttcgcgcgctgcggcaggatcgcctcatgccgccgggtgttcgaccggatcgcgcaccccgacctgccggcctggaacgcgctgctctccgcctacgcgcgtcttcgtgccagggacgtggcctgcgccacctctgcggcggatgcaatcctcgagctgtttgtgcggatgctatccttagccattgaacccaacgagatcacgctcgtcgccgtcatcggcgcgtgcggcgagcttggcgctgtcagccacggggtgtgggcgcttgtggagatgtatgccgggtgcgggaggctggacctggccgagcaggtctttgcagccgcttcggacagggacacgcgctgctacaatgcgatgctccatggcttggcagtccatggccatggccgtgctgccctctccctgttggacagaatgcacagtgcgggcgtgccggtggatggcgtcactgtgctatccgtgatgtgtgcttgtgcccatgctggattggtggatgaaggtctggactacttcgacagaatggagatcgaattcgggattgagccaaggattgagcattacggatgcatgattgacatgctgagccgggctggtcgacttaacaatgccgagaagctgatccacgaaatgctcatcgtgccaaatgccgcgatatacaggtctctgatccgggcctgtggcattcatggcaagctggagctcggtgagaagatgatcgcagaattgatgcgacttgaaccggatgacagtggaaaccatgtcctgatttcaaacttctatgcgagaacgaaccgatgggaggatgccaagaaggcgaggaaggagatgaagtccatgggcattgacaagaaccctggatcaagccttgtagacatcaatggagttctccatgagttcttggtgggtgacaagacacaccctgcctcaaaggagatatacaccatggttgaggagatagaaaccaggttaatcgagtgcggacgccggtcgagcacctcgtctgcgttgtttgatgtcgaggaggaggacaaggcggatacactgtcctaccacagcgagaggctcgccattgcctttgctctgatcgcttccaatccaggagctcccattaggatcatcaagaatctccgggtgtgtgccgattgccatgagagcgcaaagcttgtatctcgggtgtatggtagagagattgtcatgagggaccgtacccggttccatcacttcagagacggggtgtgttcttgtggagatttctggtaaatactcgttgtgttgtattgtacattatacagtgtaatgtgctgtagatttctctcat

SEQ ID NO: 12119 - DNA, 1597 bp, Oryza sativa
  ref <308>: DATABASE ACCESSION NUMBER: AK109467
  ref <309>: DATABASE ENTRY DATE: 2002-08-28
attcaattcctcacttgatccatccatccatctatcgagtttgccacccggccatgacgcctccaccgccgtcgccgccgcacgagaggaaaacgtgggcggagtcggtggccagcgagtttcgggcgcagcgcggcatcgcgttccctctcatcgccatgaacctcacctggttcgccaagctggccgtcaccaccgccttcctcggccgcctcggcgacctccagctcgccgccggcaccctcggcttcagcttcgccaatgtcaccggcttcgccgtcctcaccggcctctgcgccgccatggaccccatctgcgggcaggcgcacggcgccagcaacgggaagctcctccgcaagacgctggtgatggcctccatcctgctgctgggcgcgtccatccccatcgccttcctgtggctgcacgtggacgccgtcctcctccggttcggacagcaggcggacatgagcagcaacgcacgcagctacgtggtgtgcctcctcccggacctcgccgtcacctccttcgtcaacccgctcaagtcgtacctgagcgcgcagggggtgacgctccccacgctgttcgcctccgccctggccctggcgctccacgtccccctcaccatgtggatggccaggaccaggggcatccagggcgtcgccaccgccgtgtgggtcagcgacctggccgtggccgtcatgctcgccggctacgtgctcgtctcggagcgacgacggaaggcgggagggggcggcggatgggtggagcagacgaggggtgagtgggtccggctcctccggctggccgttcccagctgcctcaacacctgcctggagtggtggtgctacgagatactggtgctcctgacgggacgcctcccggacgcccggcgcacggtggcggtgatggccgtgacgctcaacttcgactacctgctgttcgcggggatgctgtccctgtcggtgagcgcgtcggtgcgcgtgtcgaacgagctgggcgcgggggaggcgtgggcggcgaggcgcgcgggcatggtgtcgatcgtgggcggcgcggtgggcggggtgggcggcggggtggcgatggtggcggcgcggcgggcgtgggggagcatatacagctcagacgccggggtgcgggagggggtggggagggcgatggaggtgatggcggtgctggaggtggtgaacttcccgctgaacgtgtgcggggggatagtgcgagggacggcgaggccggcggtggggatgtacgccgtggtggccggcttctacgtgctggcgctgccgctcggggtcgcgctcgccttcaaggccagacttgggatccagggcctcctcctgggcttcctggtgggcgccgcggccagcttggcggtgctcctcaccttcatcgcgcgcatggattggcccgccgaggcccaaaaggcgcggactagaaccacagcaaccgtggcccaattccaccaacacgacgaggtcgtccagccttgattcataaaccatgcatccgatagggtaattagtttctgcatcccgtttgggaattactccttactttgggggattacttgcttgcatgaacaacaactgcaact

SEQ ID NO: 12120 - DNA, 1654 bp, Oryza sativa
  ref <308>: DATABASE ACCESSION NUMBER: AK109468
  ref <309>: DATABASE ENTRY DATE: 2002-08-28
gaaatgagcatataacatgggaaatgagggcaatccgagtgctgccgatgtttgtcttgcctgctgtatcttctgtgatatattcaacagttgtaaaattcacaaggatgcttgagcggaaagaccagaagacacttgaaaagctgagagctgagaggaaggccaagattgatgagctaaaagagagaactaattattacctcacccaacagcttattcagaaatatgacctagatccagctgcaaaggctgcggcagcatcggtattggcatctaagctcggagaggaaactggcttaaaagtacatgttggtgaagaaccaaaactggattcagcagttgctaggagcaatgatgtggagatatctccatcagaagggctgagaaacaggaagcaatccaatgcaagaggtagccgaactggaggcaccactgctgctcaaaatccagctcagggagctgaatccagtctgacaagtagctctggcctggaacagcctccaatggtggtagaacattttcaaggctcaggggcaagtgatggtggatggatagcaaaaatcgctgctttacttgttggggaggatccgtcgcagtcgtacgctttgatatgtggaaactgtcatatgcataatggcttggccaggaaagaaatcatctcctcctcctcgttcccctgtttccctcctctcgtgctctcgtgttctacttttgctagtcctcccaccctacttcgatggcgaaggtgttggctaccgtgctctgcgccgcgctggccttcgcggcggccgtggccgtggcgaacgccagggacctcgtggtcggcggcaacaacggcggcgggtggaaggtgccggcgcagcccgacgcgctcaacaggtgggccgaggccacccgcttccacatcggcgacaacctcgtgttcaagttcgacggcgcggcggacgcggtgctggaggtgacgcgggacgactacaaccactgcggcacggggagcccggtcgccacccacaagcccaccggcggcgccgccacggtgccgctgacgagctccgggtaccacttcttcgtcggcgccgcgccggggagctgcgacaagggcgagcgcgtcatcgtcctcgtcatgtcggagaagcacagccgccgcggccaggggttcttcgcgcccgtgccggcccccgcgcagtccccgctggccgccggcctcttccaggcccccgccccagcgccggcgactgggaacgccgggaggaccgcggcgagcggcgccgtgctcgttgccgccgccctcctcggcgcggcggtggccgggttctgagaagatggcgttcgcttggggctttaggaacttggggggaggatttggggattctttgattttgtctagatttggttgctgtatgagagctcaagaagaaagtgcttcttctgtctgtagaagaaggggcttttaactatttaccactcttacgagtggtgcttaacgatttgccactaagcccacgtgtcataaacacatgagggcccacatgtcattgacaaggtgtggtaaatcgttaattgacatgtcacaagagtggcaaatagttaaatttcccgtagaagaatgggggtaaatttataaattataaatgaatgatgaatctatctgatg

SEQ ID NO: 12121 - DNA, 1689 bp, Oryza sativa
  ref <308>: DATABASE ACCESSION NUMBER: AK109469
  ref <309>: DATABASE ENTRY DATE: 2002-08-28
acagctcaagcttacgcgggagctaagctgagctacagcgagcggcggcggcggccatggagtgggatctcaagatgccgccggcggcgagctgggagctagccgacgagctggagaacagcggcggcgggggtgtaccggcggcggtatcgtcgtcatcggctgcggttggtggcggcgtcaatgcggggggtggtggcaggcaggagtgctcggtcgacctcaagctcggcgggttgggggagttcggcggcggcggcgcgcagccgcgggtcgccgtggcgggcgagccggccaaggggaaggggccagcggccgccgccacgggagcagcagcagcagcgtcgtcggcgccggcgaagcggccgcgcggtgcggcggcggcggggcagcagcagtgcccgtcgtgcgcggtggacgggtgcaaggaggacctgagcaagtgccgcgactaccatcgccggcacaaggtgtgcgaggcccactccaagacccccctcgtcgtcgtctccggccgcgagatgcgcttctgccagcagtgcagcaggtttcacttgcttcaggagtttgatgaggccaagcgcagctgtagaaagcgactagatgggcacaaccgtcgccgcaggaagccacagccagatcccatgaactctgcaagttatcttgcaagccaacaaggggcaagattctcaccgttcgcgacgccgagaccggaggcaagctggacagggatgatcaaaaccgaggagagcccatactacacgcaccaccaaatccctcttggcatcagcagcaggcagcagcatttcgttggctccacctctgacggcggccgccgcttccctttcctccaggaaggcgagatcagcttcggcaccggcgccggcgccggcggcgtgccaatggatcaggcagcagctgctgctgctgcttcagtgtgccagccacttctgaagacggtagctcctcctcctcctcctcatggcggcggcggcagcggcggcggcaagatgttctccgatggtgggttgacacaagtgctcgactccgattgtgctctctctcttctgtcagctccggcgaactccacggccatcgacgtcggcggtggccgggtggtcgtccagccgaccgagcacatccccatggcgcagcctctcatctctggccttcagttcggcggcggcggcggcagctcagcctggttcgcggcgcggccgcatcatcaggcggccaccggcgccgccgccaccgccgtcgtcgtctcgacggccggtttctcctgcccggtggtggagagcgagcagctgaacacagtcctgagctccaatgacaatgagatgaactacaatgggatgtttcacgtcggcggcgaaggctcatcggatggcacgtcgtcgtctctgccgttctcatggcagtagttttttcagtaactgtatgttgctgccttagtttcagtagagttggttcttcatttcttttcagtgatcaaattattgtttctgtttcttttctgccatggtaagttccttttttttttcttcttcttgccttcatttgagttaattacagcattgatttgtgtgaacaaaattcatcataaatcagttcctcgcgagatcattggtctcaacatgatggtgccaagtgagaactgcagtattgtgcagttttcagttttgagtc

SEQ ID NO: 12122 - DNA, 2176 bp, Oryza sativa
  ref <308>: DATABASE ACCESSION NUMBER: AK109470
  ref <309>: DATABASE ENTRY DATE: 2002-08-28
acgttttacgcgcctcgatcagaaataagttcacacagcctaataaacccctcgagaagacaagtgtaatcgccaggggaagcgcgcgagatggacgcagctggcgtcgccgcaaagccgtcgctgtcgaggaagccctcgccgtcgttccgcctccggaacggcagcctgaacgcgctgcggctgcgcagggtgttcgacctgttcgaccgcaacggcgacggcgagatcacgctcgacgagatggcgtccgcgctcgacgcgctcggcctcggcgccgaccgcgcggggctggaggccacggtcgggggctacatccccgcgggcgccgcggggctccgcttcggcgacttcgaggcactccaccgcgcgctcggcgacgcgctcttcggccccgtcgaggaggaggagcccgggaagcaaggggaggacgacgacgagggcgacatgaaggaggcgttccgggtgttcgacgaggacggcgacggcttcatctccgccgccgagctgcaggccgtgctcaagaagctcggcctccccgaggcccggaacctcgccacggtgcaggagatgatctgcaacgtcgaccgcgactgcgacggccgcgtcgacttcggcgagttcaagtgcatgatgcagaggatcaccgtgtggggcgcttgacggcggcgagcgaggccgccgtccttcgtcctctccccgtgtgtcatgtatgtatccacgcattgcaacgtgtctctgctcggcaaatttttcttgatcgtcctgtggaatcctcctgttcttgacttgatctgcttaattgtagcattgagaattttctgtgaccaccatgaaatgcgacattatagaaaaaaaatggcatgcgaagatttcattggtatttactccgttacttaaacattgtttttgttaattattcctatccacatatatctaagaggaaagttgaccagcttcaccacaagtttttctttcttcaatttcgtggtgctttcgtgcacatgcctaggcctatcatttccctttgtgcgttgacgtattcagccgtcatttgaataagcgtttgcttgaagaaatggcagagaaagaagaaatgggcttgacatgattttctattgaaaatattgtggacaggtttaaaacatagaaatttcgtagaaaaccgttcaatattctaaccaaggggaaaatcattagcactaaacagggttatagagaacatgggaagtttgttctatgatcctactacaggaatataatatctatggaggcctttggaacaaaggattagacattacagattactttaaagttattatctaacagactaatccatagtaattttggaaaaaaaaaatccatgaggtcaacttcatgttttcatcccctttcttgaaaatcaacatcccccccctccccctattacatccaaacctctcttttaaagtactcgtgtttttccatcagaatttgagaaggcatttctccttgttttcctcctttctattttgagttcccttcattccaaaagcttaattgtttgaaatctaatagataactcttttaaatccaaggaggcatagagttctcacatggaccattatcttcttgttctttcattagtacagtagtgtacgtttaagcacatgaagattgctaggccaacctaacgtctgcttatgaatacctaccacatgttaataggaacttgcatcagcatgtttgcatgctctacactttatatgattacgcattgctttcttattatacatgtttggctttaaaccaagtttttatatgccttcaagtaatgtactccattgatttgcagattctgaagcatctgaagattgatctaggagctataacattacccttggattgtttcagtcaatactgattcagtgtttgttgtatgttggtcataatgcaggtaatgatgactgtaatttcagtactgtttgtttaactcttggttttacccttcactaatctaggcatgtagccagataggtcttgtgcgcatctgtgtcattgtgttcctcctaatccaataagctttctgtatgtaagaagaacaatgtgacctatatcagaacaatggtctttttgttaattaaaattgtaataagcgtgtgcttggttactggtggaatgttttttttccctttgt

SEQ ID NO: 12123 - DNA, 1365 bp, Oryza sativa
  ref <308>: DATABASE ACCESSION NUMBER: AK109471
  ref <309>: DATABASE ENTRY DATE: 2002-08-28
attactaacaaacagataatctccacgcctcggcaactccgctccccactgccatggccggcagcggcggcggcgaccgcggctcgcccgaggcggagctccggcgcgggttcaagacgctcgccgtgacgcggcccgacccgtccgcggcggtctacgaggtccgcctcaaccgccccacccggctcaacgccctcagcccggacgccttcgcggagatcccgcgcgccatggcgctcctcgaccgcgcccccgccgcgcgcgccgtcgtgctctccgccgccggcccgcacttctgcgccggcatcgagctcggctcccccgggagccccgccacggccccctccggcgaccccgcgcccgcggccgccgaggggctccgccgcgccatcctggagatgcaggcggcgctcacggccatcgagcggtgccggaagccggtggtcgcggcggtgcacggcgcctgcgtcggcggcggcgtcgaggtcgtggccgcctgcgacatacggtgctgctccaaggacgccacgttcgtgctcagggaggtggacatggccatcgtcgccgacctcggcgcgctgcagcggcttccgcggatcgtcgggtacgggaacgccgccgacctcgcgctcaccggccgcaagatcaccgccatggaggccaaggagatggggctcgtgaccagggtgttcaattccaagcaagaattggatgctggcgttgcaaagattgcaaaagaaatatctgagaagtcagcatgggcagtgatgggaacaaaggctgttttgctgagaagcagggatataacagtagagcagggcctggagcatgttgcaacatggaacgccgcaatgctgagatctaatgacctggaggaggctatccaagccttcctagagaagcggaagccagtcttctccaaactgtaatgatcatacaccatacttgacagaagaaagttatatttgaatcctagtacttcagaataagggaaaggctataaatctatgattgcagttggcaaatatgtgaagagcttacacttagtacagtggaccagaaatgcttccaatcaatgcatcaaagatctccaacatgttgctgctttgttgatttgttcaactgtggaaatgtgttctataatgacctgaagaatgctataaaaaggacttcctggagagggggaaagcctgtctaatccaaactgtaaagttgaggttgtgtgaatcctggtacctaagaagttgagattgtaaacttgtaagagtagcccacttttgggaaaatatgtgaagatcttacatgtagtaaactgaaatgctccgtttaataagtcaaataattcacgatgccgtggcttggttt

SEQ ID NO: 12124 - DNA, 1717 bp, Oryza sativa
  ref <308>: DATABASE ACCESSION NUMBER: AK109472
  ref <309>: DATABASE ENTRY DATE: 2002-08-28
gtccccctacatccccccaagcccaaatgctgccctccccaccactcgccgcgctctccaaagccgccgccgccgccgccgcccgccgcgccgccacggtcgccgcgcgcagccgccgccgcctcctcgtcctccccgctgtcgcctcgctggtaccggggccacctcctgtgctctgccgtcgcgtccgcctcatgccgcagctggagggcccgcgcgctcccccgccgccgcacggcaggggcttcgccgcggccgccgccggtggggatggggctacactggatgctggtgattcggagctggtggtggtctccttctacaggttcgccgacttccccgaccacgccgagctgcggtggccgctcaaggagctctgcgaggagttgcgtgtttcaggtggtattatccttgcgccggaagggatcaatggtagtatatgtggaacaccagaagctgtggagaaagtcttgaacttcattcaatcagacgaccgcttgaaagggttacggatgatccagtctcctgttactccggaagacgaggctatccatcatggacataccagtcaatctcctgttggtgctggggaagatgcacccttccggtgggatcatgtccgtgtgaaattgaaaaaggagatagtcgcacttggagatcccggtgtcatgccaactaaaacagttggaaaatatgttaagccaaaagactggaatgcattgataagtgacccagatactgttgttattgatgtgcgcaacatgtatgagatacgcataggaaaatttaagagagctgttgatccatgtacgaactcattcagagagttcccatcttgggttgatgatcagtttcaattggctgaatctgacagtcaactgtgctcagaaaataatgacaatacaattggcagacagtcggaagatgtgaattcaagcaaacccaaagagttaccacgagttgctatgtattgcactggtggcataagatgtgaaaaggcatcaagtttcctccttagcagggctttaaagaggtttatcacttggagggtgggatattgaagtacctagaggaaatccccaaggcagaaagcttgtgggagggtgaatgctttgtgtttgacaaacgtgtctcagtggagcacggattagcccaaggaacccacaaactttgttatggatgtaagaaaccagttagtgatgaagacatggaatctcctgagtgggagtatggtgtatcatgtccatattgctttgcaaccaaatccgaggaggagaaggaaagggcaagggcacggcagagacagtttgagacatggggagttattggcggccctgataaaggaagaagtccaaaaaggctggaagctaatcacacagctgaagagcccaaacagttgtcgagctcagtctaactcaaactgggtaactgaaacttgttccattaccacttctgattgattgacgttttgctgacgaagcgagggatccttttgtatcagccgcgtcttcttttgcacctttcttgtagtcttccagattatgtcttggtcccttatgtagccttacgataaagcttgaagttgtttttcggtagcaccgttgtttgttccatctggttctaattgtaaaaacagcagttactcttatgagttgcagcagtttcatgaataattatgcgctgagctaaagaggcaccgagatatcggtttggatgg

SEQ ID NO: 12125 - DNA, 1258 bp, Oryza sativa
  ref <308>: DATABASE ACCESSION NUMBER: AK109473
  ref <309>: DATABASE ENTRY DATE: 2002-08-28
agctcactcatcattagtttaagtgtgaggccaccgcgagcggcggcgccggcgacggcgagtactcgacctcgccgctccgtccgtcctgctcgcggcggccgatgaccgcaccacccgatcgagaccgcggccatctcgggaacaccggcggcgatgaggaggccccggcccttggcgcggacgcgtctccccgagcggcggccgcgcgcgtcggaaccctccgccttcgcggggccatccctccccccgtccgcgccgccacggggcgcatcggcgttgggggatcggggaccgtgggggcggtggggaggcgatgccgcggcttccggtaaggggagggcgggtcggccaaggtgagatctgagccgcctcgccatggattttctttcgatttcgtttttagccacgttttcgagattcggtcatcaccaccacaatctctcttcctcgtccttctccctcacggcctctatggcgcaccgtgtgctgtgtgcttgtgtgtttataccctaaccgacccaatgtcaagtgcagttgcttgctgacgacgagaaattggagattatgccattgttaaaaggggtttcgcaggaattccttcccacagcttgccgacgatcaatccgccgagaggccgcagcgtccggattcccatctctaaggtgagccgccgccgtgcagtgaaggcaattggaacctagggtggtgtccggatcggctgtggactcttgggggttttggtcgtcgtcgtgagcttgagccgacttggctcgttagagcaggtacaattggaggagagagagagagagaagaagaagaagaagaaaatcaggctgtagatctggctatactattatacttgctcttagtgttggtgatcgcatcagcatatgctgtatttgtggcagggtactacgtatggtccgcaatgaacacagagggcgatgacgatcgaccttggctgaaataagcatgccttcaagcaattgaggctgctgtgggtattaaattggaccctccctctaccccctttgagcctttctagtcatgtgctaatgccagtggctttgtccttggatggtcattcgtttcgaatgataaccagggtagctccactaccgctagaactgataggtctggtgataagggatggtgggggttgggttatttgattgatcaaaggcgaagctgagcccaaagcgaacacaaaaaaaagacacaaaaaaaacacaaaaacaaaaacgacacaagaaac

SEQ ID NO: 12126 - DNA, 2253 bp, Oryza sativa
  ref <308>: DATABASE ACCESSION NUMBER: AK109474
  ref <309>: DATABASE ENTRY DATE: 2002-08-28
aaatcgatctctctcctgccatcttcagatcgcatcgattttctccttttcgagtttttttccccttcgcttgagagctttcgacgagagcgagggagagggagatcatggccggcaagggagacgggccggcgatcggcatcgacctcgggacgacctactcgtgcgtcggcgtgtggcagcacgaccgcgtcgagatcatcgccaacgaccaggggaaccgcaccacgccgtcgtatgtcgcgttcaccgactccgagaggctcatcggcgacgccgccaagaaccaggtcgccatgaaccccatcaacaccgtcttcgatgcgaagcgtctcatcggccggcgtttctctgacacgtcggtgcagagcgacgcgaagctgtggccgttcaaggtgctacccggccccggcgacaagccgatgatcggcgtgcagtacaagggagaggagaagcagttctccgccgaggagatctcgtccatggtgctcaacaagatgaaggagacggccgaggcctatctcggaagcaccgtcaagaacgccgtcgtcaccgtcccggcctacttcaacgactcccagcgccaggccaccaaggacgccggcgtcatctccggcctcaacgtcatgcgcatcatcaacgagcccaccgccgccgccatcgcctacggcctcgacaagaagtcgagcagcgtcggcgagaagaacgtgctcatctttgacctcggcggcggcacattcgatgtctccctcctcaccatcgaggagggcatcttcgaggtgaaggccaccgccggtgacacccaccttggaggcgaggacttcgacaaccggatggtgaaccacttcgtgcaggaattcaagaggaagaacaagaaggacatcacgggcaacccgagggcgctcaggcgtctgaggacggcgtgcgagagggcgaagaggacgctgtcctccaccgcccagaccaccatcgagatcgactccctctacgagggcatcgacttctacaccaccatcacccgcgccaggttcgaggagctcaacatggacctcttccgcaagtgcatggagcccgtggagaagtgcctccgcgacgccaagatggacaagagcaccgtccacgacgtcgtgctcgtcggaggctccacccgtatcccccgcgtgcagcagctgctccaggacttcttcgacgggaaggagctctgcaagagcatcaaccccgacgaggccgtcgcgtacggcgccgccgtgcaggccgccatcctcaccggcgagggcaacgagaaggtccaggacctgctcctcctcgacgtcacgccgctgtctcagggcctcgagacggccggaggcgtcatgaccgtgctgatccccaggaacaccaccatccccaccaagaaggagcaggtcttctccacctactccgacaaccagcccggcgtgctcatccaggtgtacgagggtgagaggacgcggaccaaggacaacaacctgctcggcaagttcgagctctccggcattccgccggcgcccaggggtgtcccccagatcaccgtgtgcttcgacattgacgcgaacggcatcctgaacgtctcggcggaggacaagaccaccgggcagaagaacaagatcaccatcaccaacgacaagggccgtctgagcaaggaggatatcgagaagatggtgcaggaggcggagaagtacaaggcggaggacgaggagcacaagaagaaggtcgacgccaagaactcgctcgagaactacgcctacaacatgcggaacaccatcaaggacgacaagatcgcgtccaagctgccggaggccgacaagaagaagatcgaggacgccatcgacggtgccatcagctggctcgacagcaaccagctcgccgaggccgaggagttcgaggacaagatgaaggagctggagggcgtctgcaaccccatcatcgccaagatgtaccagggcgccggagctgacatggccggaggcatggacgaggatgctccggcggccgccggcggaagcagcggaccagggcccaagatcgaggaagtcgactaaatgatcgatcttttatcgcttttagttatacctgcaataatttgtcgttcgttttacaccgaattcttgagtgctcctgcaacttttttggtacgggctttcattatggccccggttttgctttacttgttaaagtttggattattatggttttattaatatagtattgagtagcaatttataccattgctct

SEQ ID NO: 12127 - DNA, 2936 bp, Oryza sativa
  ref <308>: DATABASE ACCESSION NUMBER: AK109475
  ref <309>: DATABASE ENTRY DATE: 2002-08-28
gggaggcgcaacgcaagcgcgatgggctacggcttctccaccaagctcacggccttcttctggccatggcgcttctcgccgtggcgcttctcgccgccgccctccacgccgatgccgcgcccgcatctgccgcccccgggagctccttccccgacgcctatggcgaccgcgcccgcgctgcacaacttcccccacgcaagcagcagccgcaggtcgcctacgctctgcgacgggcttccgctacctcatcggcacatctccacggcgccacctcccggtccttcaccggcgtcgccaccgaagaccattgtcaagctcgcatcatctattggcacggtggtccctgtggctttatctatagtaccatatttctaccaagtctacacaggaaattttgagaggacaatagaagtgtatggtgcccccgccatgttggctggatcaattaacagcataatttggttgacgtattcaataatggccagcaaaaaggatcttaaccttgctcttatcctgatgcatgcattactttgcatgtcgacattcacttacttgatgtgtatctgtgcttgtaaaagagccactaaagagggttatattcttggagcctttttcataggatgcttatcagccatatccattgttgtgcactgggacttaaacccatcgaaggttgtgaagattatattcagatgttttggtggaattagtttgctgtcttgccactatattctgctgaatgatattttggggagtgttcccaaaagatctcagaaagttgctactggatttgaccttattctaagttgtataacgaacttggtgactttcatcataacttttcatgatcatcctgagcacactacttctctgatcacttctggagtagggtttgtcctcaatgttgtggagatcgtacttcttgtcatagtaacaattatgggctacttctttccattgtctgagcatccagatgctgatgttgaagcgtcacgtcacatatcagccacaagaggtatttgtttttttagtttattatttaagagtttgtcctaaaatatagctacttctcaatatgcttttttttttgtctcaactaataataaccatccttcatgtaatttcttcacttactcatctaaaccaatcacatttattctcatttaattttacctctattcttaattctgtaaaaaaaatttaaaggtacctatatttttaagatggaaatagaatctatttggatgctgatgtatggtttcaagcttatgattagcacatagttactggtgtaggcatgataccacttgaagatgcactaggaacccctgaaactgatgattttatagctgtactcactcatgagccccaggtgccccagttcgaggtctcttacctgattttgcaagtgaggaatgagtttgaaatttactctcttagatccatggtgaatcccaatgtacaaattattactcgagtgctatttgtagaagtaattcaaaggacaatgatgcggattgagcgtgaccactacattcaaattcttttacaagcctcggggatagctgctgcagaaccatacccattgatgcttagggatgttgaaattcactaccagaccatccgtaatcagcatgaagctctcccgtaatagagctgcaacactggcatgcacttcttctcagtccggtgccaaggcacagaaacttgaggcgaagagatatgacaactgattgaactgagttgagcgtataggagtggagatgtgacgacagaattcagaagagagatgtgttctccgtttggatgttgcagtagtatgcttgtacggttctaccacatactactccgtattgtagtagtatgtcctcacaaatgagcccttctaaacgtcctcaatgtgacctggcgtgtccataatgagtcaggacacgataagcaatcagatcacctgcaccgatgcattgcacaggcacagctccaaagaatatattagttgtcctccgtttcatttggattctccgcaaggggatcgcacattgagatgaacgtggattgtccgtactactcgtcggcgcgagcgcgacgcctcctccctcctccgcgccatctcccgtcgcaccaggtcaggagcctgacgcgtcgccgtcgatccgcgggaggaagagaggcggcagcgtaccactactagtctactaccgctgcgctgccgtcctcgacgtcgacaccgcgcgcgcgcaagcaggtgagacgccgctgctcctggtggccacgttcggccacaccgcgagacgcggcggccggcctacctacctcctggagcgcgccgccggcccgtccacgcctgaccccgacgtacggcggcgacatcacaacgccgccgccgcctcctgtctcgctctccaggcggtgagccacggcgcgccataagccagcgtgctcagcgccggccccttggttccccgcgaacaatcctgaccccacggcgagtcggcgacgtcgacggatactgagagtgcatccacccccgtcagccacagctgcctcggtgtccaccagcctagcaagcaagccatgtcgcccatggccatgccggctgccaatctgcccggcgccccacggcgcgtcgtcagcgagtcggcggctcggcgccgtgctggcttgggcatgggctgtcggaccagaaagaacggtttgcataattgcattgtcgtgtactcgttcgtatcgggtgagaatgtcaccaatggaagcgtaaagagagcaagtacgttttcttcttcagaattcgcctagattcgtccgttcgttttctttgagtgtgcttgttcagttgtatatcctcctttctacatggctacatctgtaaatgcaaagtactcctacatggaactagtatggatggaactgctgccccatccttgattcctggagtc

SEQ ID NO: 12128 - DNA, 2019 bp, Oryza sativa
  ref <308>: DATABASE ACCESSION NUMBER: AK109476
  ref <309>: DATABASE ENTRY DATE: 2002-08-28
agcaaatcactccaaaccttgcttctcctcctcctcctcctcccccatctccggcgccgcgcgccgccgcccggaggagagcttctcgccggtgctgctactgctactaatccccacacccacctgctctcagctcagctcagctcagcttcccagctcggcgaagaagatgaagacgaggagctcggggaggggaggaggggaaccgaggaggaggctgaggaatgcggctgtcatggcgctcatgctctcctccctcgtcgctctctccctcgtccgcgccaggttctcccccatcgctagtgatggaggcgaggccctcaagctcaaggccgacgaatccaagctcgtcgtcaccaccaatcacgccgtcgtcaacaccgaatccggcgactcctcctcctcctcgtcgtcggcggctgcggaggaggaggaggaggtcgccgctccggcgaagcccgccgccgccggcggcggcggggccaggccggtgtgctacgagacgagccgccgctccgacacctgcgaggccgccggcgacgtgcgcgtggtggggggcagccagaccgtctacgccgacacgcttgaccgcgagtggaagacgaagccctactgccgtaagcacgacgcgttcgcgctgtcccacgtcaaggagtggacgctcaggccgctcccctccggcgatggcggtggcggtggcgcggcggtggcgccgaggtgcacgacgaacagcacggccacggcgttcgtgctgtcgaccggcgggttcacggggaacccgttccacgactacaccgacgtgctcatcccggcgttcatcaccgcgcaccggttcggcggcgaggtgcagttcctggtgagcagctacaagtcgtggtggatgaacaagtacatccagatcttccagcagatgagccggcacgacgtggtggacgtcgacgctgacggcgacgaggtgaggtgctaccggagcgcggtggtcgggccggagttccacagggagctcggcgtcgacccaaccaagacgccgtcgggctactcggtgctcgacttccgcaagatgctccgcggcgcgttcgggctggaccgcgccacagcgacgccgagcggcgaccggtgggacatccgccgccgaccccgcctcctgatcatctcccgccgcgccgcccgtggccgcgcgttcatgaacgagcgcgccatggcggacatggcggcgagcctgggcttcgacgtgcgtgtcggggagcccgacgcgtccacggacacctccaagtttgctcgcctcgtcaactcctgcgatgtcatggtgggagtgcacggcgccgggctcaccaacatggtgttcctacccgccggcgccgtgctggtgcaggtggtgccatacggcaagctggagtggctggcccggaacaccttcgctgagccgtcgtccgccatggagatccactacctggagtacgccgtgcagcttgacgagacaacgctgagcgagcagtaccccgccgatcacccagtgctgcgagaccctatggccatccacaagcaaggctgggaagctctcaagaccacttacctcgacaagcagaatgtccggccgcatctcggccgcctcaagaacaccttcctccaggccctcaagctgctgccccatgacaaggaaaccatgaattagcttagctcatcagaactgttgatcgtcatggattgtcatcggcaccgtcatcgccatcgccatgccatcgtcatggtgacttgaatttgtggtataaatagatagataggtagctaattttttttcttttttcaaaattattagtattttgtattgatccctagcaagttgccaagatcaggtataatcagtagcttatctgaaataatccgttgcaacgcacgggtatttggcaatgtctatagaaacaatggtgatattgtttgtatgcaccatatttcttaacatatcaagtaagccaaattatcttatactagcagaaacccatattttcatggatttcttcc

SEQ ID NO: 12129 - DNA, 1524 bp, Oryza sativa
  ref <308>: DATABASE ACCESSION NUMBER: AK109477
  ref <309>: DATABASE ENTRY DATE: 2002-08-28
cctctgccttttcccctgcttcccacttcctccacgcctcctcctcctcctcgccttcgctttcctcccacgccgtcgtcgccaccgccgccgccgccatgtcgtcgttcgcgcaccaccaccatggctcgctggtggagaaggacgggaggatgtccgcgctgaggagtagccttaggccgtacgaggcggccgaggagatggccgcggcggcggccgccggcgggccggcggcggcgtggggggcggtggagaggggggcagggatgatgggggacgggttctcggtggaggacttgctggaccttgaggagctctgtgaggtggacagggacggcggcgagcaaggcgaggcggcggcggcggcggcggccgccgtggagaaggagaggtctagtgactcccatggctcatcggtggtgtcgtatgagcccatgccgctgctgccgccggtgatggacctgccggcgcatgacgtggaggagcttgagtgggtgtcccgtatcatggacgactcgctcgccgagctcccgctgccgcagctccccgcggcggcggcggcgttggcggcgtgcggcaagccgcagcaccggcggccgcacgaaggcgcggcgtcggcgttgttggaccctatgcgcaccccgaccatttgcgcgctgtcgacggaggcgctggtgccggtgaagtcgcggcggagcaagcggtcgcgtgcctccgtgtggtcgctctccggcgcgcccctgtccgactcgacgtcgtcgtcgtccaccgcgacaacctcgtcctgctcgtcgtcggcctccttctcgccgttcctccagtacgtggacttccccgcgctagtcgcctccgacctgctcgacgagcagccgcgctccaagaagtccaagcacggcaagaacggcaagcagaagcccaagaagcgcgggcgcaagccgaagcaccagcagccgccgcacctcgccgccgccgccggcggcggcgccgccctccccgccacgggcgaccgccgctgcagccactgcggcgtccagaagacgccccagtggcgcgccggccccgagggcgccaagacgctctgcaacgcctgcggcgtccgctacaagtcgggccgcctcctcccggagtaccggccggcctgcagcccgacgttcgtcagcagcctgcactccaactcccaccgcaaggtgctcgagatgcgccgcaagaaggagacccccgtcatcgtggcggccgccgcgccggccgtcgcctctttctagcctagcctagctagcaccgccgcggtggctgtacattttcctttttcctggccgtatcgttagtctgctgtaccgtacctgaactttttcctcccttctctctattttagtcccgtcgtacggctagaattcagtagtaggaaaattagaggtctcatttagagattgtgttaggtttagtgatcaacatttgcatgttttagcattagattgttatagtgtactctagtagaaagcactcgagctcttcacaagaaaagct

SEQ ID NO: 12130 - DNA, 1876 bp, Oryza sativa
  ref <308>: DATABASE ACCESSION NUMBER: AK109478
  ref <309>: DATABASE ENTRY DATE: 2002-08-28
cacctcccactcgccgccgccgccgccaactttccccaccaccaccacccatggcggccaccacccacgccgcctccctctccttcctcctctctcacccccaccccacctcccccaaccctaaccctaaccctaacctccccctccgccgcgccccccaccgcgtccgctgcgccaccgacgccgccgccaccaggcaccggcgcgcggccgacgagaacatccgggaggaggcggcgaggcaccgcgccccgaaccacaacctctccgcgtggtacgcgcccttcccgcccgcccccaacggcgaccccgacgagcgctactccctggacgagatcgtctaccgctccagctcgggcggcctcctcgacgtgcgccacgacatggacgcgctcgcccgcttcccgggctcctactggcgcgacctcttcgactcccgcgtcggccgcaccacctggcccttcggctccggcgtctggtccaagaaggagttcgtcctccccgagatcgaccccgaccacatcgtctccctcttcgagggcaactccaacctcttctgggcggagcgcctcggccgcgaccacctcgccgggatgaacgacctctgggtcaagcactgcggcatctcccacaccggatcgttcaaggatctcggcatgacggtgctcgtcagccaggtgaaccgcctccgccgcgcgccgctctcccgccccatcgccggagtcgggtgcgcctccacgggggacacctccgccgcgctctcggcctactgcgccgccgcggggatcccggccattgtgttcctccccgccaaccgcatctcgctcgagcagctcatccagcccattgccaatggcgccaccatgctctcgctcgacacggacttcgacggctgcatgcggctcatcagggaggtgactgccgagctgccgatttaccttgcgaattcattgaattcccttcggctcgaggggcagaagactgctgctattgagattcttcagcagttcgattgggaggtgccggattgggtcattgttcccggaggcaatcttgggaacatatatgccttctacaagggattcgagatgtgccgcgtccttgggctcgtcgatcgtgtgccgcggcttgtctgcgcgcaggctgccaatgcgaacccgctgtaccggtactacaagtcggggtggactgagttcacgccgcaggtggctgagccgacatttgcatcggcaattcagattggtgacccggtatctgtcgatcgcgcggtggttgcgctcaaggcaactgatggcatcgtcgaggaggccacggaggaggaactcatgaacgcaatgtcgctcgctgatcgcactggcatgtttgcttgcccgcatactggggttgccctcgcagcactgttcaagctccgtgaccagcgcatcatcgggccaaatgaccgcacggtagtcgtcagcacagctcatggtctgaagttctcacagtccaagatcgactaccatgacagcaagatcgaagacatggcctgcaagtatgcgaatcccccggtcagcgtgaaggctgacttcggtgccgtcatggatgtcctcaagaagaggctcaagggtaagctctgaagtgtgtttggctaactcccctccaatcaattgctgtatgtcagttgtcttctgcatcaaattcgaatgcggcgggtgactgtggagcgatgattcgtcgatttgtagtagtattgtaggtccctgaaccttgaagatcgtccatgcttgagagtaaagattgagaggctatctcttgtacctgttctgtgttgtgtgtgggtgggtaataagcgactaccttgttgtttgaaactctgaataatcagatcatctagtcc

SEQ ID NO: 12131 - DNA, 2059 bp, Oryza sativa
  ref <308>: DATABASE ACCESSION NUMBER: AK109479
  ref <309>: DATABASE ENTRY DATE: 2002-08-28
gtgctctccaagaagagacgcgacgcgaacgcacgcgacacgagtccaacaaaggcaaggccaccaccccaccaccaccgcccccgtcctcctcctcctcatctcctctccgctccccaacgctttggctttctttcctccctttcctccctcgagcccctcccctcccccgccccaatccaccgccaccaaccctcccctcccctcccgatccgcatccccatgacccgcaagcggcgcaagcacgccgcctgatcgcccggggtggggggggggggtgggagtccatggagtcgtcgctgccgcggaagcgcaagggcgcgcgctccgcgtgctccctcgtcggatcctcccacgagcccaccaccgtcgcccgcaagcgcgcctgccgcgagcccaagcctcgcccggagaagaagaagaaggatccctcctccgatgacgcctccggccggggcggaggcgggggcgtggtccagacggcgccccccgcgagcggccgggccgcgccggagagccccagcagggggctgaagcggaagctggggcgcatcgagtccgccacccggatggggcggaagaagcggctcgagagcgagtacgagctcggcgccgagatcggccagggcaagttcggctccgtccggatctgccgcgccaaggttggcggcgaggagttcgcctgcaaggcgctccccaagaacggggaggagaccgtccaccgggaggtggagatcatgcagcacctctcgggccaccccggcatcgtcacgctcaaggccgtcttcgaggacgccgacaagttctacctcgtcatggagctctgcggcggcggccgcctgctcgacgagatggcgagggagggcaagttctccgagcagcgcgccgccattgtgatcaaagatctaatgtccgtggtcaagtactgccacgagatgggcgtcgttcacagggacattaagccggagaatatactgctcaccaaggcaggaaagataaagctcgcagattttggacttgccgcacgagttgccgacggtcaaaaattgtctggcattgctggtagcccagcttatgtggcgcctgaggttttgtctggatgctactctgagaaagtagacgtatggggagctggtgtgctactccatgtactgctgcatggttcccttccatttcaagggggttcactagatgctgtctttgaggctataaagacagttgaacttgatttccacagtggaccatgggaatcaatatcatctcttgcacgggatcttattagtcgaatgttgaaccgagatgtaccatccagaattactgctgacgaagttcttagtaagtgcaagcagtttctcatcttgcattgcagttttattggattttgcgtttacattgtcattatttaataataatgctatttttcaggtcacccatgggtcgtgttctacacagagtgccctttgaaggctgtaactgctaatttgagtattactaacaatatcgtagcacccagaattacatgggacagaattaggttacattgcgagtcaatatcttcagattcatcaagtcagagatcagcagatcaggatgaatgtggtatagttgatgcactgacagcagcaataacgaatgttaggatatcagagccaaaaaggagtcggctgtgtaacccagccattcccatacagcagggatgctcttcaaacttgaagagcaacctctgtacggcattctgacccgacctgatgtacagctcctgattggaatggtgcatatttttctcgcagaggttggtctgatgccagttaaaaggctccatcaggtggtgtctctgagctgaggataataacctgggtttctgccaaatcaaataagcgtttgacatgggtatgatgtagtttttatctggtgatgctgataaaccggccattagaaggccggttctgtaaattttgtaaatatcatgatccccttagctcctgggttgctaatctatgcgtacgtagcaaattgtttcaattaatgttgataaaatatcgtgtgccatttccctgtg

SEQ ID NO: 12132 - DNA, 1294 bp, Oryza sativa
  ref <308>: DATABASE ACCESSION NUMBER: AK109480
  ref <309>: DATABASE ENTRY DATE: 2002-08-28
acggttgatcgatcagtacgagtacgacgagagctaagtaaacttagctatatcgatcgaccatggcgtccaggactagtgctactgccggcatgctgctgctcgccgccgcggctgcgctggtgtgcagctcggcggcggcgaggatgccgccgttggcgaaggggttgtcgttgggctactacgacgcgagttgcccgcaggcggaggccgtcgtgttcgagttcctgcaggacgccatcgccaaggacgtcggcctcgccgcggcgctgatccggctccacttccacgactgcttcgtccagggctgcgacgcctccatcctgctcgacagcacacccaccgagaagagcgagaaggtggcgccgccgaacaagaccctccgcaagtcggcgttcgacgccatcgacgatctccgcgacctgctcgacagggaatgcggcgacaccgtcgtgtcctgctccgacatcgtcaccctcgccgcccgcgactccgtcctcctcgccggtggcccgtggtacgatgttcccctcggccgccacgacggctccagtttcgcgtctgaggacgccgtcctgagcgcgctcccgtcgccggactccaacgtcaccacgctcctcgaagcgctgggcaagctcaagctcgacgcccacgacctcgtcgccctctccggcgcgcacaccgtcggcatcgcgcactgcacttccttcgacaagcgcctcttccctcaagtcgaccccaccatggacaagtggttcgccggccacctcaaggtcacctgcccggtgctgaacaccaacgacaccaccgtcaacgacatccggacgcccaacaccttcgacaacaagtactacgtcgacctgcaaaaccgccagggcctcttcacctccgaccagggcctcttcttcaacgcaaccaccaagccgatcgtcaccaagttcgccgtcgaccagtcggccttcttcgaccagtacgtctactccgtcgtcaagatgggcatgatcgaggtgctcaccggctcgcaggggcagatccgcaagcgctgttcggtgtccaacgccgccgccgccggcgaccgtgcttggtccgtcgtggagaccgtcgctgaggccgccgagagcttggtgctgtagggtgctaacaaggatggctagtttaattaagcttatttccttgataaatattttgttgcttccaaatgtcatgagtatgtacacttgcgtgtattttgtagcttattttttatttgcaaataaagttgaatatatgaaaactatttaaatccctcgagagg

SEQ ID NO: 12133 - DNA, 1735 bp, Oryza sativa
  ref <308>: DATABASE ACCESSION NUMBER: AK109481
  ref <309>: DATABASE ENTRY DATE: 2002-08-28
actaccgccgcggtgcccaccgcttcgcttctctcccctcctctccaatggcggaacccccaatcacagcccactcctcctcctcctcccgccgcgtccccaccgcaggcgactcccccaccctctgaccccacctcccgcctccccgccgccccgcgaccgccgcggatcgatcgaggggattcttgccacctgggatctctcctcccctcccctcccccgattcttggtctcgcgcgtctgtctgcccccccgtggtggattcttgtctggctcccggcaaaaggaacggcgtctcgccgcgggccgcggattcgaccaggcatctcagtgtccacggctgtaatttataaccaagcctaagaaacttacattattctagcattcattggatatggtatcggtgaatcttgggctagtacattatgtactggaccacatatatggtaccgtccttcatcgcaccaaattaggaacgccatttttctcgaaaggatggggaggcaccaaacttgatttgttagagaagatggtgaaacagttattccctgaagcacgttgccagaactggccaccaactgccgtgcaacccatgtggaaaacggtttgggagacaaagagttcttgtctgcgagagggcgttttcaggactacatgcgatccacggctaattgaagcattgcctcctgagagtcacaatgcaagagttgcttttcttacacctaagtcagtttcacctgagaagatggcctgtgtgattcatctggcaggcactggtgatcactcgtttgagagaagacttcgacttggtggacctcttttgaaggacaacattgcaactatggttcttgagagcccttattatggacaacggcgaccaagcacgcagcatgggtcaaagcttcagtgtgtgagtgacttgctactattaggaaaagctactattgatgaagctcgcagccttctgtactggttgcagaatgaggctggttatggcaagatgggcatatgcgggctcagcatgggtggtgtacatgctgcaatggttggatccttgcacccaacaccaattgctacgctgccatttcttgctccgcattctgctgtggtgcctttctgtgacgggctctacaggcatgccacagcttgggatgcattgaggaaagatgcagcaacattggcccaagacgtaacttctttgacagaagacatggcccagaaatcaggaatcactattgagcaagtaagagagaggttgcgatcagtgctgtctttgactgacgtcacccgatttccagtgccaaagaacccacaggctgtcatttttgttggtgcaacggatgacggctacatccccaaacattcgataatggagctccaaaaggcatggccaggttcagaggtccggtgggtaaccggagggcacgtatcgtcgtttttcctccacaacgacgcgtttcgcaaggccattgttgatgctcttgatagactataacagcagaggaaactcatctttgtgatggcatttcttggtgtgcttgttgtgaaactcataggcatgccacatgacaagatcacatttttatgagtgggggagcctagaaataccacattctgtctgtaactcaatatatgtgttttcccaaagattgggaagatgcatgagtgtaacattgacattcgttacctgttaactaagccccccattgttaatctgtcccaaatttcacctact

SEQ ID NO: 12134 - DNA, 1835 bp, Oryza sativa
  ref <308>: DATABASE ACCESSION NUMBER: AK109482
  ref <309>: DATABASE ENTRY DATE: 2002-08-28
cgagcgaaccgggagatgcccagcttgagaatcgggcggccgcgccgtccgaattgtagtctggagaggcgtcctcagcgacggaccgggcccaagtcccctggaaaggggcgcctgggagggtgagagccccgtccggcccggaccctgtcgccccacgaggcgccgtcaacgagtcgggttgtttgggaatgcagcccaaatcgggcggtaaactccgtccaaggctaaatacaggcgagagaccgatagcgaacaagtaccgcgagggaaagatgaaaaggactttgaaaagagagtcaaagagtgcttgaaattgccgggagggaagcggatgggggccggcgatgcgccccggccgtatgcggaacggcttcggctggtccgccgatcggctcggggcgtggactgttgtcggccgcgccggcggccaaagcccgggggctccgcgcccccggcagccgtcgtcggcgcagccggtcaccgcgcgcctctggcgcgcccctcggggcgctgcgccgcaacggcctgcgggctccccatccgacccgtctaaacacggaccaaggagtctgacatgcgtgcgagtcgacgggttctgaaacctgggatgcgcaaggaagctgacgagcgggaggccctcacgggccgcaccgctggccgaccctgatcttctgtgaagggttcgagttggagcacgcctgtcgggacccgaaagatggtgaactatgcctgagcggggcgaagccagaggaaactctggtggaggctcgaagcgatactgacgtgcaaatcgttcgtctgacttgggtataggggcgaaagactaatcgaaccatctagtagctggttccctccgaagtttccctcaggatagctggagcccattacgagttctatcgggtaaagccaatgattagaggcatcgggggcgcaacgccctcgacctattctcaaactttaaataggtaggacggcgcggctgctccggtgagccgcgccacggaatcgggagctccaagtgggccatttttggtaagcagaactggcgatgcgggatgaaccggaagcctggttacggtgccgaactgcgcgctaacctagaacccacaaagggtgttggtcgattaagacagcaggacggtggtcatggaagtcgaaatccgctaaggagtgtgtaacaactcacctgccgaatcaactagccccgaaaatggatggcgctgaagcgcgcgacccacaccaggccatctgggcgagcgccatgccccgatgagtaggagggcgcggcggccgccgcaaaacccggggcgcgagcccgggcggagcggccgtcggtgcagatcttggtggtagtagcaaatattcaaatgagaactttgaaggccgaagaggagaaaggttccatgtgaacggcacttgcacatgggtaagccgatcctaagggacggggtaaccccggcagagagcgcgaccacgcgcgtgccccgaaagggaatcgggctaagatttcccgagccgggacgtggcggttgacggcgacgttaggaagtccggagacgccggcgggggcctcgggaagagttatcttttctgcttaacggcccgccaaccctggaaacggttcagccggaggtagggtccagcggccggaagagcaccgcacgtcgcgcggtgtccggtgcgcccccggcggcccttgaaaatccggaggaccgagtaccgtccacgcccggtcgtactcataaccgcatcaggtctccaaggtgaacagcctctggccaatggaacaatgtaggcaagggaagtcggcaaaacggatccgtaacttcggg

SEQ ID NO: 12135 - DNA, 1113 bp, Oryza sativa
  ref <308>: DATABASE ACCESSION NUMBER: AK109483
  ref <309>: DATABASE ENTRY DATE: 2002-08-28
aagatgctccccatcacatcctaaacaaccccccccctccccatgcccccctcccaaaaaaacccaccgagcccccaggccccacacacacaacaatgaccatccacgctcccaccaccccacgtcccaccccggttttcacggatcgatcgagaaacctcgacgacgtcgtcgccctcggctacccggatctcggtgcccccgcctggatctggaagcaggctccacgacgacgacgggcgcccgccgttctctgcccacggcctccaccggcttcccttccgccgtcgccgcctcgagctcgtcccacccccctcccgccggcccttgccgatctgctccacccaagccgccgcgacgccgctccgccaacctcgtggggcgctcggttctcagccaccggcccccgtcgccctgcaaccccctccccgtcgtcgacatggtggccgcctccatggctccccaacggtggtcggtggtggcgatggcggtcaaggccgctggctcggtgaggtctggccctcacctaaggcttcttgcttggacatctctggtaactgcccctgccgccttgtctattttcttccctcgactcgattgattgccaaggattggtaggaggaggtggtcacgtggttgtatgttctttcatcaaagaaattcacctggtatgttgagggatcgatggatggatggatgctcgtatgtgttcaatggaagtcacgatgtttattcatctggtgttttatttttctccatgatctatctgctcgatcgatatctataggctatagctgttgtgtttttttgaaaaagcatagttgccgtgtttgatcagttaattgcagcttatttgcgggcgccggatatgtggtgattgcttgtgttcgttcaggtgctgtataacatacatacatgttccatcgtagatcgatttgtcccctgtctagctagttgcatcttccttactgtgctttgatttgcacgggttaaattaagccatacacttcaatttgcttctgtctcgttacatgaatttgcgaacacatctcccatatgtcccgtatatactgttagatttctaaacaattcacacacaccaattcatgactg

SEQ ID NO: 12136 - DNA, 1164 bp, Oryza sativa
  ref <308>: DATABASE ACCESSION NUMBER: AK109484
  ref <309>: DATABASE ENTRY DATE: 2002-08-28
actctactctcctactagtcgtctactactcggccaggtgaggtgcccaaccaccgccgtggtagcgagcgcgcgacatggcggcggcggaggtgaggcaccggacggtggaggtggcaagcggggtgcgcctgcacgtggcggaggcgggcccggaggacgggcccgccgtgctgctcgtccacggcttcccggagctctggtactcgtggcgccaccagatgcgcgccctcgccgcgcgggggttccgcgccgtggcgcccgacctccgcggctacggcgactccgacgccccgccgggccgggactcctacaccgtgctccacctcgtgggcgacctcgtcgcgctcatcgccgacgtcggccagccccgggtgttcgtggcggcgcacgactggggcgccgccgtggcgtggcaactgtgcctgctccgccccgacctcgtcacggcgttcgtcgccctcagcgtcgagtaccacccgcggaaccccacgaggagccccgtacaaaccctcagggccgtgtgcggggacggccactacatctgcttcttccagaaacctggagtggccgaagctgaatttggtagaggtgatataaagtgtctcttgaagaaattctatggaatgcgcaaggcagcacctctgattatacccccaggcaagactttatttgactcaattgattcagatggtacttgccctgcatggctgtcagaagaagacatttcctactatgccgagaaatttgagaagactggatttactggaggattgaactactacagatgcatagacttgaactgggagctgactgcaccatggactggagttccaataaaagttccgacaaaattcatcgttggagatcaggaccttacgtacaacattccaggtgtaaaagattacatccacaagggtggtctaaaggcatgtgtgccaaatctcgaagatgtggttatcatggagggtgttgcccatttcatcaaccaggagaagcctgatgaggtctccgaccatatttgcgggttctttagcaagttctgatatgtgcaaaatctcttggagcctgcttgctaattgtactgtaaaaactagaaccattatgccagtactgatatcttccaaatatattgtgaatttcaaaatcaagcagtttctgttc

SEQ ID NO: 12137 - DNA, 1198 bp, Oryza sativa
  ref <308>: DATABASE ACCESSION NUMBER: AK109485
  ref <309>: DATABASE ENTRY DATE: 2002-08-28
ctgaggggtgggcccgacccggttccgccggctcgtccccccgctttcccctcgccttcttcatccccctcctccctctccattcctggatctcctccgcctccgcctccgcctccgcctccctcgcaaggggtctcccacgcatcgccgcccgccgctgacgcgtgggacccaccccttcccccccccccacaccacccgccgcttcccatctccgacaagcgcctacaacgccgcaagtagccctaaccctaggtcgctggatgcgccgatggccgccgccgccgcagcctgcgtagagagccccgacgagggcgtggagatccgggaggtatgggcggggaacctggaggcggagatcgcggcgatccgcgacgaggtcgaccggtacccgtacgtcgccatggacacggagttcccgggcatcgtgtgccgccccgtcggcaacttccgcaccaccgacgagttcaactacgccaacctcgaggccaacgtcaacatgctcaagctcatccagctcggcctcaccctctccgacgagggcggcgacctcccgcggcgggggacggggggcaggcgctgcatctggcagttcaacttccgcgggttcgacccccggaccgacccgtccaacgccgactccatccagatgctccgcacctgcggcatcgacttcgatcggttcgccgctgagggggccgacccgatccgcttcgccgagctgctcatgtcgtcgggcgtcgtgctcaacgccgacgtgcagtggatcaccttccacagcgggtacgacttcggttacctgctcaggctgctcaccggccggaacctgccggacaacatgcccgccttctttgacctcatcagaatctacttcccggtgctctacgacatcaagcacctcatgaggttctgcagcaacctccacggcggcctgagcaggctcggtgagcttcttgatgtcaagcgtgtggggacctgccaccaggccggctctgactcgctgttgaccctcgggtgctacaacaagatcaaggaggtgtacttcaaaggatcgaccgagaagcatgccggtgtgttgtatgggcttgttattgaggatggggtgaacagaccaccaccaactcagcccaatgaatgaatatggttagttaaataaaacaatctgaaatgggaaaaaaaattgaaactttcgttggtg

SEQ ID NO: 12138 - DNA, 912 bp, Oryza sativa
  ref <308>: DATABASE ACCESSION NUMBER: AK109486
  ref <309>: DATABASE ENTRY DATE: 2002-08-28
cttttctctcctctccttcctgcctcttcctcttcccattcacctccctctccctataaatcctctcctctcctctcctctcctccgctactaccagtctaccaccaccaccacctagactgctcctaacctctctcccttccctttcatccccgaagagtctagaagagagagagatgaatggtgctgtggtggggttgggggagacggccaagggcagcggcggcggcggcggcggaggagaggtgacgctggagacgctgaggaggaagatgtcggagttcgccagggagagggattgggagcagttccacagccccaggaaccttctcctcgctctggtgggtgaggtgggggagctctcggaggtcttccagtggaagggggaggtgcccaaggggctccctgggtggggggagagggaggtggagcacctaggcgaggagctcgccgatgtgctcctctacctcatccgcctctctgacatgtgcgatgtcgaccttggcaaggcagcgctgcgtaagatggagctcaatgcgcgcaaataccccatcgggcagtgcaggggatcctccaagaagcacacccactactccaccaccaccaccaccaccgacaacggtgcttccggtgatgacaacaaccgcaatgctggtgccggtgccgatgccgatgccggcaaggaacagtgctagcaatggctcctcagacagttttagcagcctggctctggtctttggtcttgttcatcacaccataggatgtgtgttgaaacagtattctagtagagtgaaatgaaaccgtcctgttctctctactgagtttgatttcttgaagaaacttagctcaaatcctttgtattgggctacaaacatgctctgatagctatggcaatatgatcattaatatctc

SEQ ID NO: 12139 - DNA, 1786 bp, Oryza sativa
  ref <308>: DATABASE ACCESSION NUMBER: AK109487
  ref <309>: DATABASE ENTRY DATE: 2002-08-28
acagccgtcgaaaccctagccccaaggttcccccacgcctcgcgctcgccgtcgccatgggcaagaagcggaagctcgattccaaatcccccgccgccgctaggtccgcagccgccagggccgcagcagccgcagccgccgccgccgccgccgccgccgtcgccgagccctcctcccagcccgaagccctagccgaggacccggccccctcgtcgcagcccctgggcctatccagcgagggcgcgggggagaggatgatgtcccgtgaggctggcggtggcgaggaagaggaggtggaggaggtcgaggtggaggaggaggtggaggtcgacgaggacgaggatggggagggggagggggaggaggaggaggaggcggcggagagggacgccgactcgatccaggcgctgctgaattcgttccccaaggaccagctcgttgagctgctcagcgccgcggcgctcagccacgaggacgtgctcacggccgtccaccgcgcggccgacgccgacccggcgctgcggaagatcttcgtccacggcctcggctgggacgccaccgcggagaccctcaccgaggcgttcagcgcctacggcgagatcgaggacctcagggtcgtcaccgaccgcgccacgggcaagtgcaagggctacggtttcatcctcttcagccgccggtccggcgcccgcgcggcgctccgtgagccccagaagaagattggcaaccgcaccacggcctgccagctcgcctctgttggtcctgtgccgccgggcggcatggccactaaccctgccccagcggtagccccagccccagcgcagctggcattgccgccagtgtcggagtacacgcagcggaaaatttttgtcagcaatgtcggcgcagacatagacccgcagaaactgctgcagttcttttcaaagtatggtgagattgaggagggtcctcttgggctcgataaggttaccgggaagccgaagggctttgctctatttgtctacaagaccctcgatagtgctaagaaagcgcttcaggagccacacaagcaattcgagggggttgtgctgcactgccagaaggcaattgatggaccaaagcccaacaaaggtggaggacttgggggtttgtatggtgctggcacttcaggcgggaggaaaggcgctggtggttatggagctcatagtcattctttgcctggtgctgctgttgggggccatgtgatgccatctccagtatccagtttgacttcattgccaggtgtagctggtggcccaggggtgaatcctgctctggggcaggccttgacagctatccttgcctcccagggtggagggttgggtctgaacaacatcctgggagttggtgcaaatggttcagggttgcctaacccaggggcttctgcaggactgggtagtagtggtttgcctgggatgcctggtgctggtggttatttgggcggctatgggggtggtggtgggtatggcagtactccaccaggaggcccaggaagaaattacatgggtcattaggatgcttataactattttactgtggccagatgattctacgtgttcctgcttcgcacttataaacttgctgttttaagctgtttctggcaaatcgattactctagtggtcaaagttttcacaagaactttgtttcctcaatcctatctttcaaaattaagcagtatgtacaactatttagattttcgaatggccatcagggcttgtgaccttattgtaaaagagcttgtgtggatttaaagaaccatggatcttttct

SEQ ID NO: 12140 - DNA, 1255 bp, Oryza sativa
  ref <308>: DATABASE ACCESSION NUMBER: AK109488
  ref <309>: DATABASE ENTRY DATE: 2002-08-28
accccacttcttccccaactctccattattttcggatcgaggcccaaccgcagccggccaagccgctccgcgtcgtttccatcgccgccgccgcggtcgtcatggccccggccgacactctgaggcgggggcgcgtctcggtctccgtccgtgcgtccgccatggcggtggcgttggcaccgagaaggaagacggatccggtgggcgacgagaaggccgtggtgggagctgtgggaagctgctggcgtgcctccctgatgccggtggctgtgggagccggcggcgctcccatcggtcactggaggaggctcggagaagggctcccttcccaactccggccatgaatcggcgacggcaccggtgggatcttgtgaggagggggctgtggttggcgacggcataagggagcggcgggcggacgacggcggcctacaagggctcgtcaggccatcccccgcccggatccggcggtgggcgtcgtctcccgcccggatccggtgacggcagcggtgggcggctcgggagcaaaatcctagctcccgccgtcgccaccctccttcccccctctcctccacctccccgtcgtcgaagcgcgtcgctgggagagccaggcggcgagccgggatggcggtggcggggccatcttctctgcctccccgcgccggtggatgaggaacaggaggggatgaggatccagcgacgactcggcgacgaggagatttgggcggtggatccggtgatgtcgaggtgcgtgggcgccggatctggcagcgtcggcgtcgtccttcgctctgcctctgcttcgtcgactactcggccggcagtggcgacgtcgtggaggatgtcgtctccagctagagggcgtccacccgtgaacctgcgacgggatgggtggggatggatcagcgcctcgactgctccttggccgacgacagccgctgccctgacgacgtccttagccctcgtcggcggccgccgttccgcccccatcacccacttctgtcaccttcgtccgcgcgcggctgccagacggcgagggatcaagcatcatgcatggtaggcctagggtgatttgttcgctatgcattcattgtgacctatgttcctggactgctcatgtgtctatatagaagattgcactcagcccctggatcgcagtagaatcttccttgactaagcttaattgtctattctttgggtaagaatttcttaaccgaataacatgtatatgtgaaataatcatatgattgttgag

SEQ ID NO: 12141 - DNA, 1468 bp, Oryza sativa
  ref <308>: DATABASE ACCESSION NUMBER: AK109489
  ref <309>: DATABASE ENTRY DATE: 2002-08-28
cgatcgatcgagctcgtcgtcggctacacattggtgggtcgatcggcggcatggcgcagcagctgggcctcctcgccgccgtcttcgtgtcgctcgccgtgcacgtcgcgctccactgccccatccagccgctcgccccgccgcccgcacgcccacccgccgccgctcgcttccctcccaacaacctcctccagaatctggagaagcttggggaagggatgctgagcgcgccggaggacgtgtacgtggacgacgccggcggcgaggtgttcacggcgacgagggacgggtgggtgcggaggatgcaggcgaacgggtcgtgggagcggtgggggctcgtcggcggcacggggctcctcggcgtcgccccgtccgccgacggcgccatgctcgtctgcgacgccgacaagggattgttgaaagtggatgagaatggacgcgtgacgcttcttgcttcgactgtcgaaggctccacgatcaggttcgcggacgcggcgatcgaggcctccgatggcacggtgtacttcagcgacgccagcaccaggttcagcttcgacaactggttcctcgacttcttcgagtaccgcttcaccggccgcctgctcaagtacgacccccgcaccggcgaggcctccgtcgtgctcgacggcctcggcttcgccaacggcgtcgccctgccgcccgacgaggccttcgtcgtcgtctgcgagacgatgaggttcagatgcttgagagtgtggctgaaaggggagaaggctggggaggcagagatcttcgtggacaacctgccggggaatccagacaacattcggctgggttcagatggtcacttctggattgcccttctccaggtgaggtctccatggctggacctgatctctcgctggagcttgacgaggagggtcatcgcgtcgttcccggcgctcgtcgagaggaccaaggcgacgctcaagggagcagtggtggctcaggtgtcgttgaacggcgagatcgtgagggttcttggtgactctgaagggaatgtgatcaacatggtcacttcggtgacagagttcaacggagatctcttcctcggcagccttgcgaccaacttcataggaaaattatccctggctaaggttacacgggagcaggaggatgcagttccttcgtagacagttacagtttgaagtgttgatgtgtgatcatcagttggtatcgtaaatccgggggcaactcataattgacacttgacacagcttgagcgcagtcatacatatagctatagcgtacagtaatcagttagcggtaatggttttgcataacttccatgctgtaaaagatttgaaagactggtgatcgtcctatatcgagcactttgttctgctctcgtccttcacctccgcgtgcgcttgaatttcactgggtgcagagttacagttggatcccctttcttgataaatccaagctgacaagaaagtttgacttg

SEQ ID NO: 12142 - DNA, 1632 bp, Oryza sativa
  ref <308>: DATABASE ACCESSION NUMBER: AK109490
  ref <309>: DATABASE ENTRY DATE: 2002-08-28
ttgatgaagaacatggaggctgcaagaagaggaagaagaggaaggcaaggtggtggtttgctgctggtggttcttgccgctcttctgcttcttctccttgcattggcgcgcggcgcgagcgcgtgggcccacggcgggctcgccggcggcgccggcgccggcgccggcgagcggcggtacatggatctcgcgatgaggaggatggagagcgtcagatcttccttcgtcgcgaggagggaattagcaacgtctacggcggcgagctcgtcgcgggtgtaccacgtgacggactacggcgccgacccgaccggcggcgccgacgcgacggcggcgatcaacagcgccatcgccgacgcgttccgccgcccctccaacgccaccatgaccggcggcatccccgacctcggcggcgccgagatccacctcgacggcggctcctacctcctcaagggccccctctccctccccgcctccggcggcggtaacttgaagattcacagcgggtcgctgcgggcggcggacgacttcccgacggaccggtatttgatcgagctgtcggcgaaggcggccggcggtggcggggggagctcgccggcgatgagctactactacgagtacgtgacgctgcgcgacctgatgctggactgcaactaccgcggcggcggcgtgcgggtggtggactcgctccgcgtcggcgtcgacaactgctacgtcgtccacttcgcgacggacggcgtcgcggtgagcggcggccacgagacgttcgtccggaacaccttcctcggccagcacatgaccgccggcggcgaccccggcgagaggtcgttcacgggcaccgggatccgcctcgacggcaacgacaactccgtctccgacgtggtggtgttctcggcggcgaccgggatcatggtcaccggaggcgccaacgccatctccggcgtgcactgctacaacaaggcgaccgggttcggcggcgcgggcatctacctcaaggtgcccgggctgacgcagacgtggatcaccaactgctacatggactacaccggcatcgtcgccgaggaccccgtgctgctccacgtctcgggctccttcttcctcggcgacgccaacgtcgtgctcaaggccgtcaatggcgtggcgaggggggtgcagatcgtcggcaacctgttcaacgggagggggaagggggtggacatcgtggagctcgacggcgagttcgcgacggtggagcaggtgtacgtggcgcagaacgcggcgacggggatgacggtgaggtcgacgacggcgcgcgccgcggcggaggggaacgggagctcgtggacggtggacttctcgccggtgctgctgttcccggaccggatcgggcacgtgcagtactcgctcgccgccggcgacgcgttcccgggccacgctctccggaacgtctccggcaaccgcgtcgtcatcgccaccgacgccgccgtgtccgccaccgtgcacgtgctcgtcgaccagaacagcagctgaagaacaaaaaatcaaaatgctgctgctgcctgccgcgattgcgcgcgagcaaggcgttagattcgtttgttcttgcgattcaccggcaaaattcgtctatatcagagagatggcaaaattggcaat

SEQ ID NO: 12143 - DNA, 1011 bp, Oryza sativa
  ref <308>: DATABASE ACCESSION NUMBER: AK109491
  ref <309>: DATABASE ENTRY DATE: 2002-08-28
gagacccctcctcccctcggcaacgtaacacaagagaagaagagatcgccatgtccaacgtgcccacctccctccgcgactcctccctcaccgtcttccgcctcgccatctccagctccgacccctggcccttctccctttaaccccatcaaacgcttcttcctcttccaagaagatcacaagcttcttcgtgttcttgttcttcttcggatcactcggttggtttcttggtttcttggtttcttggattgttgcgagatgcacgggaagcatcagcatcagcagcagcagcagcagcagggggggatggtggtggtggcgccgaaggggtgcgtgacggtgagggtgggggcggagggggaggagcagcggcggttcgccgtgccgctcgcccacctcaagcacccgctcttcggggcgctgctcgaggaggccgagcgcgagtacggcttcgcgcagcggggcgccatcgccatcccctgccgcgtcgaccgcttcgtccacgtcgagcacctcatcgtccaggacctccacggcgccgccgcctcccacctcctcgacctcgactcctcctcccaccaccacacccagatccacctccacctcccccgcttcgccggttgcttccgcgcctgatccttccatcatctccatggatgcatcgccatggcggtggagcggagctcccagattgctcttcttcttcttcagggttggttggtcgattaattacttagtttagctagttttttggtttccttttgcttcgtcctccgatctctcggtttgttggggatggatttcgattgggtttgtggacgggagaatcggaggacggattcgatgctgatgacgacgaaaaattgagatcgatctcaaaagtgtaaagacagagtaattcttcttagtagctttattctagttttattttttttatcttttttctttgcttgtacatccacttcttgaaacacatcaataatacagtatactttgatcgatatccttgtt

SEQ ID NO: 12144 - DNA, 1346 bp, Oryza sativa
  ref <308>: DATABASE ACCESSION NUMBER: AK109492
  ref <309>: DATABASE ENTRY DATE: 2002-08-28
aagcgctatccactctctctctcacatcacatttcaccacactctactccatagacacagatcgagcaacgcgtgcgtcggagaagaatgcagtcggagatctgagaagaagaaggttagccatggccatggcgctgctcttcctcctcctcctgctgccgccgcccaccgcgcccttctccctggacttcttcccggaatccccatctcccccgcgcctcgccctctccggcgcagcctccctccgccccaccgccgtctccatggcgtccccgcgcgcccgcctccagctcactcaccccgtcgccctcggccccgcattctccacctacttctccttctccttgtcaggcccaggctccctctccttcttcctcacgccccacccccaccccgaccgccaccctttcctcctcgccatcgtcttcgacgccgccgcccgcgtccgcatcgacctcgccggccatactacgggtacggccgcctcccacctcgccccctcctccgcccccgcccgcctacattcctggatacactacaatgccacctccgccacgctccagctccgcctctccgccacctcccgacgccccgccctcccgctgctctccctccacccgcttcctccctccgccctcctcctcctccggaccaagcccatgctcgccggcttcacctcctccgccaccaactgcaccctcttcgcatgggccttccgcgccaacaacaccatgcagcactctcagccgctcgacccctcccacctgctcaccacgccgccacctcaccgcccacaacctcacccccaccattattacccctggctctcgctgctcttcgccgccgcttgtggtgccatgctcacattcttcctactcttcgtctggtactccctgctggccacgcgccgccctgtcgcaccagtcaccacctccgattccgacgtcgtctatgagaagattgtgcttgtcggagccaaggacgacgacgcccccgcagccactactccgtctccagatgtagctggtaacaacaactagtctctagtcttctttagctgtgcgcctgtgcctctgttaattattcatcacagcacagggagtatttcctcttttaattatgccctctcccagtcccagttcgagtgtgtcatgtgtgagtgctgtctgtaagtagtagtactagttaagcgtggtttggtggaaaatctgcagattttgcgggcaaatctaacaccgcaaactctgcagtttctcctcagattattagaggttcaattcaatcctgtttcatccactatcttgtactcctaactcccaatctgtcatccactacctactgctgct

SEQ ID NO: 12145 - DNA, 1885 bp, Oryza sativa
  ref <308>: DATABASE ACCESSION NUMBER: AK109493
  ref <309>: DATABASE ENTRY DATE: 2002-08-28
acgcacgccgccacctccgacgagaacgagctcaccgctgtccactgctcctccccaccacgccggcggcaaagcggccatgcgtccgctccctctcctcctcctaatcctcgccgccgccgcgtcggccctggcgagggcgccgccccgcttcccggtgccgcacgcgcggccgcggcgtggggtggtgggggccgaggaagcggtgagagggtacgactacgagacgcgctacttccggcagcggctggaccacttcagcttcctggaggaggagggggaggagggggatgggttcttccagcagcggtacctggtcggccgcggcggcgggtgggccggcgccggcgggcccatcttcttctactgcggcaacgagggggacatcgcctggttcgccgccaactcgggcctcgtgtgggaggccgccacgcgcttcgccgctctcgtcgtcttcgccgagcatcggtactacggggagtcgatgccattcggcagcaaggataaagcttacaacaattccaagtccttggcgtatctcacagccgagcaagcgcttgctgattatgctgtactgctcactgacctcaagaagaacttgtcatcagaaggcagccctgtcgtgctcttcgggggctcatacggtggaatgctcgctgcttggatgagacttaaatacccacatattgctgttggggctctcgcgtcatcagctccaatccttcaatttgaagacgttgtcccttctaccatattctacgatctcgtgtcaaatgatttcaagagggaaagtttaagctgctttcaaacaataaaggactcttggaaagcactggatgctcaaggaaatgggcaagatggtctgctgaaactaagcaaaactttccatctatgcaagactataaaaaacactggggaactttcagattggttgagctcagcgtacagttacctggccatggtggattacccaatgccagcagattttatgatgcctttgcctggcaatccaataaaggaattgtgtacaaaaattgacaatcaacctgatggaaccagtattctggagcgcatatatgcaggagtaaatgtatactacaactacactggtactgttgactgctttgatctaaatgatgatccgcatggaatggatggatgggactggcaggcttgtaccgagatggttatgccaatgtcatacagtgaagatagtatgtttccagcagataaattcaactacacttcatatgagaaggattgcatcaacagctttggtgttgaaccaaggcctcaatggattactacagagtttgctgggcataatattagtctagttctggagagatttggtagtaatatcatattcttcaatgggcttctggatccttggagtggcggaggtgtcctgaagaatatatctgagagtgttgtggccatcatcgctccattaggagctcatcacatcgatctgcgccccgcgagcaaggacgacccggattggcttgttaggctgagagaatcagaactgggcatcatatcgggctggctctcggactactacggtgcaagaagaggggcgctcctccagcgcgccgctcccatcccatggactcttctgcaccattcgtgacgatgatcggccgtgcgctgcaactcccaaccagacgctgattttcgcagctgcatttcccgtgtctaaccaataatgtacccagtgctggtgcctcgctcgctggacggctggagttctccaagctggccatgatgtcgcagtagtagtagtactagtacaccgttggtaaggtaggagcagaagctttcaccagttgttcatggactgttgctgccaacagactgggaagctaaaaaattcattagtggt

SEQ ID NO: 12146 - DNA, 1610 bp, Oryza sativa
  ref <308>: DATABASE ACCESSION NUMBER: AK109494
  ref <309>: DATABASE ENTRY DATE: 2002-08-28
catctttgtgaagcaaagcgatcgatggaggcgcgagtgcttgtgttggtgaccatggcgatcgccgccgcgtgctgggccaccggcggcgtggccgcggcggcgacggcggcgacgacgacgacgacgtcccgcctcaagggcctgcgcgtgcacctgacgcacgtggacgcgcacggcaactactcgaggcaccagctgctgcggcgggcggcgcggcggagccaccaccgcatgtcgaggctggtcgcgcgggccaccggcgtgccgatgacgtcgagcaaggcggccggcggcggggacctgcaggtgccggtgcacgccgggaacggcgagttcctgatggacgtgtccatcggcacgccggcgctggcctactccgccatcgtggacaccggcagcgacctcgtgtggacgcagtgcaagccgtgcgtggactgcttcaagcagtcgacgccggtgttcgacccgtcgtcgtcgtccacctacgccaccgtgccgtgctccagcgcctcctgcagcgacctccccacctcgaagtgcacgtcggcgtccaagtgcggctacacctacacctacggcgactcctcgtcgacgcagggcgtcctcgccacggagacgttcacgctggccaagtcgaagctcccgggcgtcgtcttcggctgcggcgacaccaacgagggcgacgggttctcccagggcgccgggctcgtcggcctcggccgcggcccgctctcgctggtgtcccagctcggcctggacaagttctcctactgcctcacctccctcgacgacaccaacaacagcccgctcctcctcggctccctcgccggcatctccgaggcctccgccgccgcgtcgtcggtgcaaaccacgcctctgatcaagaacccgagccagccatccttctactacgtgtccctcaaggccatcaccgtcgggtcgacgcggatcagcctcccgagctcggcgttcgccgtccaggacgacggcacgggcggcgtcatcgtggactccggcacgtcgatcacctacctggaggtgcaggggtaccgcgccctgaagaaggcgttcgcggcgcagatggcgctgccggcggcggacgggtcgggcgtcgggctcgacctgtgcttccgggcgccggccaagggcgtggaccaggtggaggtgccgaggctggtgttccacttcgacggcggcgccgacctggacctgccggcggagaactacatggtgctcgacggcggctccggcgcgctgtgcctcacggtgatgggctcccgggggctctccatcatcggcaacttccagcagcagaatttccagttcgtgtacgacgtcggccacgacacgctctccttcgcgcccgtgcagtgcaacaagttgtgacgctcgcccgtgcccgcgtaggcgtacgtgctccgtgttacgtgagtcgtgatgtatacgcgtacttgtgtatgtacgatgcactttgtactagtagtactcatctaacaggacggatagacgaatatgcgttcaacaccgatcgatcatcgatgtaattattatcgaattgttcatttgtttggtatggttcgggaactactacgttctggccttctggg

SEQ ID NO: 12147 - DNA, 1395 bp, Oryza sativa
  ref <308>: DATABASE ACCESSION NUMBER: AK109495
  ref <309>: DATABASE ENTRY DATE: 2002-08-28
atcgaatcaaatccatctcttttctccccttccttccttccgcctcgcctccccttcccctcctcgccgcctcgctcccctccgccgcgccgtcccgtcgaatcccgccatgccgaagggtgccaagaagcgcgccaagctcaagaagaagcagcagggggaccaccccgccggctccgatgacggcggcaacaacaacaacaacaaaaacaacgccgccgaaaacggcagcaatgactccagccgccgccgcgacgccgccagcgacggcaaccaccacctaccgtcgcgaccaaacgttcctcatgtggatgtgagtgaggactccatggagagctccgaggagatggtgacgccgagggccgccgcgtccgaggcggacgaggaggagaggaaggccgccacgtcggaggtgcccgtggaggtggtcgaggccggggaggaggtcatggtggacgccttgccgcccgaagccgccgcaggtgcgcaggagcaacagggtaaggcggaggcgcttgtggtggtgcaggaaccggaggtgaagcgcgaggagttggtggccaaggtgcatccgatgcatgacccggaaccgcagggcgaggaggtgctcatcgtggaggcggctgcggtatccgcggtgcaagaaccggaggtgaagcgcgatgaggtggtggtcatggagacggctgcgccgcctgcggtgcaggaatcggagacgaagagcggtggggtgttggtcaaggatgtggtggaggtgtcacggtctctgggtgcagctgatactacagaggtggcccggggacctgcagtggctgtggctgcagcagggcagcgggcaacatggtggaattgctgtggggtatttgatgcgttctctggttcggagagatagattaaggttggaacttggaagccaagaagacagtagacgcgaagttgttcaaagctgatggtaattgtaactagtctggtttatgctcatatgaatggagttgaagaatggataacatcgagctgatgtttctctctggcccatgtttctacaccgtgctgtgcaaagttacatccccttggttgtggttaatattctcgagtcgcgtagtactctgaaatctacacccttgtctattatcatctaggttatgttcatgtagcataagagttgagttgagtcgtcagcaaagaaattttgttctttctgtttcatacttatttttttttgggggggggggggtgtcatccggtttgcccccttctatggttcggtcaccttgaaaggagtaacgttgaaactatttaggtgttccattgtgtagtcttgctccgtgatagctcgcaggcacatcagactactcactatgaaaaagaaaataatgagacgtgtgggttacattc

SEQ ID NO: 12148 - DNA, 1620 bp, Oryza sativa
  ref <308>: DATABASE ACCESSION NUMBER: AK109496
  ref <309>: DATABASE ENTRY DATE: 2002-08-28
ttgagctctctgggattctatcatccaatgtctttgaaaatgatgacgatttccctggattatcaccagctatttcactgccagttcaaagtggcaggatgcaagaaaatgaacaagctattgcaccaaattttgttgaggaaaacattaggttaccaaaagatgtgactagtgatgttccaatggaagatgcctctcttttaccaagagataagcaacagacagatggagctatccctgttgtgcatgacttacagcatgaaattgatcgagagcaggcattggctgatcagaatgaacttcctcctctacctgacggtcctccaccgcttccattagatgcaccacctcccccacctctgcctgagggacccccaccgcttccatcagattcaccaccttgccagcctcctttgcctccttcaccaccacctgctacaccgccaccgccaccaccactttcaccatctttgccacctccgccaccacccccacctctaccatctggcccacctcctcagcctgccccaccacccctgccaatccagcccccacctattcctcccccacctgttccatcatctccgtcatcattgggctatcagcctcctgcacccgaatatttcagggcttcaaatagcaaccaacttaaccagatggcagggaatgcatcaattcaaggaattggaaatatgacaaacttcattcctggtggatcagtgaacactcaagctgcagttaattttaccccatcagtgccaccagattatgggaataacaatctatatataaaaccacaaggttctaatggtaattttcagtttcgaccaactggtgtaccttttcagcaagggacattcagtgcttttccatctgcacaaacaccaccagttcgtccccacactcatcttacacaaatgaacccagtgggccaacaagctgtacctccgtgcaatccttatgctgtacagtcctttccaaataatcaaagtcaatatacatctgacgagcaatggcgaatgacatctggtaacttcagcccagatgatcagcgcaatacttggttaccaggcgccagagcattatcttgtgcagaggggtcattcatgcaggatggtctaacattgacagatcttcaatgaaccctatgactcatcaacgtcctgtactcaaccgtatgccatctggagcacctgtaccaggacatgttcctcagatgctgccggccagacctgatattcacacatttaattgctggaggccttcgtaatgaaatttcacaaattgaactccttgctcgtgggttttcacatgggaaattgggattgccagaagccgtttcaattcaacttgcaacaagaggtgcttatgctagtctgttttgtgatgaagatgcacttttgcttatgaaggcatgatgaaatcttacatagtatttggaatgaacgttttacattgtaattagtcttggcaacagcatccagcagactaatcttagtgtaagcacatgttttacatgaaacaaagtcgtctctgttcatgttgcttctggtgtgttctttttgaggactgcaaactgtgtttaactgtttattgtatcatgctcagaaggcattagtc

SEQ ID NO: 12149 - DNA, 1239 bp, Oryza sativa
  ref <308>: DATABASE ACCESSION NUMBER: AK109497
  ref <309>: DATABASE ENTRY DATE: 2002-08-28
atgcatcttctctccggccaacggctgctcctcccgatcccatgcggcgcctgctatcgctcgccgccatccccggcgatcaagccgtccccgcttggactacgcccattcaccaagtcatcgtcgtcgttgcccctgcatctgcatgcagtctcgcccgccaccgttgcaaccgacggctcctccacctccgcgcagccagatagttgggcagagttcgcgtcgcgggtgtccggcgagtgggacggatttggcgcggagttcacggcggccggcgacgccgtcgagctaccggagaacgtggtccccgaggcctaccgcgactggggcgtgcaggtgttcgactggcaaacgcagtgccccactctcgccgacccggccgcgccgtgcgacctccactacaggctcgtccgcctgctccccactgtcggctgcgaggccgacgccgccaccgtccacacctcgcaccagcgccacgcctcctccgcctccgcgttcgcctactccgccgccgggtcgtacgtcgccgcctggcccaggggccccgcgccggtgctcgaggtggagcactgcgtcgtgcacccggacaaccgggaggtgagggtccgcctcgtgcagacagtggcgctcgccaaggaggcgcggctccgcggcgtcaaggtgttctccgagcagtggtacggcccctaccggaacggcgaccagctcggcggctgcgccctccgcgaggccgcgttcgccgccggggagaagctcgccgcctccgacgtgaccgggcagtggcagagcgacgccgcctccgccgcgaggttctccggcgagctggaccccgagacgggcaagttcgccgggttgacgcctgatgagcccggtgagagattgagccgagacgacggcgatggaatcgtgacgctgccgaagcagctgtggagctcgttcaaggagaatggcaaggacgagttcgtgtgcgaggtagggtgggtgctgggccatggcagcgccatcacgtcgaggtgtgttctctccagagatggagatgtcaaggagatagtcgtttcgcgcgagtcgcgtgtgtcggagggaacctgatcaggatatcaaaattgtcaggttcgatgatttttatgtagaatagaattatagccatacacaaatgtcttacacgcccgggtgtatactaatcaaattggcctcccgaaaggagtatacatgagtacatatactgacgctgttgtctgc

SEQ ID NO: 12150 - DNA, 1431 bp, Oryza sativa
  ref <308>: DATABASE ACCESSION NUMBER: AK109498
  ref <309>: DATABASE ENTRY DATE: 2002-08-28
aagccgctccgcgtcgtttccatcgccgccgccgcggtcgtcatggccccggccgacactctgaggcgggggcgcgtctcggtctccgtccgtgcgtccgccatggcggtggcgttggcaccgagaaggaagacggatccggtgggcgacgagaaggccgtggtgggagctgtgggaagctgctggcgtgcctccctgatgccggtggctgtgggagccggcggcgctcccatcggtcactggaggaggctcggagaagggctcccttcccaactccggccatgaatcggcgacggcaccggtgggatcttgtgaggagggggctgtggttggcgacggcataagggagcggcgggcggacgacggcggcctacaagggctcgtcaggccatcccccgcccggatccggcggtgggcgtcgtctcccgcccggatccggtgacggcagcggtgggcggctcgggagcaaaatcctagctcccgccgtcgccaccctccttcccccctctcctccacctccccgtcgtcgaagcgcgtcgctgggagagccaggcggcgagccgggatggcggtggcggggccatcttctctgcctccccgcgccggtggatgaggaacaggaggggatgaggatccagcgacgactcggcgacgaggagatttgggcggtggatccggtgatgtcgaggtgcgtgggcgccggatctggcagcgtcggcgtcgtccttcgctctgcctctgcttcgtcgactactcggccggcagtggcgacgtcgtggaggatgtcgtctccagctagagggcgtccacccgtgaacctgcgacgggatgggtggggatggatcagcgcctcgactgctccttggccgacgacagccgctgccctgacgacgtccttagccctcgtcggcggccgccgttccgcctccatcacccacttctgtcaccttcgtccgcgcgcggctgccagacggcgagggatcaagcatcatgcatggtaggcctagggtgatttgttcgctatgcattcattgtgacctatgttcctggactgctcatgtgtctatatagaagattgcactcagcccctggatcgcagtagaatcttccttgactaagcttaattgtctattctttgggttgggacaaggcgcacctaagaacctgacctccgcacaaaacttgtaaggttgcaggcgcatgcatcatcctcggctataattcgtcttccgccgatgcaactagagcagcgatgactagtgttttaattgtacaatcaatatgtatctgtgcctgagtctctgtaacatgtgtgggttttttactcgacaaaaatgtttgttttggctatatggatttgttggtaaataggatactctatggtcaggtagtattttatctttaatgagaaggttcgagcaatttgtggcc

SEQ ID NO: 12151 - DNA, 1180 bp, Oryza sativa
  ref <308>: DATABASE ACCESSION NUMBER: AK109499
  ref <309>: DATABASE ENTRY DATE: 2002-08-28
ccctttcttcctccaccccgaccaccacctcaaagctctccactcgatccccacctccccctccccctcccaccaccatccttcatcaccgcctccgttccgttccccatggcggaggacgagttcgagctcgatgaggaggtgtttctcgacatacccgtcgacgtcgtccactccgtggtggcgctggctgcaggcggcggcggcggcggcggcgacgctctgcatccagagcgggagagagctctgcacccggcggaggacagaggcggggttgcgctcgcggttgaggtcgtgcccccgcgtgagcccgacgacgagcaggggacgggcgccggccacggcggcgaggaggaggagaccgacatcgtcgtcggcgactatatggagcgcggcggcggcgacgacgacgatgtgttctcatctacatgcctcacgaccgtgctcttcacgctgctcagcatcatcgtttgggccgtcttcctctacggcgccgccaagctttgcgtcaactacttagttcccttgttccggcagcagccaccaccatcacttccatcgccggcctcgcacacctacgacgccgacgccgatatgcggtgcccatgcccatgtccctcagatttacaggcctggaggaacttggtaggtgaggacggcgacgcctacgcttctgagctctcgtggctcccgccgttggggaacgcctcagctgccgtcctccccgtcgacactctccgagttgccgctggtgctggggggccgtatcattctgtcgtggcgctgctcgttgcggcagtgatctttgctgtgctcgggtacctcgtcaagcatctgatgacgcattaggttccaccaattgctattggagtactgatcttacttggcctctcatagcatttaggtgatttttacccagtgatttcacatcgcatgcattgagttctccctggtttgactgctgtattaccagttggcagaagtgagtaccaactggttgctgacattatgcttgcgcattcgtgtgccatcagatttttgcatggttttgcacctcaagttgaggttgtatactggttctatgagagtgctttgacggtgtaaatacttcatgcttgatgaccagtgttttacctggtcacagttttgattttgatatatacacatatctcttctcctg

SEQ ID NO: 12152 - DNA, 913 bp, Oryza sativa
  ref <308>: DATABASE ACCESSION NUMBER: AK109500
  ref <309>: DATABASE ENTRY DATE: 2002-08-28
gctgcttttgcttcggtcacccggtcagtgctgcagacaagccacccccttcctcgcgtagactgctccccccacaaacaaaagcaatcctaatctcggattcgaggcgaacgagcggcggcgagggagggggactagcggcgatcgcgattggagtcgggtggacaccgatcgcggcggcgctctgggggatcggggtgtggaatcgagggggagggaggaggagacggaggcgatggggcggctgttcgtgatgcacctggaagggaaggtgtacagctgcaagcactgccacacgcacctcggcctctcctccgacatcatctccaagtccttccattgcaagcacgggaaggcgtacctcttcaataaggttgtcaatgtgacttctggagtaaaagaggatcgcatgatgataaccggaatgcatactgtgtctgatatcttctgtgttggctgcggatccattgttggatggaaatatgaagctgcacatgagaagagccagaggtacaaggaagggaaatttattttagagaggtataaggtgtctggtcctgatggcagccactactttgttacacatgatgctcatgttgggggaagcgacgtggacgacgtatgaagcacaactcgacatgctcaagccttatccatgtaatccatgtaaataacccaagtgtttgttggtcttagttacccggggatttgcttccattcagagcaaccccagcgtaattgttgtcctagatgacctaatatcctatcatcttccttcaggagttcaggttattattgggtgttaccgtctgtatatgcatgtaaccagtgatgcctgtagtagccccctaaaagctgttgtaatcctggaatgtatctcaggccctaatgactaaataaaattctgcttctc

SEQ ID NO: 12153 - DNA, 999 bp, Oryza sativa
  ref <308>: DATABASE ACCESSION NUMBER: AK109501
  ref <309>: DATABASE ENTRY DATE: 2002-08-28
gatcgacgcatccctccgccgctcgcagctctcctccggcggccatggcggcggcggcgcagaggctcctggcggccagcacgaagatcgtaggggtgggccgcaacttcgtcgcccacgccaaggagctcgggaaccccgtccccaaggagccggtgctgttcctgaagcccacctcgtcgttcctccacgcgggcgtggccggcgccgccatcgaggtgccggagccggtcgagtcgctgcaccacgaggtcgagcttgccgttgtcatctcccagcgcgcgcgcgacgtccccgaagcatccgccatggacttcgtaggaggttatgcacttgctttggacatgacagcaagagaacttcagtctgcggctaagtctgcaggtcttccttggactttgggtaaagcacaggacaccttcactccaattagtgcagtgattccaaaatcagatgtagctaatcctgatgatctagagctctggctaaaggttgatgatgaacttaggcagaagggatctacaagtgatatgatattcaagataccatctctaataagttatatcagttccatcatgacattaatggagggtgatgttatactgaccggtactcctgagggtgtaggcccagtacgaccaggacagaagatcaaagctggtataaccggcctcattgatgttgagtttgatgttcagaagcgcaagcggtcattttctacttgatgtgataggcaagagattaatactatgcaatctgttgtgtggacatatcagtatattgttatgctcatcttgatttgcgcaataaaacaagatattaaggttgcatgcatttatttattggcgcaactaaaaaaaatattttggtccattaatttcatgaaaccggagtgtacttgcacaatattcttggcttgcccgtactgaaactaatgtacattgtaaacataggcttcccatatgacatagtgcatgaaaaagtagatattcttttagc

SEQ ID NO: 12154 - DNA, 1169 bp, Oryza sativa
  ref <308>: DATABASE ACCESSION NUMBER: AK109502
  ref <309>: DATABASE ENTRY DATE: 2002-08-28
cttctctcctccacctttccccaacacgtaccaccaactcaccgcgtaccaagccaccggctcagcagcagcagctgccatttcacagaggcattggttgctgctctctcttcttggcgtttgtttcctatggagaggtgggcggcgcccaaggtgacggctggttcggcgaggcggtacgtcgccgaccagccgtctttctcatccacgctgctcgacgcgatatacaagtcgatggacgagcagccgggtcacggcggcggcgccaccggggtggaggcggtggctgcggcggccaagaagcagcacgaggcggccctgcactatgggaactactacaagccgtcgctcgcggggagctaccgggcgcgcgcgccgggtccgcacgccacgacgtcgagctcgtcggagtgttctagctacggcgggttctcgtcgtccgaggcggagtcgtcgcaccaccgacgcctccgccccatccgcacgactgtccccggtggtgcgccggggcccgcgccggagaagaaggccaagaagcccggggcctccatacgcgccaagctcagggacctccgcaagccggcttcccccggcgcgcgcctcgcgggcttcctcaactccatcttcgccggcaagcgcgcgccggccacgccgccctcggcgacggccggggcggagtccgcgtgctcgacggcgtcgtcctactcccgctcctgcctgagcaagacgccgtcgacgcgcgggcaggcgaagcggaccgtgcggttcttggacagcgacacggagtccctggcgtcgtcgacggtggtcgaccgccgcagggtgcccgtggaggcggtgcagcagatgctgctccagcggatggagatggagagcgacgaggacgacgacgagagcagcgacgcgagctccgacctgttcgagctcgagaacttcgccgccattgctcccgccggggccgcgtaccgggacgagctgccggtgtacgagacgaccagagtggcgctgaaccgcgccattggccatgggtatggccatggacggagcgccagagttgtctgaatatcttagttggaatcaaccgggcgagaggggtaactgtaaaatggcggtgtagttactgtaaaatgcaattagtttgggataagtgttcttccctttcttttttg

SEQ ID NO: 12155 - DNA, 1335 bp, Oryza sativa
  ref <308>: DATABASE ACCESSION NUMBER: AK109503
  ref <309>: DATABASE ENTRY DATE: 2002-08-28
gtgtgtcatatgctatgctaccgcgcgttagctagccgtcggtgtgtagagagagagagagaggggttaatttaattcggctcaaagaaagaaccctaaaaagcaggttgtagagagagaaattaatctcgaggagttttgtggtcgacatgcgtcctcctctcccctctaatactccaaaatcaccaccaaactagtcttgttctctcctctctctctctctcttcttcctcctttctctctccccatcttcttctccttcctatccattagctagctagcttgagagatctccattagagagagcttgcccatatgcactagcaccatccatgcatatgcatcttgtagttattgcttgctctcttcaatcccagctttgcctctaaatccagcagacgcatcggatatatatcttcaatcttcaaccatatagtggttgaattgaatctacatgtatatatagatgagaattagaggcttagagctggagatttcgaagtaaatatatttcttggtcgcctgccgatcttgcgaggtgtagaggggagagattttgggatgcttgaggtgtccacgctgcgaagccctaaggcggatcagcgggcgggcgtcggcggccaccatgtcgtcggcttcgtcccggcgccgccgtcgccggccgacgtcgccgacgaggtcgacgcgttcatcgtcgacgacagctgcctgctcgagtacatcgacttcagctgctgcgacgtgccgttcttccacgccgacgacggcgacatcctcccggacctcgaggtcgaccccacggagctcctcgccgagttcgccagctccccggacgacgagccgccgccgacgacgtcggctccgggccccggcgagccagctgctgctgcaggagccaaggaagacgtgaaggaagatggagccgccgccgccgccgccgccgccgccgctgactacgacgggtcgccgccgccaccgcgggggaagaagaagaaggacgacgaggaaaggtcgtcgtcgttgccggaggagaaagacgcgaagaacggcggcggcgacgaggtcctgagcgcggtgacgacggaggattcctcggccggtgccgccaagtcgtgctcgccgtcggcagagggccacagcaagaggaagccgtcgtcgtcgtcgtcatcggcggcggccggcaagaactctcacggcaagcgcaaggtgaaggtatatccctactaccaaccacacaactaacacttcagccctaattataactattttatcgaacaccatgcgcgcgcgcacacacacagctagctctaccacacagaggggaaaagaaaagac

SEQ ID NO: 12156 - DNA, 2009 bp, Oryza sativa
  ref <308>: DATABASE ACCESSION NUMBER: AK109504
  ref <309>: DATABASE ENTRY DATE: 2002-08-28
gaagtacagatgaaacagattattaatctcaaattcgtcgtcctcgcaaatcggatcagcatggctgccatcctgctgctgctgctcgtgttcttggtgagtgtggccttggttgttcgaacatggagtgctagtaggagatctcatgagaaggcgcggtatgcgacggccgagctgcggccgtatccgctggtcggccacctgccgcagttcctcgccaaccggcaccgcatcctggactggatgacggaggtgctgtcgcggcagccgacgcgcacgttcgtgctccgccgccccggcggcgtgcggggcgtgatcaccgcgaacccggcgaacgtggagcgcttcctccgatccgggttcgacaactaccccaagggcgagcgcttcgcgtcgctgctgcacgacttcctcgggcgcggcatcttcaacgctgacggcgaggcgtggcggtcgcagcgcaaggcggcgagctacgagttcaacacgcggtcgctccgcgccttcgtggcgcggtgcgtgcacggggagctgcacgggcgcctcctcccgctgctgcggcgcgccgcggcggagggccgcgccatcgacctccaggacgcgctcgagcgcttcgcgttcgacaacatctgccgtgtcgccttcgaccacgaccccggccagctccctgacgccagcggcggcggcgctctcgcggaggccgacgatggctccactgccagcggcaggttcgccgacgcgttccgcgacgccgctaatctcagcgcggggcggttccggtatgctgtcccgtggttctggagggtgaagaaggcgctccacattgggtccgagcggcggctgcgcgagtccatcgccatcgtccacgacttcgccgaccgcatcatccggtcgcggcgggaggagatacgcgccggcctcgagaagcacgacctcctgtcccggttcatggcgagccacgacgagtcgtacaccgaggtggccctccgcgacgtcgtcatcagcttcctcctcgcggggcgggagaccacgtcgtcggcgctcacctggttcttctggcttctctcctctcgcccggacgtggagcggcgcatccgcgaagaagtcgccacggtgcgcgcacgccgtggcgacggcgacgtcgacagggtcggcttcgacctggacgagctgagagagatgcagtacgtgcacgccgcaatcacggagtcgatgcgcctctacccgccggtgccggtggactcgctgcatgcgcaggaggacgacgtcctgccggacggcacggcggtggaggccgggtggttcgtggcgtacaactcgtacgccatggggcgcatggagtccgtgtggggcaaggacgcggcggagttccgggcggagcggtggctggaggacgcggcggcggcgacgttccggccggagagcccgttccggtacgtgtcgttccacggcgggccgagggtgtgcctcgggaaggagatggcgtacatacagatgaagtccatcatcgcctgcgtgctccaggagctcgagctcgccgtcgacggcgcgtaccggccgcggcaggtgacgtcactgacgctgcgaatggcggatgggctccccactagggtgaaagttagaggcaattgaatgtgacatttgggcttgtggaccatggcccgtagcagaaagaaacagtttcccatgcagatgatggtgccgatctctaaacttcttaccaggccgaatatagaaccgtccgaataattgggccgggcctaaagctacgttggtggcacgtcctgggcctattcatacagctgctgtatgtaaatgcttttcattttctctttgggaagatcatgacacgtatgtcattagtcattactagtactcattagatagtcacggattcaatgaaatctagggcgcttgatgggagatgcaattgcggcagaccgctgaacaaccttgaaccggtcattatcatttgaaaggaatactggaaaatgatcatttgctttgct

SEQ ID NO: 12157 - DNA, 2257 bp, Oryza sativa
  ref <308>: DATABASE ACCESSION NUMBER: AK109505
  ref <309>: DATABASE ENTRY DATE: 2002-08-28
aagagagagagagagagagagggagagggcagtgcgccgcggaagagacagctggaacccgatcacgcgcgcctacccgtccgtagaatcggcggcagcggcggcggccgcgctcgtctccggcgccgacgagctcctcgaccacggagaacgcgcggaccgcggccatgtcgaagaagaaggcgcccacgtccatcccgtgcgagctccccctcgccttagaccctagcgtctccgcgcgcccatcggatcgtcctgtggcctcccagtcttccgcacgtcccccttttccggcagcctccgccgctgccgctgcgcctgcggctgcgcccgcggttcgttcgctcgtcgccaactcttctggcatggacacccgattcgacgaggacgaacggacaaccgccgccacgcggcgccgccagtcgccctctccttcttttgcaccatcgacgtcgaaggcgacggcggtgggactcactagatacggtgctgtcaagtcctgggggccgaggagggagctggaaactggggagaccagtaggtgcatggaggtgctactgctagagaacccaatcgatgctacaaaaccatctcctctccatgttgatgaagacaagcagggtgaggttattggtggtacccaacagaatgctccagagagctgtgtaacggagcgagcacgactgaatctgaaatctcgctccagtgcagtgggacaatctgctggcagtcctctcaaggaaagaattctggctccatcaacagcaatgaaaagagcaacggagaacaaatatttggcgaacttgaagacagatattgttgagaaggcgttgaaatatgatagaaaagagaaaatgaaggaggttatgaggctgatgatattccagaggagggttttgtattagagcctacaggtcacggaaatgggaagcaatttcgtcttccgcactctttgtatgatgtcctccacacttatcagaaagaaggtatcaagtggctatggacattgcatctcaagaaattaggaggtgcactatgtgatgaaatgggcatgggaaagacccggcaggtagctgcttttcttcgtggtttgctccaggcagatgtcatacacaacgcaatgatcatttgcccagtcacggtgatagaaacctggcgcaaagaacttaatattgttggtgtgctggttatcaaagtgttccgttatgatagaagaaccgactgcattgcactaaaaagcatagctactgatggaggtgtccttataacaacatttgaagcagtccgggaccatattcaccgcattctggagacggggcacggcttgggattatattgttatcgatgaagcgcacaggatgaagaacgacaggacaaagctctttgattctttatgtagaattgattgtacacacagaattttgatgactgggacgctcatccaaaacaacttgacggaattttatgcgctgatgaacttctgttgtcctaatctacttggagagtccggacaatttcatgaaaacttcagcatgccaattgaaagggctagatatagaggcgcatctgcgcaattgataaaagagtcaatagaagcatctgagaggctgaagaaacttgttagcccttttgtattgagaaggacgaaagagatgttaaagaatagcgcctctaaacttggtactaaacatgaattgactgtgtggttgaagatctctgctgctcaagaatatctttacaccaatcttatcatgagcaatgttttgggagatgagcctggcacacctttggcagcttctcaagttgcgaggagtatctgcaatcacccagtaatggtgattggttctgactttgaacagaggggtgaatcagaagagaagaaggatgctttaactgacattatccgaaaaggtttattggcggtcagtaacatcgaggatattgaagtcgacgactacagtttgtccagcaaagtagcttttactttatatttggtggataggctcatcaaggaagatataagatcttgttattttctcaatctccacgaacattgacgatgatagaggtagtttctaacaatagttgcataactctctttttgccgggtcagccaaaggttggccaaccaatttcttaagattggggagaaaaacaaaggaatgttacagcgacattacaatgtcgcgctagtccgggagagatcccagacacagcgtgaacaagcgaaagagaaatagacaatacaacaacgatt

SEQ ID NO: 12158 - DNA, 1560 bp, Oryza sativa
  ref <308>: DATABASE ACCESSION NUMBER: AK109506
  ref <309>: DATABASE ENTRY DATE: 2002-08-28
agccagcagtaggcccagcacacacccacagtcctctatcacatcatggggagcatgagcacaccgccaccggcggcggtcacggtggcgaacgtccaacgtcggcgacgataaccatggcggcgggcgggtgctcctgttgccgttcccggcggcgcagggccacaccaacccgatgctccagttcgggcgccgcctcgcgtaccacggcctccgccccaccctcgtcaccacgcggtacgtgctctccaccacgccgccaccgggggaccccttccgcgtggccgccatctccgacggcttcgacgacgacgccggctgcatggccgcgcccccggactacggggagtaccaccgcagccttgaggctcacggtgcacggacgctggcggagctgcttgtctccgaggcccgtgcggggcggccggcgcgcgtgctggtgtacgacccgcacctgccgtgggcgcgccgcgtggcgcgcgacgacggcgtgggcgccgccgcgttcatgccgcagccctgcgccgtcgacctcatctacggggaggtgtgcgccgggcgcctcgcgctgccggtgacgccggcggacgtgagcggcctgtacacgcggggcgcgctcggcgtcgagctcgggcacgacgacctgccaccgttcgtcgcgacgccagagctgacaccggcgttctgtgagcagtcggtggcgcagttcgccgggctggaggacgccgacgacgtgctcgtcaactccttctccgacctcgagccaaaggaggcagcatacatggaggcgacatggcgcgcgaagacggtcggcccgttgttgccgtcgttctatatcggcgacggcccgctgccgtcgaacacggcgtacgggttcaacctcttcacgagcaccgtgccgtgcatggaatggctggacaagcagcctcctcgctctgtcgtgtttgtgtcgtatgggactttctccagctacgacgcagccaagctcgaggaggtcggcaatggcctttgcaattcaggcaagccattcctttgggttgtgaggtccaatgaggagcacaagttatctcgagaacttcgagagaagtgtgggaagagaggactaattgttcccttttgtccccagctggaggtgcttgctcacaaggccacaggtgacattgcttcttagccaattggagcacaaaagaaaatccaataaacaggaaaacatgatttagtattggacatcatttctgaaagcttttgcacttaagaaatgcaaatggacaagaataaggtatgcggtaaacatgatacttctgtgtggcttactacttcactggtcctactactttagagctgtatatttttgtgtgactgtagatgggttccattaatggatggctgtgagaactaacatttcaattttgtatatatggtagagcttcctcgggtggttggtagcagaacaagatagtataagttttcaagtggatagaactaaagcaaagctaagaattaaacatgtgtaatggaagtatcaggaattcagaatggtagttggcgcatatggaatgg

SEQ ID NO: 12159 - DNA, 1351 bp, Oryza sativa
  ref <308>: DATABASE ACCESSION NUMBER: AK109507
  ref <309>: DATABASE ENTRY DATE: 2002-08-28
aaaaaaaccaaaggaaaccaaagcaaagcgagctccgagctctccacccacgagcgcgtgcggaatctgtagtaaactagtaatccatccccgatcggcggcgatgcagaacccgccgagccaccccgttgacctgccgctggcggcggcgccgccgccggtgaaggcgccgaccccgcgcccccccacgccggcgtcgctgcagccggagtccccgggggtgttcttcacggccgccgcggcggccgccccggtcgggtcctcgcaccgccgcatcgccatcgccgttgacctctccgacgagtccgcgtacgccgtccgctgggccgtcgccaactacctccgccccggggacgccgttatactgctgcacgtccgccccacctccgtgctctacggcgccgactggggctccgtcgacctctccctccccgccgccaaccctaaccctagcggcgacccgccgtcggccgaggacgacgctgaggccgcggcccgcaagatggaggacgacttcgacgccttcaccgcgtccaaggccgacgacctggccaagccgctcaaggacgccgggatcccctacaagatccacatcgtcaaggatcacgacatgaaggagaggctctgcctcgaggtggagaggcttgggctcagcgcggtcatcatggggggcaagggcttcggcgcctccaggcggaccagcaaggggaggcttggaagcgtcagcgattactgcgtgcaccactgtgtgtgccccgtggtggtggtgcgtttccccgacgatggtgtggcggagggcggagaggccggtggcgcatcggagttggcggtgggcgaggaagtgctgcaccctgtgccagaggaggatgccgagtaccatgacgccactgaagagcacaaggatacttgatcatgctgtatgatgatgtcctctttgatccagcatgtaaaggttctagcagtcaactgtttgctgggtgctaggtggggtttcttctgagggcatttgctgttccgttcaactttcactgcctatgtttattcgtgctttcactttgttgtattttattgtcttgtttcatgtagttttatctgacctactgcttgcacggttaatttttatgatttagaatttttgtgctttctcaacatcacaagatctgtttctgatgaaagttacagtttgactacttaacgaaccaagtaaccgtctcccttttatttttctcccttgttgtactttcccttaaagtaagattatggtagatatcatgaatctcttgatgtgcgcagtcaatatctgccaaaggaaacttttttttttaatctactgttaggaaaagttggcgtt

SEQ ID NO: 12160 - DNA, 2215 bp, Oryza sativa
  ref <308>: DATABASE ACCESSION NUMBER: AK109508
  ref <309>: DATABASE ENTRY DATE: 2002-08-28
gaaccaacccggctattccattcccctctcatttggaccccaaggcccatcccaggtcgcacgctgatctccgcacccgccacccgcaatggtggtgtccgattccccgaaaccccaaccaaccccctcgccgccggcgccacccccacttccggtcccggcggcggcggggacgacgatgggggagctggaggcggccatcgaggcgctcgccgccaagaagctgcgcctccgcgaggccttcgattgcctcgtcgcctgctcccccatccccatccccttccgctgggacgacatcgacgcccacgtctcgtccatccagtcctccgtcgccggccgcttccgccagttccaggcgctccagaccgccgccaccgctggaataacggcggccccggccaccagcaacgccagcagccgcgtcgagcgttcggtcgaacaccttgtggtggtggtggagggccaagagtcccacgtcgcgcgccatgaggacggtggaaacggtgagggtgagggtgagggtgagggtgggctaggcaaggaggtggctatggacgtagaatccgaggaggagaacggcatggtggtggaggtggcaagcgaggcgcctcgcggagaagacggtgaggtggaggaggacgagaagatgggggggccaatcaatgcgtctcctcctagcgaagaaatccatgggaagggcgcggacatgtcgagaagatgggggaatcccatggaaatgtcggccgacgtggacgatgcgaagaccaagacgacggcgacggcggcggcggcggaactgacggcgatggcgatctctccgattccgggattcacaggcagagggggcgcggaggcgtcgctgaggcggtctctcgcggcggcgtgcgcgagcatggactcgtcgagcctggcgcgcatcctgtgctcgtccggcagcagcagcagcagccacgccaccctcgccgcacgtcacttccgcccggcgcttctcgccgccgccgaacccgcggcgctcgtcgtccgcgccgtcagggacctgctggccgggacggcgcccatcagggacagcgcgtgggagagctgcgtggagctgctcagctgcgtgcccaagctcgccgtggcgccgtcgccgggcacgatggagcaggccaatcgcttggccgaggactggaaggagatgatcgggaggaccgaaagttgcagcatgaacctcggccggttggctgtatggggccttctcaactttcttgtctcctacaacattgtcctggagttcgacgcggaagaaatcatccatttctttggcactctcccggacgacaagaagcagtgttgcatctccctctgcaagtatcttggactgattgacaagatggctgattcagttggtcatttgattgaacatggacaacaacttgtcgctatcagattggcatgcactttgaatttgacagacaaatacactccactttccatcatggaagactatattcagaatgctaaggagactgctcaagagatactgagcatggaaagtgattcagagtcactgaaactgtccatgtcaaagcaggtcaatgctctaatattgtcatggagggttgttggtgaatgcaatattgactctgtccattgtgatagaattaaggcagaaattacccagctgttgcataaatatgcaaacaagaggcacagcctagaagaacttccttctgatacttctagtccacatcagaaacatcaccaaatgtcgcaagagaagcaccactggcagcaaaagcatcgagaggaacaacagcagcagtttcaaaatcaatccaaggaacaagaacaagagagaaggatgcaaaagttacgagagctgaggaaaaagaaaaacaagagaactcagcgcaggaagcggaagcaaaatgcacaagtgatgaagcagcatcaatttgagaaacagcgaaaactatatcacgctggttcatttaccaattctcaaagctatgtcagatcagaaattcaccaccacctcagccagcatttttcaggaactataggaacacctgttgcaccatatacacctgttgcaccatataccggacctttttggtagctagggtccatatataatggaccgggttcatcctgcctacattcaactattcaagtcagagtagtagtacttgataccattactgtttgactgaactgaagataaagatagtag

SEQ ID NO: 12161 - DNA, 2398 bp, Oryza sativa
  ref <308>: DATABASE ACCESSION NUMBER: AK109509
  ref <309>: DATABASE ENTRY DATE: 2002-08-28
aaagactctgaagacatgcccaaggaagttgtaggagcagagggctcacagcaggatcaatttactacttcaacacatgaagttgtagatgagcacaacgaagttgctgaagtagagccagtcttggcagaaccaaatatgcatggccagtgtgatggtgagaagcccgatgaaggcaaggttttaagggagaaagacactgaggagaatgccaagaatgctcttggagtagaacagatagaaagacaagacaaggcactgacagagagctgcatacatgaagtggagcaggtggatggacaaagcgagagactcacaaggacaggtgttgaggaaaagcatgcagaaatcactcaagaacaagaaaatgaatttgataacggtgtgatggaaacttcaaaggtttcagtcaatggtgcgatgccttatagtacagctagtatacaatcagaaggagagcagaaggaagcttctgataaagatatggcggagaagcaaagcaatcaggatattgagtccattgatgagagggattcattgtctgatgcagctgctacggtttttgaaggagcagatgaccacataactttggacacgaatgaggaagcgactaggaaacatacgcatgactgtggaagcatatgtgagaacaaggggacacaaatgtttcaagaaggctgtaagctggacagcggggtgaaatcggatattgatattatggagattgaaactcaagctacagaaggaattcagaaccaagaaactatggagttggacaagcaagaaatggaggaagaacagaatccaggaacaacaattgaaaacaacaaaatgaaaataccggaagaagatgccagtacatttagctgtggtgaaattcaaactgatccacatagcacagatgttaatgaggttgagttcaccacaggaacgcagaacgacgaacatttggacatcaaggaagaactgattatggacagaaggttagattgtgaaattaaatatggaaacgaaagacccttggaagaggccaacacatttggtggttgtgatggtggggtggataacattggtgttgctttggatgttaatgaggaaaattctattaaagaaatgcaaaaccaggaaattcgcagcacagaggagttccaggctggggagaccaatttgaacaatggagctgaaaatgtggatgagaagaggattttggaagacgcaagtacacttgatattcgtgattcaactaatgcggtagttaatggggctgaatcaacagaaggaactcagatcctgtgtgcttttaacacggagaaggagctagaagttcaggagaagcaggaccagggaacagaaaatgagaacagaaaccaaaatttggtcaacacagattcgtttgaatgtggggtggaacctcatgggaccctgaaaactattcatgagactcttcctacagtgcaagttgttagcacatcaggagatacattttcttcgaagaatgagcagaacgatgtaccctgggaggaccagaacaaatcagatgctgaagtgtctgaatcaaaccaaactgcaccaaaggagtccgaaaggactattccaccagagcatgaagaccgggaagaagagaaagaagaaaatatggagaataagatagaaatatccataggtagagagaatgatgaagtatctgaacaagagacctccacagaggaatgtatcgttgctccttcaggtatggatgaccgggacgagaataacaaaggatgggctgaagaatctgtacaaacctatggtaggtatgcttctgatccagtaaacacatcttggcagcccagcaaatttggcaagccaggtatggaagagtctaggagaacacatagtggcagatccatctatctgagagacatcaaagaatcacagggaaggactcgctctgaaacatcaaacaaattacacataaacagtgcagggtactattctcgacatgccgttcctgaaccagtttcagtcaccagggaaatcaaagtgccgttgtatgacagtacaagggcctctggaagagatcgtggaccagagctagtggtgacaggtccaccagaagagacttctcgatggcgacaagaacaatacgcacttcaaattttagaagacgtgcaaaatgctcgcgttgcagagaaaactaggatggagatggagatcagaatactgaaggcacaggtttctagcatgcagagacaagcgatgaacttggatcgtgttggtgatgtaatttctagagcaaaaagacattgacctttccatagtctctacatgcttaggagtttgtttcgtaccaaaattttggtgaagaattgtactgctctccctttgtgagatcaaatcaaagcatgccagtttgctc

SEQ ID NO: 12162 - DNA, 1750 bp, Oryza sativa
  ref <308>: DATABASE ACCESSION NUMBER: AK109510
  ref <309>: DATABASE ENTRY DATE: 2002-08-28
attcccgcatcctctctctctctccctcctcaccctcacctcatcgtcgcgacaccgaggggaaaaaaaaaagcgatcgccccaatcagattccccccccccctcctccccacttccctcgtcgcctccgaaaagccaagccgctccccgccgcgccgatcgcgccgccgcagccccagagtgatggactaacattttgggcgagtttgatctgtagaaaggcattcaaactattttatgggaaagaagcaaatcttatgcactatttgcagaattgcagtgagggaagtttgatctgaggcagttgcaaaacaagtatttctggagagatgtcatcctccttgcctattctaccgaaatctttgaaagatatcccaagatcccataatacccagaatattctgatgccagggcaactgccaaatgattctatgcctttgcaccagagtgcaactcaatcttctatttcgcacccaagagccagtgttgtcagatcatcatattcagcaatgttaggatatgctgctaacccaattgattctgtgtctagccatgaggggcattttatggctgctccctttatttctcagtcgtcgaatgctgaaatgctccagtatttatgtaataataatacccatgggggacacactgtgccaacctttttcccagctcctgcctgtggcgcgccagattacatggatactataactgtccctgataatcacacccagagcggctcctctactgttacatctgatgctgctaaacaaaatgaatggtgggcagatataatgaatgatgactggaaagatattctagatgcaacagctactgattctcagtcaaagtccatggcccaaccttccaattctgctgcatcacagcctgctttcaatcagtcaacttcatcccatagtggcgatatttgtcctgtcacaagtcctcctcccaacaacagcaatgcctctgcaagtaaacaacggatgagatggaccccggaattgcatgaatcttttgtccatgctgtaaataagcttggtggtagtgaaaaagctactccaaaaggtgtgctcaagcttatgaaagttgatggtttgacaatctatcatgttaagagtcatctgcagaagtaccgcacagctcgctacaagccagacctatcagaaggtaaaacacaagaagggaaaactaccgatgagttgtctttggacctgaaagcgagcatggatcttactgaagcactgcgccttcagatggaagttcagaagcgccttcatgaacaactcgagattcagaggaaattgcagcttcgaattgaagaacaagggaaatatctgcagaagatgtttgaaaagcaatgtaaatccagcacacagagtgtgcaggatccatcgtctggagatacagcaactccatctgagccaagcaattctgtagacaaggacagtgaggctgccttggacccaaacagaataggagacaaccaccctaaaaattctaccaatgtaggtgccaacctgaaaactgcagcaaccgagtcccctgattccccagtaattgcaactgatggatcggagctcccccaagagaagcgtcgtagagtgcatgaatcttgacagttaactcatctgaatgtagagtgcattcagattatagctgttctgcccatgtacttggtaaaagaaaaatggttccatctatattggctgaaattctagtgctgatccaagtctattgagctgaactattt

SEQ ID NO: 12163 - DNA, 2442 bp, Oryza sativa
  ref <308>: DATABASE ACCESSION NUMBER: AK109511
  ref <309>: DATABASE ENTRY DATE: 2002-08-28
aaagagaagaaaactagcccagacccctcctcacaccaggcgactccccgtcgccgccgccgcatcgccgcctccgcatcgccgccgtctcggagcgtctcctcagcaacccaccgttgaggctccaggtagatgaaggaaccttccgatccgcccatgtcagcgttatcgcacacagaaggtgattcttccggcttcacaagaaacaacgataggaatgatgatgcagttggtggggaagattcgacttcttcatatcagccatgtaacagtatgaaatgcaaagatggtacccaaattatgtctctcgcaaatgaggatgtatcaaacctggcatcggattgtcaagagccgccttcagaatccaaccatgctatttcccatgggtcaaatacagattctaaggaagaaatgtcatcgggaagtgggtatcgtaggcagcagtcttgcttttcttcatcaacctgttcttggagaagttcttctgaagtagaatcagtgtcaagtactccagacgggtcaggagatgtagttgggaacatgagcgtcagaagcaaaacctttgagcgaaggccagatcacattgcttcatatccttctgctagtcctgacataagaaggttgtatgcagcagaaggtaaagctgattttaccttagattatcattcagaagaacgctggtccagaagatccaatcaatctactgcctttcgaaccagcaatggtcaatctattgaacaccacagtgagatagttgacatacctagacaggccaattccatggatgagactacttcctcttcaagtcaatggagttttgacaattggggaccttcactgccaagagggatgcagtatggtgatgagatcccttctctgtctagtcagaactatggtgctagaatcccctcgctttcaagtagacaaagttatggtgatgagattccgtcactatctcgcaattgtaactacgcgagtagacaaagttatggtgatgagattccatcgctttcttctcgccattgtaactcgttctcaagtagacaaagttatggtgatgagattccatcactttctcgccattgtaacgcacgctcaagtagacaaaattacggtgatgagattccatcgctgtctaactctgactatcagtgctaccaagataggatacctttgcatcatcgtcaatggtgccatgatgctgaggcacatccacagctaaactacgggcgaggtgcttctcatggcaatcgttactcaagagacagttttgtcagtagtattgctactaatcagaggttcaagatgggcacaggcaaacatactgtcacaagatctgatcatcataggactattaagaacgataatgtatgcaaacattctgatgatacattggagcaagttcgtggtccccgtgcaaacaaattggaaaatgcaacaagatccaagatacaggaagatatcagaagtcctttggtccgtagggatcagtttaacagaccagactttatagttgagtatgaacaagccaagttctttatgataaagtcatatagtgaagatgatattcataaaggtatcaaatacaatgtttgggcaagtacaccacatgggaacaataagctggatgcagcttttcgtgaagctcagattttaattaaggaaaagggcaaaaagtgccctgtcttcctattcttttcggttaattccagtggccagtttgtaggattggctgagatattaggccctgttgatttcaagaagaccatggacttttggaaactagatagatggaatggctttttccctgtaacctggcacattataaaggacattccgaataggctcttcaaacatataactcttgaaaataatgacaacagaattgttactttcagcagggacactcaggagattggcctactccagggtctgaaaatgttgaaaattttcaaggattatgaccaggaaacgtcacttctggacgattttaatttttatgaagaaaaggaaagtgcacgatgtgccaaaaagggaataaatgcagagtcgacacatgaagctagactattgttttttggaacaggagctagacactctgatgacttcaaatcaatggaaaatttagaggcaagcatggagaatacaattttatattaatccagatcgttatgccgtgcaattgaaataagaagcttgattggtcagtgaagaagttgtagtcttggcacttgcaaaaccatttttggtccagcaaggaaaggcaagattaattgggtgtttgtatagtgcatatgttccctaaagtatttaactggttgcaaacttacatggactagtttatctgtattattaagttgtactacttgattacttgtaagtggttgatggtttcttcctttcttttgttgccaataacgattaatcagctggttgtttgtc

SEQ ID NO: 12164 - DNA, 3654 bp, Oryza sativa
  ref <308>: DATABASE ACCESSION NUMBER: AK109512
  ref <309>: DATABASE ENTRY DATE: 2002-08-28
cagttcatgagagcatattggtccatgcagaccaccattggtcactgtatatgacttcgggagagaatccagagcaaagctgtatgccctcaaatgttttggtgcatgaagccgttgccaaaaattgctgtcaggcttttaaggtgtcctctgtattgattgagggttctttgccaattaaaattttaacgatgctataatgattgctaaaagagatcttggaggctcattggaacagctttagccataattagggatcagcgccagcgcgataatggaacttacactcatcatctaattgtgggatctccatctgactttcagttatgtcagtttgctgctgtcaatccaccagccaaaaattgagatcttattcagcttggatgggcttgcagtctctaatgagtttggcatcatatccaacctatcaaagattatgaggagctttctccgaagtatttatgatttggttagcatggcatactttattttcatcttgacttgtcaacatcaatatgcctaagcaaatggtttgcttcctgtgaaaaatggcagagcaaattcagggccatttggactttcaagtgcaactctactgtggcttatgatgcagatcactctttgaatctatgagagcaagaaacctggtggttttgtttcacagaggtaaattggttatcatttgtgccatgtgagctgttgacacttggcgaacatggcttggctggtttgtgttctgctagatgatttctactctgatgtgtaattgaagagctctcgtgtcataatttgtatagaatcaatatttcattattctaatatttataaagacatccaaatgaaagcggggtttttggcatggagcttcaacttgtttgagttaaaaggaatgaaatcgattgcttataccattctgaagaaatcagaccttcagctaccctattgtgctttatctatttgttgatatcgcaaaaggttcatttgaatgtactgtgcaccatacgtttgatggtttgagttgctcgggcattacttctggccttctgggtgtaaagccaaattacttatgtgtgttcatgtaatttggtgttatgctcaatccttcagggattttaagttgtcataacctcgtggtaagcggagtatctgtttcattcttggatttggaattcatcaacttgttcattgctttgaacagtttatttccagattaagcttcaaagttggaacagatcaggtagctaggtcctgttatctattcatctaagctatgttttgtactcttcccggtcgtcacggggacgaaacctcatgctctgttatttattcagacaccaaaatttcttggtcatggagttcgagctcatttacagtgattgcaaccaagcaagatttatctctggtcactagtcattcaacaaacagaactggcacccggtttctgaacaggtttactccagttcctttgcaaagtcgatgttgtcgacaaacacctgccatgacaagaggaagagtgagcaaatgtttctactgatgaccagcagaagaaagcactttgaaatatttggctgatcgaagcatatgatccgataccgatttccagccatcagggtccaggatggacgtgatcttggtgttgatccccggcaatggccctggctcccgcaccacctgccctccgaacagcttcaccacctccgccgtcttgtagacgtcgtcggttccgatcgcgatctgcgtgagcatggcgcgatcgcgacgtcatgccagttcagctctagaaaccattgatggatgaatggaataaaggagatccatgatagatggatccatccatggtgttcacctgggcatatgcattccccttgtcatattcagtgacaccatagttgtatgtcagctccagcacagcattcttgtcttcaggaccataccccatcattgccactgtgtactacacaagcacttgaaaatgtcaccacattgtacatgaatggtccccaaatgaagttattttttctgcagattgatcaccttgtattcagggttatctctcttccttagcagctccatgccacaggcctgcaagatggatcatccaatccaatgcaatgagaatcatcaaggcaggataagctctgaaattgcgcgggttcttatttcttttcggtttcggattcgaaccttctcatagaagcttatggcccgatcaagattaccgacacggagcatcacctggcacaggggctctggagtccctggcctctcaaggatctcaaacttgtagccatctgggtcctcgacgaaggcgatcaccgtcttgccgcccttgacagggccgggctccctggtcaccttccctcctttcgcccttatcagctccaccgtcttcgccacctgccatgatcaattccaagaaccccaaacacaattgagccaaactttcaaccaaccatcagaccaagcaagtaatgatcaattacacttgcgatcgattgcaattgtcgaaagctgaaattacatcgtcgacggcgatgccaaagtgaccgaaacctgccccgatgtcatacttgtcgacgccatagtctgcgccatatgcgagaggtgagaccaaaggaggaggaggaggaacatatcagtcatatgagagaatgaacaatgtgcaatgcaaaattatgcaatgggaggagtggagtagcggttttaactgtaggtgagctcgacgacgaagtggttgtcctccgcgccatagccgaggaaggcgttggtgtacttctcctccgggatgtcgcgcttcctcagcagcttcatcccaaggcactccgtgtagaacctatgcagcagcagcagcagaagatcaatcaattgaggaaaaatgtcagattatgtgtttgattttcacttctcagtaagagattgtatccgtgaaggtgatgaggtttgtctacttgattgttctgtcgatgtcgccgacgcggtagacgacgtggagcagccgccggttgtcgctcttggcccaggcgaaggcctcctccttgctgccgaaggccgccgccgcctgcgcggcgtccggcggcgaggcccggagcttgggcgcggcgctcgcgccccgggtcagcctcaccggctccggctgcagcgctgcagtccatccaagaagacgtacagctgaccgatcgaaccgactgaatttgcttggagaggaggaatcagccgggggtcgacaggggggctcacctgcggcggcggtggagaggagcagcgacctccgcgggacggccggcgaggcgcaggcggcgacggcggcggcgcggccggcggccatggggagagctctcattgtgcggtgcggtgcgggcggtgaagctttggtcggggcggttggttggtgttgccgctgatgctatccttaattcctggctgctttgctccttcctttcgcgccacatttccttttttttttcccgcgttttagatgtaaccgttgagaaacaggtggcacatcaacatattcacgttccctgtgcagctatggttttggagcaccaccaacagagtacgtgtcttaaatcctctaactgaatgactttagggtcaccgatatgcaggtttatagtaaagtgaatttatatatgtcagtgatgacttaaatgg

SEQ ID NO: 12165 - DNA, 2249 bp, Oryza sativa
  ref <308>: DATABASE ACCESSION NUMBER: AK109513
  ref <309>: DATABASE ENTRY DATE: 2002-08-28
tcatagccaaaatctgagtttgatcctggctcagaaggaacgctagctatatgcttaacacatgcaagtcgaacgttgttttcggggagctgggcagaaggaaaagaggctcctagctaaagtagtctcgccctgcttcaaaactacagggcgcgcgctacggctttgacctaacggcctccgtttgctggaatcggaatagttgagaacaaagtggcgaacgggtgcgtaacgcgtgggaatctgccgaacagttcgggccaaatcctgaagaaagctcaaaagcgctgtttgatgagcctgcgtagtattaggtagttggtcgggtaaaggctgaccaagccaatgatgcttagctggtcttttcggatgatcagccacactgggactgagacacggcccggactcccacggggggcagcagtggggaatcttggacaatgggcgaaagcccgatccagcaatatcgcgtgagtgaagaagggcaatgccgcttgtaaagctctttcgtcgagtgcgcgatcatgacaggactcgaggaagaagccccggctaactccgtgccagcagccgcggtaagacggggggggcaagtgttcttcggaatgactaggcgtaaagggcacgtaggcggtgaatcgggttgaaagtgaaagtcgccaaaaagtggcggaatgctctcgaaaccaattcacttgagtgagacagaggagagtggaatttcgtgtgtaggggtgaaatccgtagatctacgaaggaacgccaaaagcgaaggcagctctctgggtccctaccgacgctggggtgcgaaagcatggggagcgaacaggattagataccctggtagtccatgccgtaaacgatgagtgttcgcccttggtctacgcggatcaggggcccagctaacgcgtgaaacactccgcctggggagtacggtcgcaagaccgaaactcaaaggaattgacgggggcctgcacaagcggtggagcatgtggtttaattcgatactacgcgcaaaaccttaccagcccttgacatatgaacaacaaaacctgtccttaacgggatggtactgactttcatacaggtgctgcatggctgtcgtcagctcgtgtcgtgagatgtttggtcaagtcctataacgagcgaaaccctcgttttgtgttgctgagacatgcgcctaaggagaaattgtggtacgtagtggtaatagtacgcgccccgctccgaaacaaaggaaaaggtgcgtgccgcactcacgagggactgccagtgagatactggaggaaggtggggatgacgtcaagtccgcatggcccttatgggctgggccacacacgtgctacaatggcaatgacaatgggaagcaaggctgtaaggcggagcgaatccggaaagattgcctcagttcggattgttctctgcaactcgggaacatgaagttgaaatcgctagtaatcgcggatcagcatgccgcggtgaatatgtacccgggccctgtacacaccgcccgtcacaccctgggaattggtttcgcccgaagcatcggaccaatgatcacccatgacttctgtgtaccactagtgccacaaaggcctttggtggtcttattggcgcataccacggtggggtcttcgactggggtgaagtcggaacaaggtagccgtaggggaacctgtggctggattgaatcctgagtaggagggcgcggcggccgccgcaaaacccggggcgcgagcccgggcggagcggccgtcggtgcagatcttggtggtagtagcaaatattcaaatgagaactttgaatatagctgagtcatggcttaataacacatgaaactgatatttaatgcttaagaagtacccttttcatatgcttcagagttttaacttaggaaatagttgtgaattttcataccaaagttatcacctgaaaagtgtcatataaccactgtcatcagctcacttgttgattaatctgtgtgcatgtacctgaatgccacattgacctcaatcctgttggtctgacattgtactctagtagacatgttactacaatttacatagtaaattttctgccttcatatgtgactagttgtgcaagtaatagaccacatgatactacagtaaatattgtctgtactacaattttactcagtggtgttggtgcctcctccagaggtacatcactggcagtgtattcattgttccaatacagctctaatttctatactcatcttttatactcgc

SEQ ID NO: 12166 - DNA, 2110 bp, Oryza sativa
  ref <308>: DATABASE ACCESSION NUMBER: AK109514
  ref <309>: DATABASE ENTRY DATE: 2002-08-28
accttcttttttttttcttttccttttttgctctccatggcttccacctcctcatcagccatcacctctccctttgcaattctctaccaaagcgagcatcactactactagtgctccttccactctctcctcctccttacactgaccctccatggaggaggcccctgcaagaagcgcctaaggatccctccattcgggttcaccccaccacaatggcggcggccaacgccggcgccatggtgcgcttcgtggcggcgttcttggcggcggtgctggtgatgatggtgccatgcgcgccgcgggcggcggcggcggcggtcggggtgaactggggcaccgtgtcggcgcaccgcatgccggcgcccgtcgtggtggagctcatgcgcgccaaccgcatcggcagggtcaagctcttcgacgccgaccaggccgccctccgcgcgctcatgggcagcggcctgcaggtcatggtcgggatcaccaacgagatgctccagggcatcgccgcctcccccgccgccgccgacgcctgggtcgcgcggaacgtgtcgcgctacgtcggccccggcggcgccgacatacggtacattgctgtgggaaatgagccattcctgacaagctatcaggggcaattccagtcatatgttcttccagcaatgaccaatattcagcaatcattggtgaaagctaatcttgcaaggtacatcaaactagttgtcccatgcaatgctgatgcatatcagagtgcatctgttccatcacagggagtgttcagacctgatctgattcagattattacccagctcgctgcttttcttagctcaagtggtgctcctttcgtggtcaatatctatccattcctcagcctttaccagagctctgatttcccacaagattatgccttctttgatggatctagtcacccagttgtggatggccctaatgtgtactacaatgctttcgatggcaattttgacacattagtttctgctttgagcaagattggctatgggcagctaccaattgcgattggcgaggtgggttggccaactgaaggggcaccaagtgcaaacctgactgcagcaagggcattcacccaaggcctgatcagtcatgttttaagcaacaaaggaactcctctacgtcctggggtgcctccgatggatgtatatcttttcagccttcttgatgaagagcagaagagcacattacctggcaatttcgagcgacactggggagttttctcatttgatggacaagccaagtaccctctgaatcttggattgggcagtccagttctgaaaaacgccaaagatgtgccatatcttcctccacggtggtgtgttgcgaaccctggtcgagatcttaacaatgtcgagaatcacctaaagcttgcttgtactatggctgattgcaccaccctctactatggtggctcatgcaatgctattggggagaagggcaacacctcatatgctttcaacagctactatcagctgcggaaacaggacgcccagagctgtgatttcgatggacttggcatgatcacttaccttgacccatccatcggtgactgccgctttcttgttggtatagatgacagtagaacatctacaatctattcttcaggtgactgttctcggaggcgctttggattgtggatcttggcgttcttggtaattgggttccttcagattggggtttatttgtgattttggttgtcgagagtcgactttaaacagctcccttgggcacacttcccatgtccttgtgaagtagcttcgtcaattggtggcttctagatgtaggaaaggggggacactgttagatgtacatgatcactagcttgttcttgggattgtgctgtccaattctgcaacttccgatcttcatgctaaggtggccaaaagctttctctagattgaaatgaagatggtagatgttgttgcaacctgattctgccattctttggtaccaccattttgatttggggcgaatatatttcttttgtagggggtatatgaggctatggtattgctgtggtcttaaagatacctcatgaaaccgctgaaattcatactggtggaatcacgagaaattgttttgtttg

SEQ ID NO: 12167 - DNA, 1473 bp, Oryza sativa
  ref <308>: DATABASE ACCESSION NUMBER: AK109515
  ref <309>: DATABASE ENTRY DATE: 2002-08-28
gttagatttaggtctcccccatatccccattcccatctctctctctcgagtctcgacggcggctgctgctgcggcgtcgcctgcggtgcgatgtcgtcgtctccggcgcatgctcagcgcttctactgccaccagtgcgaccgcacggtccccataccgccgcccacctcccccgacgccgacgtcctctgcccgttctgcggtggaggcttcgtcgaggagcttggggaggacatcaaccccaaccccaaccccaaccctagccccttcctgccacaccaccccttcttccccttcgcctccccatccttcgacctccgcaaccctagcgacctcgcggccttcttcgggcccccctccccctccccctccccctccccagccgccaggcgcttcgacccctccaacttcctccatgatcacttcaccggcctcctctctggcggcgccaccatccagatcgtcctcgagggctcctccgcctccctccccctcgggggcgccgccgccgggcccggggggatcagcctcggcgactacttcgtcggctctggcctcgagcagctcatccagcagctcgccgagaacgaccccaaccgctacggcacccctcctgccgccaagtccgccgtcgccgcgctccctgacgtcgccgtctccgccgacatgatggccgccgatggaggggcccagtgcgccgtctgcatggacgacttccacctcggagctgccgccaagcagctcccctgcaaacacgtcttccacaaggattgcatcctcccctggctcgaccttcacagctcctgccccgtttgccgcttcgagcttcccaccgatgaccctcaccacgcccacccaacccttggatctcaccgccccgccgcacccgcctctgcctctgcctctccctctccagctccaccacctaggctggctgagagaaggttcaggatatcgctgccatggcctctccgtgctgcgtttggcggccaggcggagagcagcaatcctaccaatcaggatcctgttggtggttctactgatgcttccggttctggcaacaacaatgcaactggaggtcatcgtggctacgatgatcttgactgaagagcatcggacaaagaggggatgaggaggggcgagggacattgtttggagaagaggtgcgccgcggcaatgaagctagcctattccgttctattcacctatcaatgacgagaagaaatgttggattttttcccccttccttaattgtggcatggatttactattgctggttttggggtcctctggtggtgtagagaattttctatgggggcccttttcttggtgacatggacatagactggtggtgaaaaaaaagaaaggatggtggtggggatgttatacattttaagtactatatgttacttgtcatatatacatatctgggagatctgaaagctttcctctgattgctggcgttggcgagct

SEQ ID NO: 12168 - DNA, 1838 bp, Oryza sativa
  ref <308>: DATABASE ACCESSION NUMBER: AK109516
  ref <309>: DATABASE ENTRY DATE: 2002-08-28
cttgggcttctcttgcggcaacatgaagaagctcttcttcttcctcttcctgctgatactggccgcctcggttgttcacggcgaggacggggcgtacatcggcgtcaacattggcacggccatgacgtcggtaccggcgccgacacagatcacgacgctgctccgctcgcagaacatccgccacgtgcggctgtacgacgccgacccggcgatgctcgcggcgctcgccaacaccggcatccgcgtcatcgtctccgtgccgaacgagcagctcctcgccatcggcaactccaacgccacggcggccaactgggtggcgcgcaacgtggccgcgcactacccttccgtgaacatcacggccatcgcggtcggctccgaggtgctctccacgctgcccaacgcggcgccgctcctcatgccggccatccgctacctccagaacgcgctggtggccgcggcgctcgaccggtacatcaagatctcgacgccgcactcctcgtccatcatcctcgactcgttcccgccgtcgcaggccttcttcaaccgctccctggacccggtgctggtgccgctgctcaagttcttgcagtccacgggctcgccgctgatgctcaacgtgtacccgtactacgactacatgcgctccaacggcgtcatcccgctggactacgcgctgttccggccgctgccgccgaacaaggaggcggtggacgccaacaccctgctgcactacaccaacgtgttcgacgcggtcgtggacgctgcctacttcgccatggcgtacctcaacgtcaccaacgtgccggtgatggtgacggagaccgggtggccgcacaagggcgacccgtccaacgagcccgacgccacctccgacaacgccgacacctacaacagtaacctcatccggcacgtgttgaacaccaccggcacgccgaagcaccccggcgtcgccgtgccgacgtacatctacgagctctacgacgaggacacccgccccggctcgacgtcggagaagtactggggcctgttcgacatgaacggcatcccggcgtacaccctgcacctgacaggctccggcgtgctgctcgccaacgacacgacgaaccagacctactgcgtggcgcgggagggcgctgtcgagaagatgctgcaggcggcgctcgactgggcttgcggcccgggcaaggtggactgctccgcgctgatgcaggggcagccgtgctacgacccggacaacgtcgaggcgcacgccacctacgccttcaacgcctactaccatggcatgggcatgggctccgggacgtgctacttcagcggtgtcgccgtgatcaccaccaccgatcccagccacgggtcttgcgtttacgctggaagtggtgggaagaacgggacgtcgttgctgaacggcacatcgctggcgccgtcgtcgaactccacggcgggggactccggcgcgcaccgggcgatcggggacgtctcgtcgttcgtccgcgccgtcgtcgcggcgctgctgttgagcgtcgtcctcctgttgtaggcagtgagacgagagtggttagtttagtaggcaaggcagcagagtccgtaggaattcatggggggattctttttttggtgtcgagtgggattggcctcggtgttatgggtgggtggtgatcattgagaacgaacaagatgatgtgcctgcgttcatctgttgctctaagatgttgtctgggaacttggtattgggtggtacgttgcctggaaaaggaaattggtactaggttgtatttgcagaaggtgtcagtgtttgtgcgctgaccacaatcaaaatcttcttctgagccaactgcttc

SEQ ID NO: 12169 - DNA, 2796 bp, Oryza sativa
  ref <308>: DATABASE ACCESSION NUMBER: AK109517
  ref <309>: DATABASE ENTRY DATE: 2002-08-28
ctctagccgcactgcgcgcctcccctcccctcgtctcgccgccgcttcgtcgccgccgccgcagcatcagccgcctcctccccgcggaaatgccgttcaagaggttcgtggagatcgggcgggtggccctggtgaactacggcaaggactacggccgcctcgtcgtcattgtcgatgtcgtcgaccagaacagggcacttgtggatgcccctgatatggtccgctgccagataaacttcaagcggctttctctgactgacattaagattgacatcaagcgtgtccctaagaagaccaccttgattaaggcaatggaggaagctgatgtgaagaacaagtgggagaacagctcatggggtaagaaactgattgtccagaagaggagagcatccctcaacgactttgacaggttcaaggttatgttggcgaagatcaagcgtggcggcgctatcagacaggagcttgctaagcttaagaaggaggctgctgcgtagatcattttggtggtgatcagttgagattttgatcaatgatgtttgatgtccctaaatatgaaacattgtgccagccactgttattgggatctcatgaaaaatttaagttttgaactcctgtgtttagaccttgtgccacaaattctattcagaatctaagatagtatgccatatgttgtgtgaaaaaaaaaaaaaaaaaaaaaaaaaaaaaaaaaaaaaaaaaaaaaagaaaaaaaaaggcttcatagctcaacctcctcgccgccgccgctcacctcccctcccctcccatccctcctcctccctagccccaggtcgctgctcggctccgccatgtaccgcgcggccgccagcctcgcctccaaggctcggcaagccgggagcagcgctcgccaggttggaagcaggcttgccttgagcaggaactatgctgccaaggatatcaagtttggagttgaggcccgtgctttgatgctgaggggtgttgaggagttggcagatgcagtcaaagtgacaatgggtcctaagggacgcaatgtggttattgagcagagctatggttcaccgaaagtcacaaaggacggtgtgactgttgccaagagcattgagttcaaggatagagtcaagaatgttggtgcaagccttgtaaagcaggttgctaatgcgaccaatgatactgctggagatggtaccacttgtgctactgtattgactaaagcaatatttactgaggggtgcaagtctgttgctgctggcatgaatgcaatggatttaaggcgtggtatttcaatggctgttgatgctgttgtaactaacctaaagggcatggctagaatgatcagcacatcagaggaaatagctcaggcgggcacaatatcagcaaatggggaaagggaaattggtgagcttattgcaaaggctatggagaaggttggcaaggagggtgtaatcaccattgcggatggtaacaccctttacaatgagcttgaagttgtggaaggcatgaaacttgacagaggctacatctctccttactttgttaccaacccaaagacccagaaatgtgaactggatgaccccttgatcctgatacatgacaagaaggtttcgaacctgcatgcagtagttaaagtcttggagttggctctgaagaagcaaaggcctctgctgattgttgctgaagatgtagagagcgaggcatcgggtactctgattattaacaagcttcgtgcaggcatcaaggtctgtgctgttaaagctcctgggtttggggagaacaggaaagcaaacttacaggaccttgcgatccttactggaggagaagtcataactgaagagctaggaatgaatcttgagaagttcgagcctcagatgttgggtacatgcaagaaggtaactgtatctaaggacgacactgttattcttgatggagctggagacaagaaatccattgaagagagggctgagcagattagatctgcaattgagctaagcacttctgattatgacaaggaaaagctacaggagcggttggcaaagctctccggaggtgttgctgttctaaagatcggaggagccagtgaagctgaagttggtgagaagaaggatagagtgacagatgcattgaatgccactaaagctgctgtggaagagggtattgtaccaggtggaggtgttgcacttctttatgcatcaaaggagctggataaattgccgactgctaactttgatcaaaagattggtgtacaaatcattcagaatgctttgaagacaccggtgcacactattgcttccaacgcaggtgtagaaggggctgttgttgtcggtaagcttttggaacaagataacaccgaccttggctatgatgcggctaaaggtgaatatgtggacatggtgaaggctggtatcattgacccactaaaagtgatcagaactgccttggtggatgctgcaagcgtatcatctctgatgacaaccacggaatccatcatcgtagagatcccaaaggaagagaaggaggcgccagcgatgggaggcatgggtggaatggattactaatcaacacccattaaagtaaactaaaaacatactcctgggatttaggattttttttgcggtgcaagttcatcgtcgatgtattttttgttcttgttgatgaggtggttgtcagacaattttgattccactggcggtaggacgggttggaacgaataaaattttagttcagagctaggagttcttgagagctgaggactgcacttcgatcaaaattgaatctgacaccttgtgccggaacattttt

SEQ ID NO: 12170 - DNA, 2217 bp, Oryza sativa
  ref <308>: DATABASE ACCESSION NUMBER: AK109518
  ref <309>: DATABASE ENTRY DATE: 2002-08-28
aaaaactacactagatgccactacggcggctgcggatccgcacgctctccaccgctgccgcccaccacccgttcgacggaattccccacccgtcgctcgcccgccaccgccgcgtcaaccccatcgccttctcggccgccgtcagggcgtccgacccggcctccctcccggcgctccacgccgtcgccgtaaccaccggcctccacggcttcgccgccgtgaccaactccctcgccgcccgctacgccaagaccgggtcgttcccttccgccgtcggggtgttcgccgcggcgcgggcgagggatgtcagctcctacaacaccatcctctccgcgttccctgacccggccgaggcgctcgacttcgcgtcgtggatgctccgctccggcgccgtgcggcccgacgccgtcacgtgcaccgtcgcgctctcgctggccgccggccggggggagggcttcctcgtgcggcagctgcacgcgctggcttggcggtccgggctcgcggctgatgtgttcgtcggcaacgcgctcgtcactgcgtactcacgtggagggtctctcggggaggccaggagtgtgttcgacgatatgccggcgagggacctcgtctcatggaacgcgttgatctgcgggctcgcgcaagacggcgactgcccggccgaggtgattggcgtgttcctccggatgctcagggacggcgacgtccagcctgaccggatatcggtctgcagcgtgatcccggcatgtggcggcgaggggaagctcgagctcggccggcaagtccatggctttgcggtgaagctgggcgtcgagggatacgtctccatcggcaacgtgctcgtcgcgatgtactacaagtgcggcgctcccggcagcgcccggaggctgttcgacgccatgagcgagcgcgacgtcgtgtcatggaccacggccatctccatggacagcgaggacgccctcacgctgttcaatggcatgcggcgagacggcgtgccgccgaacgaggtcaccttcgtggcgctgatgtcggcgctgccagcggactgtccggcgaggggagcgcagatggtccacgcggcgtgcctcaaggccgccgtgtccggcgaagcggcggcgtcgaacagcctcatcaccatgtatgccaaggcgcgtcgcatggacgacgcgaggatggtgttcgacctcatgcctcgccgggagatcatcgcgtggaacgctgtgatctcgggctacgcgcagaacggccggtgcaacgacgccctcgagctcttctcgtccatggccaggtgcctgacacccaacgagaccacgttcgcgagcgtcctcagcgcggtgaccgcggtggagacggtgtccatggcgtacggccagatgtaccactccagggctctcagcatgggcttcggcgacagcgagtacgtcgccggcgccctcatcgacatgtacgcgaagcgtggcaacttggaagagtcccggaaggcgttccacgagacggagcagcggagcctcatcgcctggacggcgatcatctcggcgaacgccaggcacgggagctacggcgccgtcatgagcctcttcggcgacatggcgcgctccggcgtcgcaccggacggcgtcgtgctcctcgccgtcctcacggcctgccggtacggcgggatggtcgacgccggcagggacatcttcgactcgatggctgccgatcgcggcgtcgagctgtggccggagcactactcctgcgtcgtcgacatgttaggccgggcagggaggctggcggaggctgaggagctcatgatgcggatgccggcggggccgagcgtgtcggcgctgcagagcttgctcggagcctgcagaatccatggcgacgcggagatcggcgagaggatcgccagaattttgacggagaaggagccgacggagtccggcgcgtacgtcctcctgtcgaacatctacgccgacgtgggcgactgggacggcgtcgccaaggtgaggaggaagatgagggacagaggcgtcaagaaggagatcgggttcagctgggtggacgccggcgctggcgaggcactgcatttgcacaagttttcgtcggacgacacgacgcatccgcgtacagaagagatatacgcagtggccgatgtgttaggctgggagatgaaatttctgaagaattgttcgcaaatggaaatgatcttgatctgatacatcagtataaatttaatcg

SEQ ID NO: 12171 - DNA, 2619 bp, Oryza sativa
  ref <308>: DATABASE ACCESSION NUMBER: AK109519
  ref <309>: DATABASE ENTRY DATE: 2002-08-28
ctacttttttatgcactgtggaaacatattcagccaagcttcaagagtttcaaacaaaccaaacgaagcattgtacaaaatagttattacagttgaaggaaccaacaaacataaaaataattgttcctacatagaaaccagtaccaaacaaaatgtgtcgaatcacaaattttggtctctgctcttgcaatgaacagtgcaatataaaataaactggaacatacacagcgattccgtcgtactataggatatgcattttgagtagattcttactttgaacgaagtcagccgcacggcaaaggtcctcaaattatggtatacaaagataatctctagttggtaacaccaggctttcaattccaggaacctgtgatcaaacacaaatttcagttatgtgaccaagaactggtagttgtttgaacatcctctcatgagcagcagttacaaacatagatatgtaaagttagggaaatttgcacataacttgtaaattacataaaaacagcaccagcctgagtaggcaacatgcaaagatagatcaaatgtacagttacatgtaaaacaagcagattgtattgcacgaacatttcaatacctaattagcatttttttttttgaactggaacattggttcatttaaccttgtcatttaggttaaccacgaggagtttacatatcaataacctttggctctttaatctaccttaattatcacagccaggtaataacaatgcactaacaaacaacgatttgctgaaccgtcagcgaaataaaaagatattgagtatttttctcaaaccattgatcatatcagtggacatctatatggcaaacagtgacaccttcagtaattgctctattcacattgcaatattgcaccactgagaccattggaacttgattgcactatatgcacaacgtattttacaacaaggccatgtccacctcaatgatatcagagcaaccaacaaataataaacaggagcaatacatgcagaaaggaattaataaacaaatgctgcaatacttgcttgatagaacttcttcatattattcagcccacgtattggtcaaatagtggaacgatttggttgtgtgactacctcttacaggcacatgggaaccagccactcgtaggatttgttcagttcacgacactgcaaactccaagctccttcaacagaaggtcttgtggaatggaatggcaccgagcagaagatgctgatcaaacctaaagaaaaatacacaatcagagcacagcaaactaaaactccaaatgaatcaaaacatcaagactgtaggaaaagtagtagctccccaacatcaagactggatccacactctgaagaagttggtggaagcgcgaccatcggccaccacgtgctgcctggtggtgttttcaacaacaaatccacaggcgaactgatcacctggacagcactttggtgccaccattgccgctcagtgtaggagccagctaagcattggtttaaaagcttgaggatgatgcaagcagggagaatgagaataagaactgagcagggaagacgagatcgtggctgcctcatcgtcaaggtcgtcatttgatctacagccaccggcgcacaccgcctccatctgcccttgctggtgggggaggagaagtggggctccattgatgtgtgcttgatccgccacaaatgtcggagcgcaatccatgtcatcgctgatgtcgacaccatcgccagatatgccgaggcaggcgcagcaccaggccagatgttatcgaaggcggtagccagagccctcaatctcgacttcttggagttgcccactgccgccaatctcatctcgctggcatccgatctcatctcgccggcatgagtggcgcacaggaggattgaggagaccaggggacacgacgatggtggttcctggagcccatgcggtggcggcggcttgcgaatcgcccgggtcggagagggaggggcgagaggaggggatgcgggctgcggcggcgcttctccaccatacagccgccggcaggcctctcccctctttattgctgttgccgcctctccctcctcaaatcgacggacaaccgtcctgtagcccacgaggttgcggcaatgacggccggctccaccagaggtcgaccgctcacagcggtctttggcggtgaatgacggaggtgcggcgaaggatgcagcggcgacgctcggcgatggcgacgatagcggaggacgacgctgcggcggtcagatccgcgtcccccaaacacatgggaggtcggatccggacgtcggcggccagaggcgatggccggcagcggcggcgtgagccggaggcggcgcgcccggcgacggccacgcgaggcagaggaggcagaggcgaaggtggcagcgcgagggggtggtagaggcggaggcggaggcggcggcgctcggtgacggggacgacgatggtgacagggtgagagcaggtacaatagcatgctattagccagctataaatatattttaatgagataaaagataagaaagaagagcagcgggctacagatctgtaaccagctacaacacggacttcaagatgcagtgtgtatgacaagtgggactatatattaatagtatagtgaac

SEQ ID NO: 12172 - DNA, 1831 bp, Oryza sativa
  ref <308>: DATABASE ACCESSION NUMBER: AK109520
  ref <309>: DATABASE ENTRY DATE: 2002-08-28
tattatgctcaggttattcatcattatccacagatatgttttttcttctttgcaaatattctccttttcccagagccgcattggactccaatacaagagtcagagggtggaagcaaagaaatcgtagtaaatgatctctactggcctctgtagccaaaggattcagcaaatctgcgaagacctcacgagtcaggagctttccaggagttgcaacctgcagctgctgcttactttggtgagttggagaaggcccttatccatggcaccagtgctggtgctggtgtcgatcatggcatgatccaaagtgacgcgtacacagagtcagcaggatatcttgcagctaggccccccacactggaaatcttcccttcatggccaatgagtcatctacaggagccatacagtaactcgcagtcagtagggagcaccactgactctagctcagctcagaacacaatgtcacaggccgagttggtgtccccagcgagcatgaggtccgactctgggcaggaacagcaacaacaggaggtattgatggtgaccattgatgattacaactacaaacaaggacttggagcagcaatagctactgcaccaagctttcagcaacatgcaggaggcctagacatgaggaagcatggatccactagaaaagacggaaaactgttagatgccaagactgaaaggcgattggctcagaacagagaagctgcaagaaagagcaggctgaggaaaaaggcttatgtgcagcaacttgagactagccgcataaggcttcagcaaatcgagcaagagcttcagagagcacgctcacagggcttgtttcctggaggatgcagtgcacctggagatatgagctcgggtgctgtaatgtttgacatggattacacccgatggatagacgacgacagcaaatgcatggcagagctccagggcgcgctacaggcccagctccccgacggaaaccttggtgccattgtggaagaatgcatgcgccactacgacgagctcttccaccttagggccgtgctcgccagctccgacgtgttccacctgatgactggcatgtgggcggcgccggccgagcggtgcttcctctggatggccggtttccggccatcagaaattctcaaaatgctgatacctcagctcgatccactgacggagcagcagctgatggggatgtgcagcctgcagcagtcgtcggagcagaccgaggaggcgctcgcgcaggggcttcaccagctgcaccagtcactggccgacgcggtgggcggcggtcctctcaacgacggcgcagatgttgccaactacaccggcctcatggccctagcacttggcaggcttgagaacctcgagagcttttatcgtcaggctgataatctgaggcaggaaacgttgcaccacatgcggcgaattctcacaaccagacagacagctcggtgttttctttccattggagagtataatcgccgtctccgtgctctcagctccctctgggcttcacgtcctcgcgaaaacttcattgcgacagagaatgtcagccctacaggaactgaatttcaggttattcagcaatctcagcaaaatcaattctccggtttctgagacctcttctccaggagggtacaaattctgcatttctgccagtagcaaggtggagagagagagagagagagagagagagcgaatgtaatgttctatcattatgatattgagaaaggaacatcactaggaaaaaaaaagatggcagaaagttggaaactggggcggctcgatcacttgctatgttccaatggctcttgaattgaatgaagggttagctctaagc

SEQ ID NO: 12173 - DNA, 1004 bp, Oryza sativa
  ref <308>: DATABASE ACCESSION NUMBER: AK109521
  ref <309>: DATABASE ENTRY DATE: 2002-08-28
gtgacattcattgatgaggtttgcgtttccaaggccatctgcatcatcaggtagctgcaacatggatccacggcctctcatctgctccatccaacgcccgtccttgctttaatttgtttcaccacagaaaatactccagtccaactacaccgagagagtagacgagacgagacgagacgacacaagtcaagttgcttttgcatttgcatacgcacacactgccatctcagtgtagtgtagtgtagcgaagcaaccggcggcgatggcgatgcggtggtgctatgtcggcaaggccaccaagatcttcttcaccgtcctggccctcctcgccctcatcggtgtcgtcctcgccttccgcgccctcctccaccgcgccaagtcgcgcgccagctcctcctcctccgcctgcgccgccgccgacgagtgccagcccatcctgcccgacaccgtcccgcagccctccatgccgtcaacagccgccaccactcctccgccgccgcaccaatatccctccttccccccaccggacgccgccatgcccatgcccatgccgcagcccccaccccctctgcagccaccacctccagcgattgcgcagccccctcccgcattcgcctcaccgcctcctcccgacgctctcgtgcccccgccgcctcctcccgctgcgcctgcgctggtgacgccaccgccggcgtcaccgtcagctcctccgcccgcaccggaggcgccaagcccaacggcctcctgatgccgccgattcttcatctcagattcagagcggctactctagtgtgtcaggtagcccggcgattcgatgtactgctagtgattctggctaatcttgcaattcattcgcaaaattttgccttgctgaaatgctgagttgagttcatctctgatgttgcgtgagttgattacactgtacaaatagttgcctgacaattctgttgttccaccatcaaattcatttgttgaatttcagttatctgaggagcatgacagcg

SEQ ID NO: 12174 - DNA, 1325 bp, Oryza sativa
  ref <308>: DATABASE ACCESSION NUMBER: AK109522
  ref <309>: DATABASE ENTRY DATE: 2002-08-28
agcctttgaagcaagcttagcacttcacaagtttcctcttgtgcagaagaaggagaaacaaaagaacacagaaattaaattaaactcgatcaggaaggtatagcaggcatggggcgcggcaagatcgagatcaagaggatcgagaacgcgacgaacaggcaggtgacattctcgaagaggcggggagggctactgaagaaggcgaacgagctcgccgtgctctgcgacgcccgcgtcggcgtcgtcatcttctccagcaccggcaagatgttcgagtactgcagccctacctgcagtttgagggaactcatcgagcattaccagaccgtcaccaacactcatttcgaggagatcaaccacgatcagcaaatatttgtggagatgactcggatgaggaacgagatggagaagctggacggtggcatcaggaggttcaccggcgacgacctctccaacctcacgctcgccgacatcaacgatctcgagcagcagctcgaattctccgtcaccaaagtccgtgcgagaaagcatcagctcctgaaccagcagctggacaaccttcgtcgcaaggagcacatcctggaagaccagaacagcttcctgtgccgcatgatcaacgagaaccatcatcaggcggcggtgggcggcggcgacgtgaaggcgatggtggagatggcgccggtgctgtcgatgctgacggcggcgccggcgtactacggcgaggagtcgtcgagcaccgcgctgcagctcaccccgccgctgcacgccgtcgacgccgccgccgccgccgggttccggctgcagccgacgcagcccaacctgcaggaccccggctgcagcagcagcagcttccatgccgccgccgccggccacggcctgcagctgtggtaagaacaaacgaagcaaagcatacatggcacatcctgatactctcatcagagatctagatgattgcttgctaattaagcacatgatggcattgtcgattctgggagctaggagtaacttggagaccatgaagatgcatgatcagctgatgatagacgatcgagttgggttgctgtgttgttcaattgttcatcgttctggacatatatatatatatatatgtgtgtgtgtgtgtgtgtgtgtgtgtgtgtgtgtgtgtgtgtgtctaattagcacatcagaataatcaagcttttctacctagttaactagtacagctgctaagtaccttttgatttgttggtgtgtgaactactgaactggagttggatattaaggtctccatgcatttgcatggttaattagcagagagatcattgaggtttttaggatgtaac

SEQ ID NO: 12175 - DNA, 1973 bp, Oryza sativa
  ref <308>: DATABASE ACCESSION NUMBER: AK109523
  ref <309>: DATABASE ENTRY DATE: 2002-08-28
atgctgcacgcaatcaattcaggtcttgtaagcttgcatatagctgtccagatatgtttggttgctgacaacaagcatcttgatcgatcgagtttcagtatagttaagtttcagactatcaggcagcatgggaagcagagggtgttcatgctggctcttaagcctggcactgctctgctccctggctgctgccaaggagcaataccatgagtttgtgatcagggagacaacagtgaagaggctgtgcaagagccaaagcataatgacggtgaacgggcagttcccggggccgacgctggagataaaggagggggactcgctgatcatcaacctgataaaccgtgggaggtacaacgtgacgctgcactggcacggggtgcggcagatgaggacggggtggtcggacgggccggagtacgtgacgcagtgcccggtgaggcccgggcagagctaccggtatcgcttcacggtggcggcgcaggagggcaccctctggtggcacgctcactcctcctggctccgcgccaccgtctacggcgccctcctcatccgcccccgcgatggcaccagctaccccttccacgtccagcccaccagagagctcgcccccatcctgctcggggaatggtgggacatgaaccccgtcgacgtggtgcgcgccgccacgcgcaccggcgccgcgcccaacatctccgacgccctcaccgtaaacgcccagcccggcgacctctacagctgctcctcccacgacacggccttcttccccgtcacctccggcgagaccaacctcctccgcttcatcaacgccgcgctcaacacggagctcttcgtctccctcgccggtcacaacatgaccgtcgtcgccgccgacgcctcctacaccaaaccgtacaccacctccctcctcctcctcgcccccggccagaccaccgacgtcctcgtcaccttcgaccaacctcccggccgctactacctcgccgcccgcgcctacgccagcgcccagggcgtccccttcgacaacaccaccaccaccgccatcttcgactacggcgccgccaacaacgcctccagcgccgccatcgccatgcccaccctcccggcgtacaacgacaccaccgccgccaccgccttcacgacgaacctgcgcggcctccgcaaggcggagctcccgtcgcgcgtggacgagagcctcttcttcaccgtcggcgtcggcctcttcaactgcaccaacgccacggcgcagcagtgcggcgggcccaacgggacgcggttcgcggcgagcatcaacagcgtctccttcgtgctcccctcctccacctccatcctccaggcgcaccaccacggcgcacccggcggcgtgttcaccgccgacttcccggcgagcccgccggtgcagttcgactacacggcgcagaacgtgagccgcgcgctgtggcagccggtgccgggcaccaaggtgtacaagctcaagtacggctccgccgtgcaggtggtgctccagggcaccaacatcttcgccggcgagaaccaccccatccacctccacggctacgacttctacatcctcgccgaggggttgggcaacttcgatgccggcgccgacacggccaagttcaacatggaggatccgccgatgaggaacacggtgggcgtgccggtgaacgggtgggcggtgatacggttcgtggcggacaacccgggggtgtggctgatgcactgccatctcgacgtgcacatcacctggggcctcgccatggccttcctcgtcgacgacggcgtcggcgagctgcagtcgctggaggcgcctccacctgacctgccactctgctagtgcctccatcaacacatcaaattaatcacctcttgtgttactgttagcagctgattaatcatttggagatcagcattactgaattaattacatgtatcatttttcacatttgattcattaagaagataacaacattctcttc

SEQ ID NO: 12176 - DNA, 1966 bp, Oryza sativa
  ref <308>: DATABASE ACCESSION NUMBER: AK109524
  ref <309>: DATABASE ENTRY DATE: 2002-08-28
agcaactcccctcctccactagaccaccatgcacagatcgatggcctctcaggcggtggcgcccctcctcctcatcctcatgctcgcggcggcggcggggggcgcgtcggcggcggtgcagtgcgggcaggtgatgcagctgatggcgccgtgcatgccgtacctcgccggcgcccccgggatgacgccctacggcatctgctgcgacagcctcggcgtgctcaaccggatggccccggcccccgccgaccgcgtcgccgtctgcaactgcgtcaaggacgccgccgccggcttccccgccgtcgacttctcccgcgcctccgccctccccgccgcctgcggcctctccatcagcttcaccatcgcccccaacatggactgcaaccaggttacagaggaactgagaatctgagagcgtgaggaatcgagttcatgttgcatttatcatcaatcatcatcgactagatcaataaatcgagcaaagctttgataaagagcgagccgccttaattaatttacaataatcttggatgtcatcctgcatgcgtgtatgatcacacggttgtttaattaggcactttaattttgcactgtcgtgtgttacttattcctgatctctactatacggtgactaacccctgatcaaaagtttaattcaacatgttttcgagtacttgcgatcctaattcccaaattcatatgctttgcaatatcaaatgatccatcgagaagaagaaactatatattattccaaaaacgataacccaaacgagctttgcaatatattattcataatatgctttgcaatatcaaacgatccatcttgaatcagcaatggttgttcgttgcacgtcccaatttcagacgagcttgtagccgatgacccagacgtcagccggcggcggcgcggcgcggccgcggacaacgtaggcgaaggcggcgctctcgccggcggccagcgacgacgggagcacgtagccgtacctcgccgccttctcgagcccccacaccgggccgtgcggcttgccgatgccgatgtggagctcctcgaccgtcttgccgccggccggcgacctgttgctcaccgtcgccgcgtaccggcggtacgccctcccgtccttcttccacgacgccgtcgcgttcagctgcgtgatctccaccggcgacgccgcagctgcgagaggtggcagcaaggtctggttgtccggcctcttgatcgctgcttcggcgagcccgccgcggccgccgccggcgaggcgagcgaggacgcccatgagcggcgcgttgttgtaggtggccacctccgtctgctggtagttgttcctctcgtcggcgaagccgtcgcgcccgtcggggccgccgaccacggcgccgtcgagcaggttcgggttgctgccggcgcggccgaaccagctcgcgtacccatccttgcagctcacgaacgacgggttggccctgatggagacgatggacgcgccgcggtggtgcgcgcgccgcgggtacctcgcgccatagccgaccatgtagctaatccccctcgggttgctacccaggatgtagtccacctgcgacttggccagcgcgacgagctccgacgcccgcgccgccggcccggcctggcaccgcacgacggcttgcccgcggccggcggcggcgaggtggtcggcgtagacggccagcaggaacgacgcgccggtgacgaactggaggttgttccagccctggtggtacatcaggccgccgggcgtcctcccgacgttgccaccgccgccgcccttgccgaggcaggagcacgcgaagacgtcggcgttccgctggtacctccgcagcacggcggcgtgcggcccggccttcccttgcaggagaaactacatcaaaaggaatgtaagtataagtacagtgttggggtgagtagtactactcttgtatccgacaaaatgtggtaatcactgtagcatttcagacc

SEQ ID NO: 12177 - DNA, 981 bp, Oryza sativa
  ref <308>: DATABASE ACCESSION NUMBER: AK109525
  ref <309>: DATABASE ENTRY DATE: 2002-08-28
atccacccatttttccgcgatcccgtgcgcatctcatcgcccccacctcgtccgccatggccgattccgccgcagccgcatcctcctccctcccccgctcgctggcgtccaggaggccgctgccctcctcccctctccgcggcgggaggccccggtctccccgccgctgccgcttcgggtcccgctcgctccaccggctgcgagctcgagctgggaagggcgatcccgaggatctgtatgggccctacccatgggatcagtccttggatctcaccactggcctcgatattcagtgggtgccagaagatagagtcacactgttcacttctgatgggcttgttcaaatagggggttccctggttcctcgtcgaattactccatcagagaagaggcaacgaaaagtaaaaggtatacaaaatatccaacggtttcaggagagctcgtacatggacccaaatcaaagtctttgccttggagcactatttaacatagcagcaacaaatggtctagatatgggaagaagactatgcatctttggcttttgtcgctctattgaaatgctaagtgatgtagtggaagatacagtattggagcatggtggtgaggttgtcacggcagagaaggcaagcaaagatggcctccaggagaagttgaccatgtctgttgcagtgccattgttgtggggtgttcctccagcatcagagaccctccatgtcgcggtgcggagcggtggaggcattgtggagaagatctactggcaatgggacttattttaaaagtcccaagccgtccagtcattaacaaatgatccatgccacggtgtaaatactcattcagtctaattcgctgctcgcattgtgtcagcaattgtaaattgtgcatatatgtaaacagaaaactttggaatctctatacatgtacagacatggtcacacccctgcatataagaaactgtgagttaacagctcaacttctactttt

SEQ ID NO: 12178 - DNA, 1931 bp, Oryza sativa
  ref <308>: DATABASE ACCESSION NUMBER: AK109526
  ref <309>: DATABASE ENTRY DATE: 2002-08-28
aagggcgaggtgagcgaggcgagactcgagagagaggagaagatccagaaatcgcaagctgcacgctatagctaggtagctatctccggggaaagagagagtaggctgccatggagagcttcttcgtcttcttcacggcggcggcgttgccggtggtggtggcggcggcggtgatcgccgggctgtgcattacggcggcgtggctggcgaggccgcggcgcgtggcggaggtgttccggaggcaggggatcgacggcccgccgccgtcgtcgttcctggcggggaacctcccggagatgaaggcgagggtggccgccgcggcgtcggcggcggcgccaacggcggacggggaggagaccgcctccgccggcggcggcggcggtggccgggacttcgagaaggacgggttcgacgactactgcaccaggatcttcccttacttccacaagtggaggaaagcctacggcgagacgtacctgtactggctgcggcggcggccggcgctgtacgtgacggacccggagctcatcggcgagatcgggcggtgcgtgtcgctcgacatgggcaagcccaagtacctccagaaaggccaggagccactcttcggcggcggcgtcctcaaggccaacggcgcgtgctgggcgcgccagcgcaaggtcatcgcgccggagttctacatggcccgtgtcagggccatggtccagctcatggtcgacgccgcgcagccgctgatcgcctcctgggaatccaggatcgacgccgctggaggcgcggcggcggcggaggtcgtcgtcgacggcgacctccggagcttctccttcgatgtgatatcgcgggcttgctttgggagtgattactcgagggggagggagatcttcctccgcctccgtgagctgtccgggctcatgtcggagaccagcgtcatcttcagcatcccttcgctgaggcacctgccgacggggaagaaccggaggatctggaggctcacgggggagatccggtcgctgatcatggagctcgtcagggagcggaggtgcgcggcgagggcggcgagggagcacggcgggaaggcggcgccgccgtcgccgccggagcgcgacttcctcggctccatcatcgagaacagcggcgggcagccgcggccggacgacttcgtggtggacaactgcaagaacatctacttcgccgggcacgagacgagcgcggtcaccgcgacgtggtgcctcatgctgctcgccgcgcacccggagtggcaggaccgcgcccgcgccgaggtgctcgaggtctgcggcggcgacggcgccgccgcccccgccgcgccggacttcgacatggtgtcccggatgcggacggtggggatggtggtgcaggaaacgctgcggctgttcccgccgtcgtcgttcgtggtgcgggagacgttccgggacatgcagttgggtaggctgctggcgcccaagggcacctacctgttcgtcccggtgtccaccatgcaccacgacgtcgccgcctggggcccgacggcgaggctgttcgacccgtcccgcttccgcgacggcgtggcggcggcgtgcaagcacccgcaggcgtcgttcatgccgttcggcctcggcgcccgcacctgcctcggccagaacctcgcgctcgtcgaggtcaagacgctcgtcgccgtcgtcctcgcccggttcgagttcacgctctcgccggagtacaggcactcgccggcgttccggctcatcatcgagccggagttcggcctccgcctccgcatccgccgcgccggcggtcaggacgccacgtcacaagttgacacatctactgcacccgtgcatagttctcataattaattggcttctgtaaacagctagtaagtcgtgaactgaaaaaaatacatcacacatacagagacaacagaggattaccattttaccagc

SEQ ID NO: 12179 - DNA, 1924 bp, Oryza sativa
  ref <308>: DATABASE ACCESSION NUMBER: AK109527
  ref <309>: DATABASE ENTRY DATE: 2002-08-28
aattagaatgagcctcgagcacaacaagatgatgatcactctcgtgcggttgctgccgctcgtcctcgtcgtggcattggcgtggcctgcggctgaggcgccggccgccgcgagccccccaccggacccggtgcagtgctcgtccggcagcggcacggccgactgcaccgtgtcgagcgcgtacggcgtcttcccggaccggtcgacgtgccgcgcggccgccgccgtgtatccttctacggaggaggagctggtccgggccgtggccaacgcgacagcgtccgggaccaagatgaaggtggccaccaggtactcccacagcatcccgcagctggcctgccccggcgacggcgacggcgagggcctcgtcatcagcactaggcggctcaaccgcgtggtggccgtcgacgccggcaggatggaggtgacggtggagagcggcatatcgctgcgggagctcatcgccgaggcgggcaaggccgggatggcgctgccgtacgcgccctactggtgggggctcaccgtgggcggcatgctcggcacgggcgcgcacggcagctcgctgtgggggaaaggcagcgccgtgcacgagtacgtggtcgggatgcgcatcgtcacgccggcgcccgccgccgacgggtacgccaaggtgcgggtgctcaccgcggccgacccggagcttgacgccgccaaggtctccctaggcgtcctaggagtcatttctcaggtgactctggcgctgcaacctctgttcaagcgttctgtgacgttcatggagcgcgacgacgacgacctggcggaccaggtgaccaagttcggctaccagcacgagttcgccgacatcgcctggtacccgggcatcgggcgagcggtgtaccgcgtggacgaccggctgccgatgaacgcctccggcgagggcgtcctcgacttcatcggcttccgtgccacgccgagacttctgatccgtactaaccgcctcgcggaggagctgttcgagcgcgcgggcaacggcaacggcaagtgcgtgacgtcaagggtcacccacgcggcgctctcgtcggccgggtacgggctgatgcggcggagcggcgggctgttcaccgggtacccggtggtgggcccgcagcacctgatgcaggcgtccggcggctgcatcaccgggccggaggacgcgctcctgacggcgtgcccgtgggacccccgggtgaggggctccagcttcttccaccagaccaccttcagcctgccggtgagccgtgccggggcgttcgtcgaggaggtccggcggctccgtgacatgaaccccaaagcgctctgcggtgtggagctctacgacggaatcctgatccgctacgtcaaggcgtcgaccgcgcacctcgggaaaccggcggcaggaggcggccagtcggacgacatggtggacttcgacatgacgtactaccgcagccgcgaccccaacagggcgcggctgttcgaggatgtcctggaggagatcgagcagatgggggtgttcaagtacggcggcctgccgcactggggcaagaaccgcaacctcgccttcgtcggcgccgcccgtaagtacccgcgcatcggcgagttcctccgcatcaaggacgcctatgaccccgacggcctcttctccagcgactggagcgacatgatgcttggcattggcggccgtgcgccgaccagggacgcgccgggttgcgcgctggaggggatgtgtgtgtgctcgcaggacgcgcactgcgcgccggagcaaggttatgtgtgtcgccccggcaaggtgtacaaggatgccagggtctgcaccaaggtgtagtccatgtagtttgatcacgtcggacacacgcttcagtgaattcttatggcgattagttaccgagcattcgacagtaaaagcaactgaagaaagggtgattct

SEQ ID NO: 12180 - DNA, 1891 bp, Oryza sativa
  ref <308>: DATABASE ACCESSION NUMBER: AK109528
  ref <309>: DATABASE ENTRY DATE: 2002-08-28
aagcttttcttaagctcgccaagaacacacccgagaaatccaaaagggagggaaaagaaagggggtggccggccggtcggtcggtcggcggccatggatttcgacgaccatgacgagggtgacggcgacgaggagatgcctccgatgcctctgagctcgggctacgacgcgccgatgcagcccgggcttggaggtggcggtggcggggtgcccaagccgggaggtggagtcggcggcggcggtggtggtggtggtggtggtggaggaggaggggcgaggtatcgggagtgcctcaagaaccacgccgtcggcatcggcgggcacgccgtggacggctgcggcgagttcatggcttccggcgaggagggctccatcgacgcgctccgctgcgccgcctgcggctgccaccgtaacttccaccgcaaggagtcggagtcccccacgggcgtcgggccggccgagccttccgccgtgtcccccgccgccatctcggcctacggcgcctcgccgcaccaccagttctccccctactaccgcaccccggcagggtacctccaccaccagcagcaccagatggcggccgcggcggcggccgcggccgccgccgcagcgggcggctacccgcagcggcccctcgcgctgccgtccacctcccactcgggacgcgacgagggcgacgacatgtccgggatggtcggccccatggtgattggccccatggtcggcatgtccctcggctccgccggcccctccggctccggctccggcaagaagcggttccgcacaaagttcacgcaggagcagaaggacaagatgctcgccttcgcggagcggctcgggtggcgcatccagaagcacgacgaggccgccgtgcagcagttctgcgaggaggtctgcgtcaagcgccatgtcctcaaggtttggatgcacaacaacaagcacaccctgggcaagaaggcgccatagctaagctaagccaagcaagctcagctcagctcatctcctcccggtgctaggtacctgcactgcaactgcaactgcatgcatcaccatctccatctacttctactacctccttacccgcggctaattagcctttttctttgccttcttttacctcacctgagtagaagcttagctaggttcgtagcgagcaagctgttcttgttggttttaggggaggtggtggttgctgctgctgctgcttttgcatccttccttgtttctttttcgttattttattccattgtggttgggttctttgggcttgtggttgccgtcgttgttgtttcctagtagatgatgacgacgacgtttggtgttgggaaggaagaggacatggatggcgatttgccgatcgatttagatcttgggaatgtagtacttttgtgttgcaattgaaatttccttcctggggatttgggttgctgcacggtttgtttgtttcatcatttcttttcccctatatttcttgtgcttggcacttcatcatcagtagcacttgtagttcgtctagctaacaactagggcagataaagattcagaaaggtcggctgcaactatatgagctgcaacactgttgcattcacatcgatctccctcgcttccaatttccagacctgggcaccaacttgtccatgatccgtccgcttcacctgtctactctgaaattccaatttctctagctaccatgttcgctgcatttttcttccgagttctcgatctcactgtatccgctgcatttactcgtcttccacatctcgcgagcagtgatgccgcattgctgcccatgtgttaggacgcagagcttgcagaagctatagcaatggccggggactttttagaatttagtctatgtgaattcaatgaagcctcgtcctctcttttactc

SEQ ID NO: 12181 - DNA, 609 bp, Oryza sativa
  ref <308>: DATABASE ACCESSION NUMBER: AK109529
  ref <309>: DATABASE ENTRY DATE: 2002-08-28
gggggggaggacgcggccgtggccgtgtcggtctccgcggcggcggcggcggcggggcccagcctggcggacacgttcagggcgaggttccgaccggcgcggttcggccaccggcgctgcggcggcggcgcgacggcggactgccgcgtctgcctggtgcggttcgaggcggaggcggtggtgaaccgcctcccctgcggtcacatcttccaccgcgcctgcctcgagacatggcttgactacgaccacgccacctgcccgctctgccgctcccgcctcctcgccgcctcctcctcgccgccggccgccgccgccgccttggcccggacttagcgagtggattcgattcgactcgattcgattctccgacgagccgccccgcgctggctacgcgccaccgtctccgggtggcctccccgtgtgggcgtaggaaactagagagagagctctttgccttttttgcactttcacccctcactttgtcccttttttttccgtttcgggcggtttgtgcctgtaccgtgtaaatacctcgcagcaagagagtgctcctacgggtgtagcactttttgtgagctttgtgtataaaaccttctcggaatagcaacc

SEQ ID NO: 12182 - DNA, 804 bp, Oryza sativa
  ref <308>: DATABASE ACCESSION NUMBER: AK109530
  ref <309>: DATABASE ENTRY DATE: 2002-08-28
actaatcacagctcacttcagctcgctcgctctcactactactcgctggcaccattcaggcggatccaatgcccgccgcctcctcgcctcttcccctcccccttctcctcctcctcctcctcgccgtcgccggcgccggcgccgcgggtgcgggggcgggggtgggggtgagcggcggggggcagctgtggtgcgtggcgaagaacaacgcggacgacgcggcgctgcaggcggcggtggactgggcgtgcggccccgcggggggtgccgactgccgcgccatccagcagggcggcgcctgctacgacccgcccgacctcctcgcccacgcctcctacgccttcaacgactacttcctccgcgccggcggcgcccccgccgcccccgccgcctgcgacttctccggcgccgccgccctcaccgccctcaaccccagccatggcagctgcgtgtttccttccagcacatctccaaaaaatggcagcttcacaggaacaacaacttatggtccagctggtgcagatttaagcaaaagttcttccaggcaactgaatttctggtcattgttgttatgcatatgtctgtctgtagcatttttcgatgccttcccttctgatacattttcataaactcctctctgctagtatatgataaactactggactgcagaaatgcaatttgttgtacttgtggttgaagcatcatttctttgcaagtctgtgtagagaaaaggaatactcttttcaagcttccccttttccctcctgttatttaatgagcatttaaaggggtccttgccatctc

SEQ ID NO: 12183 - DNA, 922 bp, Oryza sativa
  ref <308>: DATABASE ACCESSION NUMBER: AK109531
  ref <309>: DATABASE ENTRY DATE: 2002-08-28
aaaaaaggaaaaaaaaatcaataaaccccagaagaagcctctcctcctctcgactcctctcctcgccgctctcgttgcttcctcgcggggagttggaaccccctcccctctccctctccctctcgctgactcgctcttcgaggagaaggcgaaggctcccgcgccgcggagtcggagatggccgccgccgccgccgtggtgaactacccgctcgtcgcggcgctcgtggcgttcgcgctcgcgcagtcctccaaattcttcaccacctggtttaaagagaagcgttgggatgccaggcaacttatagcttctggggggatgccatcatcccactcagccacagtgacagcgcttgcagtggccataggaatccaagaaggctatcgtagcgccacctttgcaacttcagtaattattgcatgtgtggtgatgcgtgatgcttttggagttcgcttacatgctgggaagcaggcagaggtattgaatcaaattgtgtacgagctaccagaagagcatccattatcagagacaaagccattgcgtgaaattcttggacacacagttcctcaggttgtggccggttgcatcattggaatccttatagctgttgttatgcgcttagctctatggagttcttagacacgcattactcgtaggtatttgcttgatcacctcatatcgcatcgctgatgagttgtgaagcatgaaaactcaaatctcctcttggatgtgatttgtacaaatgctcagttttatgactatactataaggttcctaaccggtgtaggtctgcgttgtaggaggtagattgtagttcagttggtgctgtacatcgtagaaatttactgtgaattggaagctcatgtgatcaacctttgttatacaactggcaatgatcatgctgtcaacttttctttctggc

SEQ ID NO: 12184 - DNA, 937 bp, Oryza sativa
  ref <308>: DATABASE ACCESSION NUMBER: AK109532
  ref <309>: DATABASE ENTRY DATE: 2002-08-28
acgatacgtatattgggtagcggccaaagcgctaggcaaatatccgtttcctctctctaccgacgcaaaacactggaacggagctcgcgcagtcgcgcggtgggccagggtgaggcggagctggtgcggcgaggcggagctcccgcggcggggcgggagcgccgtcggggcgcggtcggagcgcgccgtcggggagcaccgtcggggagcgtcgtcggagcgcgccgtcggggaggaggcgtagtgggcccgtagtggcgtcagggcggagtgcggccggcggggcgagtccgcggtggagcgcggtcgtcgcagttcccgctgctccgttccgagcatcgccgccacgaggatgaactgtgccgcgagccgccggcgggtgtgctccgcctgccaccgccgctccgccccgaccacagccgtcgcaaggagtcgtgccgcgagccgccagcgggcgcactccgccccgagcaacgccgtcgcgaggacgggccgcgccataagccgccggcgggagcgttccgcctggccatcgccgctccgcccctgtgaggatgaacggcgcgcatcgccgctgcgaggacgacctggagccgatggccgccggagggaggagggaggagagacgagggctgggacccgcctgctccgctgatgccgctgccacgacgggaggacgaggtgaagatagaaaaagattgggagcactgggtttgctgttggagaagggaatttttgagtgtccgacctttttactgtgcatcacccaatccatgatatgagtatctagaatgggtctccgctgttggagacggtcttaggtcccaagtcccaaccgtcggtctctggagctgacaaagatacattccaactgtatgagagtacgtaggccgtgtttagttttaaaatatttctttaaacttttaactttttcatc

SEQ ID NO: 12185 - DNA, 1756 bp, Oryza sativa
  ref <308>: DATABASE ACCESSION NUMBER: AK109533
  ref <309>: DATABASE ENTRY DATE: 2002-08-28
atggccatgagaggagatcccaagcagcggagagcttcagcttcagctccccacggcggcgccgcccaccacgtcgccgacaagctcaggaggcactccaccttcctcctcctcctcctcctcctctggttcgccctctccctctacctcttcctctccgccaccccgccgcccccacgccccgccttcctcccttccacttccaccccccgccccgccctccggatctacgtctacgacctccccgcccgcttcaaccgccactgggtcgccgccgacgcgcgctgcgccacccacctcttcgccgccgaggtcgcgctgcacgaggcgctgctggcctacgctggccgcgccgcgcgtcccgacgacgccaccctcttcttcgtccccgtctacgtctcctgcaacttctccaccgacaacggcttcccctcgctctcgcacgcccgcgccctgctcgccgacgcggtcgacctcgtccgggcccagatgccctactggaaccgctccgccggcgcggaccacgtgttcgtcgcgtcgcacgacttcggcgcctgcttccatcccatggaggacgtagctattgcggatggcataccggaattcctcaagaggtcaatcctgctacaaacgttcggcgtacagggcactcatgtgtgccaggaggcggatcatgtggtaatcccgcctcatgtgcctccggaggtggccctcgagctacctgagccagagaaggcacaaagggatatttttgccttcttccggggcaagatggaggtccaccccaagaacattagtgggcgcttctacagcaagaaagtgaggactgagctgctacaaaagtacggaaggaatcgcaagttctaccttaagcgaaagcggtatggtaactatcgatcagagatggctcgctccttgttctgcctctgcccactaggatgggctccatggagcccacggctcgtggagtcggttctccttggctgcattcctgtcataattgccgatgatatacgcctgccgttcccttctgtactacagtggttagacatctcgttgcaagtggctgagaaggatgttgcaagtcttgagatggtgctagaccatgttgtagcgaccaacttaactgtaatacagaagaacttgtgggaccctgtgaagcggaaagcactggtttttaaccgtccgatggaagaaggagatgccacatggcaagtgctgagggagcttgagattttgctagaccgttctcaaaggaggcatgttgaatcatggaagaggtgaagaccacagaggggagggatctttccctacttgctgaaatgtggcatgtgatcagtcgcagctgtgacaacaatgacgtgcagcttgcacatgccactcaactgacaaaacaaatcaatatttgatcgacaccatccatagcaaggaccttctccatgagaaattcagaatgccagtttctcacattcaatcatattcttgaatggtgaactgtgtagttggcaattgactaagtaatttgaatgtgcaatcagagaagcgcattctaggctaacaagttggcgagctctgtgcagggaattagtttattctttattattgggagaaatgtgaatctcctttttttttttcttgagagagagagagattaaaattgtgttatagaacgatgatctgtgaaggtcttcggatatgtttgcaatgttgtactattgtatacccaattcttttaaaacagaaaggtgttcttttg

SEQ ID NO: 12186 - DNA, 1278 bp, Oryza sativa
  ref <308>: DATABASE ACCESSION NUMBER: AK109534
  ref <309>: DATABASE ENTRY DATE: 2002-08-28
atttcacgcgaactcgagccccacacatatatatacacatcccaagatcacaaatcgagtgtaattaaatttgtgatttgtgaaccttcttcaattctacctagctagcaatctattgagaggtgaattgaagtgcatgcatacaagaatatatagatggtgatgagcggcggcggcggcggcgcgaggattgccagtgatccggcggcgacgccggggttccgattctacccgacggaggaggagctgatcggcttctacctccgccaccgcctcgccggcacgagggccgacgacgtcgcccgcgtcatccccgtcgtcgacgtctacggctaccatccttcccagctcgccgccatggccggggtggcgaccgcgggggacagggagcagtggttcttcttctgcccgagggcggagcgggagctccacggcggcaggccggcgcggaccacgccgtcgggctactggaaggccacgggctcgccgtccttcgtcttctcctcctccgccgccgccgccgccagggtcatcggcgtcaagcgcaccatggtcttctaccagggccgcgccccctccggcacctagaccaggtggaagatgaacgagtacaaggccgtcgccgccgccgccgccgacgacgaccacaacgccgctggcgtggccgtgcagctgccaccaatggcgccgccgccgtcgtcctccgcgtgcgtgcggctgaggaacgagctgagcgtgtgccgggtgtacgtcagcaccggcacgctccgatccttcgaccgccgccccctcgacgcgcccccggtgatcagccaccatcaacctcagctccagcaacaacaacgtcagctgccatcgtcggcagcggcggcggcgacgaacggcaacctcatcgccctcgccggcgggtacgagtgctcacacgacagctccggtggctcgtcggaagatgccgccatcgactggagctcgctgattaccgccgccaccgattccgctaccgccgccgttgatttcagcttcaacgacgacatcgatttcagccctgccgctgttggcccatgggcgccacagctttgattgattgattatttgtgcacactgcataataactgaattactagtaattagtagtagtaagtttgatcagtgcttgctaattgccatagtgttctatgttcaggtcaactcgattgatttattacctcccaaactctcaattctgcttgtctttaatttttcttgaataaattctgaactatggcctgttcttttctt

SEQ ID NO: 12187 - DNA, 956 bp, Oryza sativa
  ref <308>: DATABASE ACCESSION NUMBER: AK109535
  ref <309>: DATABASE ENTRY DATE: 2002-08-28
ctaaccatcgccgctccgatccttccctcccccgccgccgccacagacgattctgacggcccgccttcgcgcgcgacgccgccggcgcccctccccgccaactcccctcctcccctcatccaaatcgactccgccggcacgaaagcgcccctcctcctcgaccgcgttccgacactgccggtgccccctcgctccgaccgcgttgcgccgccgtcgaatcccgtctccattgtcaaattgattgcacactaattttgaaatatgggagcacatcagaaggttctcattatgacagcggatggtacacagatgcaatcgtaaaccttctgtctatatagtcaataaaacagttttactggatccttgaatttgctgttctgcaacgtggggtgtatatagcatacttgagaatcattggttgtcactgcattatagttgtacatcatagatcccatcaaatattggatcaattgtgacttgcgagcacatgtgtgcagcgtgagcagttgggctgcaacttgccagggcaagatcatttgtcaaggttggaattgctgcgggatcatccgaggcctcgacacgacataccctcgtctcattgctcagtttacagagtcaagttccaagaagatctttttgctgagggagcactggccctagagcaaaggattatgtagatgtgcggcgcatgcagcagcgcaatggcagcaaaagtttatcataatatcctcaatgatcgatctgaaaaacaaagtgtgctgaaatggtagtataagataagagcttgaccatgtaggatgcacttggcaagccttactggttctcaattttcttctgaacggatttgcacatcctgatagcataatccaatgcttcttttttccccctttttcaggttaattccagtggccagtttgtaggaatatcttacatattatgccctattgatttctaac

SEQ ID NO: 12188 - DNA, 1898 bp, Oryza sativa
  ref <308>: DATABASE ACCESSION NUMBER: AK109536
  ref <309>: DATABASE ENTRY DATE: 2002-08-28
ggaaattgaccgttgcaacctcatctccgctcctcttcctcctcctcgtcgtcgttgtcgtcgtcggcggcgcatccagcctcgacgtgccggcggcggtgggtggcggggcagcagacgagcaagaaagagatccctagtctctctcgatggcgacggacgctcccccaagccggcgccgccgcgcctcaacgtgccgccggcgatggcgggggggctccgcctcgatcccgccgtcgcctccccggcccgcctcctcctcgacgtccccaagacgccatccccttccaagaccacgtacagcgaccgcttcatcccctgccgctcctcctcccgcctccacaacctcgccctcctcgaccgcgaccgcgcctccccctcctccaccaccgacgacgccccctactcccgcctcctccgcgccgagatcttcggcccggactccccctccccggctccctcctcccccaacaccaacctcttccgcttcaagaccgaccacccctcgcccaaatcgcccttcgccgcctccgccgccgccaccgccggccactacgactgcaccgccggctccgctgaatcctccacgccgcgcaagccgcccaggaaggtccccaagaccccgcacaaggtcctggacgcgccgtcgctgcaggacgacttctacctcaatcttgtcgactggtcgtcgcagaacacgctcgccgtcggcctcgggaattgcgtctacctctggtcggcttccaattgcaaggtcaccaagctctgcgatttggggcccagggacagcgtctgcgctgtgcactggacccgagaaggctcctatcttgccatcggcaccagccttggcgatgtccagatttgggatagctctcgctgtaaacggattaggaacatgggaggacaccaaacacggactggtgtattagcatggagctcccgaatcttgtcctccggtagcagggacaagaacatattgcagcatgacatccgtgtcccaagtgactatatcagcaagttctcagggcacagatcagaggtctgtggactgaaatggtcgcacgacgaccgtgagcttgcatccggtggaaatgataatcagctgctagtatggaaccaacgttcgcagcagccgatattgaggctgacagaacacacagctgcagttaaagcaatagcatggtcaccacatcagcaaggcctcctggcatcaggtggtggaaccgctgataggtgtatcaggttctggaacacggttaatggaaacatgctgaattcagtggacacaggcagccaggtttgtaatcttgcctggtgtaaaaatgtaaatgagcttgtgagcactcatgggtattcccaaaaccaaatcatggtgtggaagtacccatctatgtcaaaggttgctactctaactggacacacgctgcgagtgctttaccttgcaatgtcacctgatggacagacaatagtaacaggagccggggatgaaaccctcagattttggaatatttttccttcaatgaagacacaggctcctgttcgtgatattgggctctggtcattctcgagaagccacatacggtgaccataataggaggcaaagaaaatgcatatgtttgtatgaaacataattttctgaacttgtgcagttcttcagcgatttgtaaattgtgaggcctaattattcatttattgtttgtgtgcgcgtgtgtgtctgtgagatcgagagaaagggaggagaactcatattaacataaccaattctttgtattagaagctcataagtcggctagtttcttgtttggaatttcattgcagagaaacaagggccttgtaatttatcacaaacttatatgcttgtattattctcacacactttgtggccatttcatgacttc

SEQ ID NO: 12189 - DNA, 1791 bp, Oryza sativa
  ref <308>: DATABASE ACCESSION NUMBER: AK109537
  ref <309>: DATABASE ENTRY DATE: 2002-08-28
caacgctcagatgccccatccgcgctcgcatcgcgctgcatccgcgctccgtcgcacgcgcggcccctcccctttctccgccctccgtcgcggccgccttccaacccacgcttcccgctcccttcgccgccgcccccactgctcgcgcgcctccgcccctcgcgccgatctcctccgcggcgcccctccgcccatcgcaacgatctactctgcgccgcccccatccctcccctaaccatcgtcgaccccctccccttccaacctcgccggccatccgcccgtcgctccatgcccgtcggagatcgccggccgccggttcccctaaccgccgcaatcgaccccataccggcgccgctgcacatcctgatcaccgtccagtcgcctttcatccctcggccggtctccgtcgcctcgccatcaggagcaagaggttgaggtgtcgagcgcggagagagaggcacccaggctgacctcgctggtggcgacctggtggtctgtgtgacctgcaagtgtggtgtccacaaggagttcggcttcgaccattcccactgatcaaattagccagtccccttattccatcctcactgtcaatgtcaatttgttcttgcaaccggacatcaggcatagaatgttccaactattggggaaggtcaacgacaggttgagttttgatctaagcattacaagatccttgcgtctcacgaagtagcagaattacctttgctgatcttgctggttcaatgaacttgatcacgggttgggacttgggagttggcgactgaggcgcatgcagggcagcggcaatgaccaagtgttgggcgctctattaaggactgcaggttgtggcagtactgcagcagccagtgctttggtggggaggtcataattgttttgtagtatggctcttacggctgtccatttcatgtttatccaatttcagctcaaaatatttatttttatgcctatttcgtgctacatttgtccctcttttaatttttagattttactaatcatcttagctgttcgcttgatctgggaacaaggggatctgtgtaatatagggaacgagcaaggggacctgtgtaactgtgttggaggtcgtgggcttcgatacaaaattaattgggttgcagttggattcatcattggataaatgatctgattaattagttgtatcagtaattgttccaaagtacctgcacatttctatgttttctttactatttcatctctgcagagtgggaattgaaagattgcaatttaagatatttcatttgtgtttcaggtcctaatctttgcttacatctaagaaatttctaatgagaggaagattctcatttcaggtggaaaatttttgacatagtagtgcctgcaatcaaatttgatgatcaaagtgcatgcaggcaggcagggttcctgacctgggcaatcaattgagggaaattaaaacttgcgagagttccattttgagttaatagaaaaaaaaggatattttttctatttaaattgacattttccatgagctaaacgtgaagtagcttgattgaatgcaagatctgattggcagtatcacgcacgtaatgcttatcgagattgttgatcttgcttgatgagagcttttgataacaaagctttgctgggcatattaatcaccagaccagtttgattgtttcacgttggtgcttgcgtcctaccagtattatgtactgaataatgtttctttgctatgtccttcactgatttactgattttggtaaattgaggcttctactgcgctcgatcttatcaaat

SEQ ID NO: 12190 - DNA, 2492 bp, Oryza sativa
  ref <308>: DATABASE ACCESSION NUMBER: AK109538
  ref <309>: DATABASE ENTRY DATE: 2002-08-28
atgctgggtggagcaaccctagttcatccttgacatcaagtgggttgctagtctcattcctgatcctcttcaccttcctgctgccaagcgacttgtgtgtaaacccatacatttgcaagatctgattatccccaaaattgaaagcacgctccatctgcttgaagcacctctccacagggtaatccccaaacttcccacacggcttgcatccgacaaagtgagtgaccagtggccaccggtgatcaccaagtcctggatggtaattctcaagcatttcctcatacctatcaaccaagataccccaatatccatggaggtaatacccattctcaaggtacaccttgtcaccccatttctcacgctctgtagcaaggatgtataccatggccgactgatcatcagcctcaaacaccggccgatccttcaagtacttggtcaaaaccttcccggcctcaatacggacagggccctttggtcccattggtgcccatgtatcaaggaaatcaagcgaccattggcagttgcgcagcaagaagctgcctgtgttgaggccaatccagttcttgtcgtcgtagaccatctcatcccagccgtgcatgatgaggttgtaggggccgtaccgctcccatggcagctcgaatgccatgtcggagaacatggcgtcggagtccatccaccagaggaactcgatctccgggtgcgcgaggagcagcgcgcggaggagcgggagcttggcccagaatccggccatctcggcgtcgagcagcgccatgttgtagaagatctcgaggccgtggacgcggcagtagtccatcttgttcttgatggacttgaggaggtagtggtcgccgacggggttctcgcacggcttgggcgaggagcccgtgacgagcagcacccgcggcttgacgtcgttgacgaagggcggcgtctccgggtggcggcggtgccacgcggcccgctgctcgtcccagtcggagatcttggggcccagcgtgtagggcgggtcccggagcgtcctcggcggcgggtccggctcgtcgtcccgctgggccgcgcgcccggaggaggacgacgagccgccgcccctcgacagcgcgtcgtggtgctccgccagcgcgcggtgcgggtgcgagatgaagcggtggcggagctcgatgaggtcctgctgcggcgtgccgaacttgcccgccccgacggtgccgcggagcacgacgacggtgagcagcaggcacactacggtgagcttcgcgttcctcgcgaaccgctggatctcccgcatccgccgctcccccaccacccgctccgccacccacattttgcccccctccctctcctgccccttcctccgatccccccacaccgatcaaacaaacaaataaacaaacaaaccctcctcccccaacccaaaagcagcaaatcaaaaatgcaggcaaggaatcaccggtataccgcgtctacggcgacggcggcggcgtcggcggcgcggagtggtggtggtggtggtggtggtggaggaagaagccgaggaggttttgaaccgcggagttggaggcgaattaataagagaaagggcgaggcggagtggtgccgcgacccgcgagcgagcgaagcgcgcacgttggcctcggagagcggattgcggtggctgtctgagcgatcgggaggcggaatggaaggggaaatctggggagacgcgaaatcggaatcgaaatcgaatcaaccccctgacccggccgctgcaaggaggaggaaggaggaggagaaggagaaggccgaaggggaaggtggtggtggtaaaaggggaggggaatagccagccaacgcgttgcgagatgcgatgcttctactcctttccccgctgtcgcccggtaatttgacttgatcctctcgcgtgggcgtatgaccggtggggccacccgcgtggggccctacgggttttgtatggtaattttctctggcttttttttttgctcggttataaacggggggttaattaaccagtggcggccagttgtaaccagcccaggggcaagcgacgtcgcgaggcgattgcacatgacgcggtgacttttctccaacgtttaaacacgcgtccccatcaacggccgtgccaccacctcgctcaaacgaagcgggctgttcctccgcgtcgctgacgggtgggccattgcgtcgacactgacccacctgtcagtggcgtggtactagtttcggcgatgtagctgccggaggtggagttgtcggttgaggagctaatcactggtgtgtgatggcgatggccataacgatgttttttttaaagattaaagtggacatcagggtatgtaagccaaattactcctctagaagcccagttattatgccttttccttttgtttagtttgggttggtaagtagcgccaaacagtagtagttttatttttcaaccatgtaacatcacattggaccaggtttctctcaaatataatgtactacgcatgtttacggtt

SEQ ID NO: 12191 - DNA, 3569 bp, Oryza sativa
  ref <308>: DATABASE ACCESSION NUMBER: AK109539
  ref <309>: DATABASE ENTRY DATE: 2002-08-28
gcaggaagttttacgaagcgccaactctcgtgtgtctctgctcattttcagattatctacagtgtcgcgtgcgttgtattcgtccggtgttcgttctcgcccgctcgctgattcgttgggatttcctgacaattggtatcagagcaaggtttagggcttggacgcatgatcgtgctcttgaagttgcactcatgcctcgccgtcgctcgtcgtccctgacgaagcgcactctaggaggttccggcagccacgcctcgggcagcggcgggaacgaccgcgggttggtgattcaccgcgtggtcaaggaggcgggaggcgcggcgaactaccccgtgctcacgaagacaaactacaacgagtggtctttactgatgaagatcaagctgcaagctcgatgcttgactgcttgtggggcaccattgatccgggaggggtcgcagtggagctccatgaagatcgaatggcgttggacgccatttgcagcgccgtccccgtcgagatgatctcgacgctagcgaccaaggagacgacgaaggcagcgtggaactgcatcaagaccatgcgcgtaggcaagccgagtgcacagaagctgcgctccgagtacgaggctctcgcgttccgcgacggggtgtcggtcgaggacatcgccatgcggctcaacaccatcgtgacgcagctgtccacgttgggcgaccctgagccggacgacaaggttgtcgagaagtacctttgtgtcgctcggcctaggttctcacaactcgctctttccatgaaacattgctcgacatctccactttgtccctggaggaggtcactggacgcctcaaggcggctgaggactctggccagtcgtcgtcctcgtccttaccaggtggcagcggcaagctctatctcaccgaagaagagtggcttgaacgtcacaagaaaaaggaacaggaggcgaagaagggcaatggcggaggcaacacccgtggcaagcgccgcggcgggcaagggtgcaatggtagtggtggtggcgacaacgctagcccggtgcgcaagaaggacaagtgccgtaattgtggcaaacttggccactgggccaaatattgcaggagcaaaccaaagcaggagcaagcgcacgtggcccaggaggaggatgagcccacgctcatgctcatgacgggcggctgcattgatgtggtggaggagacgggcgcgccgtgcgcgacaccgtcgccgcccgcattgcggcctcgcccagacgtcatcgagtttgtggagcagaaggtgatcgccgcgctggacgacgccaccgaccacgacaacaagcgctagatcctcgacaccgacgcgtcgaaccacatgaccggctcaacaccaacgtcaccggcaatgtccgactcggggatggctcgctcgtccacatcggagggcgcggcaccatcctattcgcctgcaagaatgtaatattgacggtcgaaactgatcgataacgaccgtcaacaaaaccccccaagcttgaacctttgctcgtcccgagtgaaggacgaaaggaaacaaagacttggttgttgatcaggagttgctactatgctgcgtatctcaaaaatacaggtgcaaggtatatgtactctctctcagattaaataatctttggcacgttggcttacccttacccctgattcccacgagacactgcttctccttgccttgggcggttgaaagacagaacaacaattagagcaccaatcacccgatctttattcaactcttattccggaagttttcaaatgatttcggaaaagaaaaccaagttcctcaaatgattcactcagtctctctaagtgtatcattttgaattcctcaccaaaagatgccttttttattcctactctatggttttgatatgtggagcttggtagggatcaaacatggcatacttgcattcacatttgttactaagtcaaaaacttagactaaagcagataactaaacatactcaagatcaagatcgtgcataatgtgtgtgtggtatatagtggaaatggtatatgaggaagaaaaaaaacaaaatgcttctcctttgtgctttctttcttctctcaaaaatccttcttttatttattaggagagggcatggctacatttctctctctttttttttcaatatcatgcacatgcttgatggagcataacttttttttttcataaccatgcctttctctcctcttttttttctttttttttcaaaaggattttccttttcgggagaagaaagcacatgaaagcatggaggatttattttggtggaaatatggatatggaatggaatattgctcagctcccagtgtaggagtttagcatgtgcataaaagtgggtgtatgatcttgatcatagagcatgagaagtatctgtacaagtcacaagagtttgacaaagttcaatggaatgtcaagtaaccaaaatgtatatggtttaatcatgataacacatttttggctctggtagcaatttatatcaaatgaggaactttcaacatctggaattcaagccaaaatagtatcaggatcatagcaactcatatttactatctcatatctcgcgacaacctagacttgatcagcaagtgcagcccatttatctcaggtttccggataattgttggctactcatatttaacctttaagagagtatttaccaagaacccatatatcagagatataaaacagagcaactattcatcatttcaacaaagagaactagcttgtcttacctagcatgaatcaaacctatcctatctttttattattttctattttgcaaatttttatgttgttttcattttttataggatgcatttggaaagcaaatatgcaattggaaagggaaatatgcaatgtgatacaagttacctcagtggggggagcgtcgctccccccaagcttggctttcgctcagggtccttgataaggattgaacccctgaaagcgaaagtatgcctgaaggtcatcatgctgttgctgcattatgttgttgatgttggtaaactgagcattagcagattgttgccattcttgcgtttgagctatgtgttttgcgaggtcatgctggatctcccccgtctgcacatcaagggtgttcatcctcctagtgatttcacccaagtcccaacgagtggaactcaagcgccattcacatggggatggaggcataccacttgatataggaggttgattgtccccagtggatgtcatgaggcgcatgccaccggtcctcactggcgcttgaccgggttgagaccccgatgatatggcgtggagcttgggtccatccaggtgcatccccagttggtgcccaacctgcctcatacatctatacgggtgtcgaggatgatgaacttccttgttcgttccttgtcatgttgcgcgtctccctgtatgttccacatgcacgagattcttctatggtctgcaggggaatggttagttcatggcagttgtacaaatgataccccgcatttggcaacgagatttcatttgtacaaccggggaaaaagtatatcaaagatccatctgctccatgtttc

SEQ ID NO: 12192 - DNA, 2150 bp, Oryza sativa
  ref <308>: DATABASE ACCESSION NUMBER: AK109540
  ref <309>: DATABASE ENTRY DATE: 2002-08-28
aggctcgccattaaacaacactcatctccccctcccccttgaaaccctagctccgcttcgccgtcgtcctcctcctcctccccggcggcggcggcggcggccatggcgtccgcggcggcgccgaagcggtgctactacgaggtcctgggcgtcccccgcgactgctccccggccgacatcaagctcgccttccgccgcctcgcgctctccctccaccccgacaagcagccccccggctccgacgtcgccgccgccaccgccgccttccaggagctccagcacgcgcactccgtcctctccgacccccacgagcgctcctactacgactcccaccgctcccagatcctcttctccgaccaccacccctcctccggccccggccgcggcggcggcgtcgcctccgcctccgcgtcccccgtccccgacctcttcgccttcttctcctcctccgccttctccggcttctccgactccggccgcggcttctacaaggtctacggcgacgtcttcgaccgggtcttcgcgcaggagctcgcctacgcccgccgcatgggcatgcccgccgacgccgtccccacgccgccggtgatcgggaacctcgattccccccacgcgcaggtcgccgcgttctacagctactggctcgggttcggcaccgcgatggacttcgggtgggcggccgagtgggacgccgcgcggggggagagccgccgggtgaggcggctcatggaggaggacaacaagaaggcgacgcgcaaggcgcggcgggagtacaacgacgccgtgagagggctcgccgcgttctgcaagaagagggacaagcgggtggtggacatggcgctgaagaagaaggtggaggaggagaagaggaaggcggaggaggcggcgaggaagaaggaggaggagaggaggaggaaggagcgagcgatggcgtaccaggagcccgagtgggcgagggtggacgaggatgaggcggcggtgtttgaggacgacgaggaggaggagacgagggcgaagaggaaggaggagctgtactgcgtggcgtgtgataagaagttcaagtccgacaagcagtggaagaaccatgagcagtcaaagaagcatagagataaggtgtccgagctgaggatggtgtttgaagaagaggaagaagctttgaaggatgctgaagaagaggagccagaagaagttgatgtggggtttgattttcagcctgcacaggaatcagaggagagtgaattttcagatgctgctgaagagttggctgacgagttgagcgagggattggaggtgcgtgatgaagaagagaagggtgataagcacttgggtaatggggaacaaaaggttggttcatatgatgaaaccagtgtgttagaggaaatgctatcgaggtctaggcgcaagaataggaagagtggttttgtcgctcctcaggaggaagcttcaccagctggtgccatggatgatgatgacgatgaggatacaagctatgagattaataatgtcaaaaagaaaggacgccggagacgggcagcaaagaagggaggtacttatgctgataatgggcaaggtaggaagagtgagaatcagcctgaggaatccaggcataataatgatgaaaatggtgctgatgataagatggaaggtccatcttctaatgaagacagtgctgcagcaagtaaagaagatcagcagaaaggaaaaaccggtaatactaaaaagaacaagaaaggcacagaaaagaacacaactatatcttctgaacaaaagggtacatcgaagggaaagaagcaaaaggaggtttcaaaggcacccagtaatgactgtgaaacgtgtggatcaacgtttgactcaaggaacaagttgttttctcacttggaagaaacaggtcatgcaatgctgaagacacgacagaaaaatcgctgaagaggacaagaaagtagttttcttttaccgtttgtcccagttgatgctgatagattagcacatcgacaaaaaggccatatatctggtttatagcccaattttgatatgtgtagtagagccgttttctttcttcctggatttgtttcattggtttgtggtacagaatgacaagaactaattattattattcaatcgaaatacacaccatcttgtaatttttctcc

SEQ ID NO: 12193 - DNA, 826 bp, Oryza sativa
  ref <308>: DATABASE ACCESSION NUMBER: AK109541
  ref <309>: DATABASE ENTRY DATE: 2002-08-28
acgttttacgcgcctcgatcagaaataagttcacacagcctaataaacccctcgagaagacaagtgtaatcgccaggggaagcgcgcgagatggacgcagctggcgtcgccgcaaagccgtcgctgtcgaggaagccctcgccgtcgttccgcctccggaacggcagcctgaacgcgctgcggctgcgcagggtgttcgacctgttcgaccgcaacggcgacggcgagatcacgctcgacgagatggcgtccgcgctcgacgcgctcggcctcggcgccgaccgcgcggggctggaggccacggtcgggggctacatccccgcgggcgccgcggggctccgcttcggcgacttcgaggcactccaccgcgcgctcggcgacgcgctcttcggccccgtcgaggaggaggagcccgggaagcaaggggaggacgacgacgagggcgacatgaaggaggcgttccgggtgttcgacgaggacggcgacggcttcatctccgccgccgagctgcaggccgtgctcaagaagctcggcctccccgaggcccggaacctcgccacggtgcaggagatgatctgcaacgtcgaccgcgactgcgacggccgcgtcgacttcggcgagttcaagtgcatgatgcaggggatcaccgtgtggggcgcttgacggcggcgagcgaggccgccgtccttcgtcctctccccgtgtgtcatgtatgtatccacgcattgcagcgtgtctctgctcggcaaatttttcttgatcgtcctgtggaatcctcctgttcttgacttgatctgcttaattgtagcattgagaattttctgtg

SEQ ID NO: 12194 - DNA, 1589 bp, Oryza sativa
  ref <308>: DATABASE ACCESSION NUMBER: AK109542
  ref <309>: DATABASE ENTRY DATE: 2002-08-28
attaattaatcttctttaccctgcacctgaggaggaggaatggctgatgccccaggcgattgaatcgaatcgggggaggagggggaggtggggagcgggggggaaatctgagtgatcggttgttcctcgtccgatcgccgccatgttctcgcgatcctacaccaacctggtcgatctcgccaacggcaacctctccgccctggactatggtggcggagggggagggggcggcggcggcaacggggccgggggccggccgccgcgggcgaggcggatgcagcggacgatgacgacgcccgggacgctggcggagctcgacgaggagcgggccgggagcgtcacctccgacgtgccctcgtcgctcgccagcgaccgcctcatcgtcgtcgccaacaccctccccgtgcgctgcgagcgccgccccgacgggcgcgggtggagcttctgctgggacgaggactccctcctcctccacctccgcgacggcctccccgatgacatggaggtcctctacgtcggctccctccgcgccgacgtgccgtccgccgagcaggacgacgtcgcgcaggcgctcctcgaccggttccgctgcgtcccggctttcctccccaaggacgtcttggacagattctaccatggcttctgcaagcagacgctgtggccgctcttccactacatgctccccttcacctccgaccatggcggccgcttcgatcgctcccagtgggaggcatacgtcctcgccaacaagctcttctcccagcgcgtcatcgaggtcctcaaccccgaggatgactacatctggatccacgattaccacctcctcgccctcccgtccttccttcgccgtcggttcaacaggctccgcatcggtttcttcctgcacagcccgttcccttcgtcggaactctaccgttccctccctgttcgcgacgagatcctcaaatcactgctaaactgcgatctgattgggttccacacctttgattacgcgcggcatttcctgtcctgctgcagccggatgctggggatcgagtaccagtcgaagaggggatatatcggtctcgattactttggccgcactgttgggataaagatcatgcctgttgggattaacatgacgcagctgcagacgcagatccggctgcctgatcttgagtggcgtgtcgccgaactccggaagcagtttgatgggaagactgtcatgctcggtgtggatgatatggacatatttaaggggattaatctgaaagttcttgcgtttgagcagatgctgaggacacacccaaaatggcagcgcaaggcagtgttggtgcagattgcaaacccaaggggtggtggtgggaaggaccttgaagagatacaggctgagattgatgagagttgcaggaggataaatgcacaattttcacggccaggatatgttcctgtggtgattatcaatagagccctttcaagtgtggagaggatggcttattataccgtggcagagtgtgtcgttgtaactgcagtgagggatgggatgaacctcacaccatatgagtatattgtctgtagacagggatttccagatttggatggttctggat

SEQ ID NO: 12195 - DNA, 1021 bp, Oryza sativa
  ref <308>: DATABASE ACCESSION NUMBER: AK109543
  ref <309>: DATABASE ENTRY DATE: 2002-08-28
gttttcccttccccctctccctctcccttgctctctcttctttaacctgtttatatttatctccccctctccgtctcgccgtctctcagctctctctgctactcctcctagctgcatgctaagctaaatcttctgttggattgcctagctttgctgctttgcttgcttgctgtggtgtggtgtggtgtgaattttgttgattggtcggagcttggggttgtgtatggtggtggtggtgtggtagctagtagctgctagtgctagatggtcgcaggggcgttggggtacatggcgagagcggcggacggcggcagggcggcggagctcgtcaccagggatttcctcggcggctgcgtcgccgccgacgacgccagggacgccgccgccgccgcagcagcaactgccaggcacgactccgtgtccggcaagctgtccctgcagaagcagacgtgcccggcgacgccgacagacctcaacctcttccccgtccccggcgccgccgcgtccgccgccaagccgtgcccgtcgtctacggcggcggcggcctccggcgcaggcggcaccacgacgacgacgacgacgtaccacagcgtgtgcacgatcgagaaggtgaagacggcgctggagcggttcgagcgcggcaagcaccagcaccaccagcaccagcagcacagcgccggcgcgtccccgtcgtcgtcgtccgtcaccacctcctccgtgaagcgccggcgccgaagaagaagccccggatcgacctcaacgtggggttcctcggcacctagctttcctaccctaccttcacctgcatcgccacggtggacacatgtgactagccatagctagctagccagccatgcccccaattctgttaggaaatcaatgaatcaatcaatcaaacacgtactccatagaacacgaggatgatcatgacgatgatgatgatgatactagtagtcctagctccactatgtaattgatcaaaaagcattttcgcccttaaatcaacttttccatttttgtc

SEQ ID NO: 12196 - DNA, 2223 bp, Oryza sativa
  ref <308>: DATABASE ACCESSION NUMBER: AK109544
  ref <309>: DATABASE ENTRY DATE: 2002-08-28
aatcaatcagaagcggttgcaggatgacctcccaatcagtgcgagttgtcaacgtaactcacgtcctccccggcggcgcatcagcggcagcgccaccgcacgccggcggcggcgacgtcgacgtcatcgagctctccttcctcgacaccatgttcttcgccctcacgccgctcaaacgcctcttcttctacgaggcagcagagccgtcgttcccggccatggtcagctccctccagtcctccctcgccgccaccctcgccgtcttcgcgcccctcgccggcaagctcgcctaccgcccctcccacgacgacgtcgtcatcgactgctccgtcgccgccgtctcccccggcgtcgtgttcatcgaggccgagtaccacgacgacgacgacgccgtcgtcgacatgcgccgcctcgccggcgacgaggagcaccacacggaggccttcaagcggctcgtgccggagatggacgtggggcggcttcccgcccctctgctgtccgtgcaggtcacgaggccagccgccgccgccgccggcggcagcggtggcgtcgttgccgtgggcgtgtccatccaccacgtggtcggcgacggccaggccgtgtggcagtttatgagggcgtggtccacggcgtcgcgggagggatcgccggcggcggcggcggcggccacaattccggtggtgtttgaccggaaaccggtgctccgccatcccaacgatgaagagatcgcccgcgtgttcctccgcgtgttcgcgccggcgctgccattagtggattgctcattatttccagagccagacgtgacgcgtcaatggaggaagacctacctgctccggcctcaccaaatccaatcgctgaagcagcggatgctcgccaagacgaaggagcagctaatgttaatggcggcgccaaccacccacgttgctgtcctgtctctctactggacgtcgctcgttcgcgccaagttcacgagcaccggcgggggcggcgccggcgacggtgacgtctacttcatgattcccggcgacttgcgccgccgcctgaggccgccggtcggcgacggctacttcggcaactgcgtgaaaccatgctacgcgagcgccgccgtcggggacctccgcggcggcaacggcctggtgcacgccgccgccgcgttccagagcgcgatccgcgggagcctggagtgcgacgacccgctcgccgacgacgtcgagcggtggagcgagctcgagaggaaggtgcccaaggagaggatcgcgcaggccagcgcgtcgcaccggttcatggcgtacgagacggacttcgggtggggcgcgccgcgccgcgtcgagctcgtgtccgtgtaccgcatggacgtggtagcgctcgtggcggcgccgccggccgccggcggcggtgtgcaggtctccgtcgcgctcgaccgtgcccacatggaggcgttcgacagctacttcctgcagaattcggacaccaaatccgactcgccatcaatctagctaagctacagtcttaacagcatcagtatataccaatgtcttcctcctcgtcgtcgtcgtcttcgcttgccatggatcggggagaagataatcacgagctaccgcgtcaagatcaccacaacgacatggcgacgtcgagcgagtcggtgaaccagttgaaggacgatggtacggaggagatggacgtcgacgactacatcggcggcggcagcggcggtggcggcgaggcgttgatcgggatgaagacggtggaggcgccggacgacggcagcaactgcccgatttgcttggacggcggcggcggcggtggggagaagacgacgacggaggcgtgggtggagacgccgtgcgcgcaccgcttccactcgcggtgcctcgagtcttgggctcgggtgaagctagggacctgccccatgtgccggcgcgagctgacggcggcggcggcagcggcgacgacgacggccggagaggatgtgcatgtgctggtggccgatccgatggtggcggatccgctgcaggcgaggtggaatttgtttgttcaacggtcaactgatggtttctagttctactactacgtcgacaatgttgactatgcttttttttttctcattgatttaacttgttatcactattcgagtgtacaaacgaattaattgtatatgaagttgaagattttcttaagaaattgatatgtgtgtgtgtatatattataaaagtcatattgttt

SEQ ID NO: 12197 - DNA, 3015 bp, Oryza sativa
  ref <308>: DATABASE ACCESSION NUMBER: AK109545
  ref <309>: DATABASE ENTRY DATE: 2002-08-28
actttcttctgaacaaacaagatcaatcgatacccaatggagatggatggctgcttgctgtcaccagaggacaccccttgattaacaacactccatctccctcagagaagaagaaattctgaattttgaacaagcatatatatatatatatatttgcagagaaagagagaagagatagctgcattgcatgagctgaagggaagaatggcgctgtttgatcggaatcagaagcagcggtcgtcgctgtgctcgacggcgaccgtcgtcgtgttcgtggcgctctgcctcgtcggcctctggatgatctcctcgccggagaccatcccggcggcggcggccaacgtcagcaagaagcccgacgtcgtcgccgtcaaggaggaggacagctcgctcgacgccaccaacaatgtcaaacagaacagcgccaacgtcgtcgccgagaccgccgccgccgacgaggccgccgccgcagacgaggacgacaaccccgcgaagccggccgccggcgagaaggcggcggcggcggcggcgtcgtccaaggaccagacgttcgacgacgagaacggcaggacggagggcggcgcgctcgtcaagccggagagcggcggcggcgacgaggcggcctccgacgtgaaggagatcggcagcctcgagcaggcggcgatcgacatgaaggacaccaccgagcactcggtgggtgacaccaccaaggagccaggcgtcgtccaggacaagagctccgaggagatcacgatggcggcgagcgacgcgagggagagcagcgatggcggcggcggcggcggcgcggccaagaacaagcagacgttcgacgacgagaacggcaagctcgacggcgtcaacctggtgaaggacgtcgagaacaagacgatgtcggaggagggcgccaagccattgccggaggagacgacgaccgtgagcagcaagaactcgatcgtcgcggcggccgccatgtccgacgagaagctcaccgacaacaatggcgagcaagcgcagccggtggaggcgctgccgaacgggcaggccgagctgctgacggagcgcgcggcgcagaatgggtcgttcacgacgcaggcggcggagtcgatcaaggagaagaagaagcgcgccgagaagaagaaaaagaagaagaagaaggtgaaggcggcgtcggtggcggcggcggcggaggaggagggcggcggcggcggcgcggcgtcgttgggctggaggctctgcaacacgagcgccggcgccgactacatcccgtgcctggacaacgaggccgccatcaagaagctcaagacgaccgcgcactacgagcaccgcgagcgccactgccccgcctcgccgccgacgtgcctcgtcccgtcgccggaggggtaccgggacccgatccggtggccgcggagccgcgacaagatctggtaccacaacgtgccgcactcggagctcgcggcgtacaaggggcaccagaactgggtgaaggtctccggcgagtacctcaccttccccggcggcggcacgcagttcaagcacggcgcgctccactacatcgagctgatccagtcgtcgttcccggaggtggcgtgggggcggcgcagccgcgtcgcgctcgacgtgggatgcggcgtggcgagcttcggcggttacctgttcgaccacgacgtgctgaccatgtccctggcgcccaaggacgagcacgaggcgcaggtgcagttcgcgctggagcgcggcatcccggcgatctccgccgtcatggggacgcggcggctgccgttcccgagcaacgtgttcgacgcggtgcactgcgcgcggtgccgggtgccgtggcacatcgagggcgggatgctgctgctggagctcaaccggctgctccggcccggcgggttcttcgtctggtcggccacgccggtgtaccaggagctgccggaggacgtcgagatctggggagagatggtgaagctgacgaaggcgatgtgctgggagatggtgtcgaagacgagcgacacgatggaccaggtggggctcgtcacgttccggaagccggcggacaacgcgtgctatatgaagcgccgccagaaggagccgccgctctgcgagccctccgacgaccccaatgctgcttggaacataactttgcgggcgtgcatgcactgggtgcctacggacccatcggtgcgggggtcgtggtggccggagcggtggccggagaggatggagaagacgccctactggctgaacagcagccaggtcggggtgtacggcaagccggcgccggaggacttcgtggcggaccaggagcactggcggaaggtggtccggaactcgtacctcaccggcatgggcatcgactggaagacggtgaggaacgtcatggacatgagagccgtctacggagggttcgcggcggcgctgcgggacatgagcgtgtgggtgatgaacgtggtgacgatcaactcgccggacacgctgccggtgatctacgagagggggctgttcggcatctaccatgactggtgtgagtcattcagcacctacccgagatcctacgacctcctccatgccgaccatctcttctccaagctcaaatccaggtgcgaggtgttgccggtgatcgtggaggtggaccggatcctccggccgaacgggaagctcatcgtgagggacgacaaggagacggtggacgagatcaagggggtggtgaggtcgctgcaatgggaggtcaggatgaccgtctccaagaacagggaagcgatgctctgcgcgaggaagacgacgtggcggcccacggaagccgaggcaagatgacctcgccgtcaccggccggcgatccatgtagtagagtcttttggtcggttgatccggtggtagctgcaatacttagcacgtacagggtgatctacactacactgggtgctgcagcattgcaataactgagctagatattactggagcttgtagctttttttttgggggggttttgttcttcagatttttttttatagttttatactg

SEQ ID NO: 12198 - DNA, 731 bp, Oryza sativa
  ref <308>: DATABASE ACCESSION NUMBER: AK109546
  ref <309>: DATABASE ENTRY DATE: 2002-08-28
actttctctctacagcgggcaacggtgggaggagcggggccccgagcggactcgacaacggtgacgacttgcggcaacggtggcgggcggtggccggcttggcagaggacggcgggcgcggggcggcaagcgaagggcagcggcaggttcggcccgtgatggacggctcgggcgggaaatgggtgcggagcggcagcaggaggcaacgcagtggccgggagcggcggcgacgccccttgcccgcccgggatctagagacggcacccctctcctgcccggatccagcgatcgaggccctcaatctagaggcggcggcagcgacgtggccaggaacggtggtaggcagcggtagcgcggcgtccgggagtggcggcacggccctgcactcccccggcggtggtcgtccccgctccctccgcagtggcgctcctccccgtccggatttggcgacgacgacgacgagctgcgacgcagctagggttttgactttttattttttttgcaatatttacttttcttttttgttttttgttttcatgtgcgggtgcaccacccgtagaaaaaaaaattggatttttacagactcttctggacagacgggccagagatccacatgcgaaaaccacttttgcccgcacggaaaaaatgtatttttatagtgacatttgtataggtgcatggaaccaggccgtatttagaaaagaaaacacgtacgatcactcttcagaggt

SEQ ID NO: 12199 - DNA, 1786 bp, Oryza sativa
  ref <308>: DATABASE ACCESSION NUMBER: AK109547
  ref <309>: DATABASE ENTRY DATE: 2002-08-28
aaaaaataataaaataaataaataaattatctctcggagaggagccgcgtgcaccgccgcgccggggaagaggccaagagggggatcatcaccggcggtgatcgggctgggccttgggggagatatggcggcggcggaggcggaggcggggaggaggacgctggcgctggtgaacatggcggcgatcatggagcgcgccgacgaggcgctgctgccggcggtgtacagggaggtgggcgcggcgctgcacgcgacgcccatggggctcggcgcgctcacgctgtgccgctccttcgtgcaggcggcgtgctacccgctcgccgcctacgccgccgtgcgctacaaccgcgcgcacgtcgtcgccgccggggccttcctctgggccgccgccaccttcctcgtcgccgtttccgacaccttcgcccaggtagcggtagcgaggggattgaacggtgttgggctagcgctcgtcaccccagccatccaatctctggtggcagactgcagcgacgacaccacccgtggctccgcattcggatggcttcagctcacaggaaacatcggttcggtgatcggaggattgttctccctcatgctagcatccacgacgatcatgggcgtcgccggttggcgcgtcgcgttccacatcgtcgctctgattagcgtgatcgtcggcgcgttggttcgcctcttcgcggtggatcctcatttctgcagcaacatccaagacgacggtggtggtgatcagctacctcctcgcaagtcgccattggaggagatgaaggatctggtggtagaagccagggccgtggtgaggataccgtcgtttcagatcatcgtcgctcagggtgtcacagggtcatttccatggtccgcgctgtcgttcgcgccgatgtggctggagctgatgggattcacgcatgagatgaccgggcttctgacgacgagcttcgcgttggcgagctcgcttggggggcttttgggtgggaagatgggggatcgtctggctgttcgctacccggattctggtcggattgttctgtcccagataagctcagcttcggcgatcccgcttgcggctttgctgctccttgcgctgcctgatgattcctcttctggattcctgcatgggtttgtcatgtttatcatggggctaagcatctcctggaatggtcctgctactaacaaccccatatttgcggagattgttcctgagagatcaaggacaagtatatacgctctggaccgctctttcgagtcggtcctagcctcattcgctccaccgatcgtcgggttcttggcggagcacgcctacggctacaacccggtctcctacggagccggatcgagcagtgacagggagaacgccgctgccctggccaaggctctgtacaccgcgatcgccatccccatgctgctctgctgcttcatctactccctgctgtatggcacgtacccgcgcgacagggagagggcgaggatggacaccttgatcgcgtcggagctccagcagatcgagctggagcggtgccatcgggcaggaataggaagtaggagaagcaaggatggcaccgtgatcgatgtcgagtatggtgaggaagagtctggtgatgttgttgatgatgatgatgatgagaaagcgttgatgcgttaccatgttgaacagtgtggcagtgttggcaggtgaccaaaggagtgatcaggtcagaaaagctcctgaacttcatgatacagtctgccaaaaattttccacggtttttgtacaggaaacagattacacgggttc

SEQ ID NO: 12200 - DNA, 1489 bp, Oryza sativa
  ref <308>: DATABASE ACCESSION NUMBER: AK109548
  ref <309>: DATABASE ENTRY DATE: 2002-08-28
aaaaaacgccaagaaaccatctgtcgcttttgaccccgggaagcagcagcagcagcagcggcggcggcgtatcggggcgtaacggaatcgaggtgtgttgccgctatataaagaggaagaaaataggccccaaaccaaaccaccataccctactacaaaccataggcatcgccggcaagggaggtcggaggaagaagaaagggtcgtcgaggtgttcttgaattctgaatttctgatcaagtcgatcgttcgccggcgacggcaaaggtggtaactggtagtactatatatgacgacgtcgatggagaagccccggcaggtggtgcggaagttcctggcgcggccgcagcacgagggcgtcggcgccgtcgttcgccggagcatcgggaggtttgagctgaggtacttcgatccgttcctcgtcctggacgagttctcagtgtctgctccggctgggttccctgaccatccacacagaggtttcgagaccgtcacttacatgctcgagggagccgtgacgcacgaggacttcgagggccaccgtggcacgatcaaggccggcgacgtgcagtggatgacggccggacgcggcatcgtgcactcggagatgccggcggggcccggcacctccaggggcctccagctctgggtcaacctctcctcccacaacaagatgatcgagccggggtaccaggagatacagagcaaggacatcgcgagcacgacgtcggacggcgtgacggtgcgggtgatcgccgggcagtcgatgggcgcccggtcgccggtgcgcacgcggacgccgaccatgtacctggacttcacggtccgcccccacgcggcggcgcggcagccggtgtgcgcgacgtggaacgcgttcgcgtacgtgctggagggggagggcgtgttcggcggcggcggcggcgacaaggccggggcgcaccacctgctgctgctcggccagggcgacggcgtcgaggtgtggaacaggtcggacaagccgctccggttcctgctcatcgccggcgagcccatcggcgagcccgtggcgcagctggggcccttcgtcatgaacaccgaggaggagatcgacatgaccatcaacgacttcgagttcagcatcaatggcttcgagaaggccaagcactggaagtctcaggcgctggtggcgctgggcttagagtagtagggtgcaaccatgggacgacacgacatgtcgacatatgctctgaacgaagggaaaaaaaatggaatagttctttctctcatgatacgaggttgttttatttatttgttttttttctcttccaaacaaatagcgatcactttgtgtacatatccggcataaggttgctgcttgcttttcaattaggcaggtgcttcaaatcttcggcccaatgactaaaaatcatgtacttactccacaagttcataaacaagtccttttggactttcactgtgtctaatgcaagatttgtttttatagaactct

SEQ ID NO: 12201 - DNA, 1237 bp, Oryza sativa
  ref <308>: DATABASE ACCESSION NUMBER: AK109549
  ref <309>: DATABASE ENTRY DATE: 2002-08-28
gattccatctctcctcctctcctccgctccgcccaccaaccctcccctcctctcgcctactactaaaatccaccatcgccatgctcctcgtcagatcccaccacctcctcctccaccgccaccaccacgccgcccgcctctccccgcgcctccaccgcctcctcctccgccacccgccgccgctcccccgcgccgcctccgcggccagtaggctccgcccgccacgcatgtcgttggcctcctcctccaacgccagctcccccgccccctcgccgcctccccccgtggtgcccaagtcaaagatacgcttttgcccatcttgtggaagcccgacgaaactggctattccagatggagatgaaaagatgagggctgtctgctcttcttgtggaagagttcactatgagaaccccaaaatggttgttggctgtcttgtggaacatgataacaaagtactcctttgcagaagaaagatcgaaccagcttatggcctttggactcttcctgctggttatttggaggttggagagtctgcagcggaaggagcctcccgggaaacattggaggaagcttgtgcagatgtagagatactttcaccttttgctcagttggatattccactgattggccaatagagttacattattttccgagcaagattgaagacccccaacttctcacctggacctgaatcgctagaatgtgcactttttgccttggatgacataccatttgattctctagcattttcttcgatcattgtcaccttgagggtgtatcttgaagatgtcaagtccggaaatatcaaattccactactgcactataaacaaaaggataggaactggtgcttcagatcttcgcagttttgatattgacaaccacttggctgtgtgaacttgagaagtctggtgactaatcatgttgcatgatgagattaatttcgggatatacagcagtcataatcaacacagcgatcgcatcggtcatggatttggaactgttgtctgagtgtcgaatctctgttcaagccttgcgtggcatctcgccacactggaatagattctaggcgctggaattgtaaatgttcggtttcttgaagtgtttattttagccttctagagatgttgctttttttttctttttcaatttttgtggaaggaccagaggttgtaacgtggcatatgctgggaatttcacagcttggattgagtgatcctgcgcgatgtggatggttt

SEQ ID NO: 12202 - DNA, 2509 bp, Oryza sativa
  ref <308>: DATABASE ACCESSION NUMBER: AK109550
  ref <309>: DATABASE ENTRY DATE: 2002-08-28
cctcagtcctcgcctcccctcccctcccctcccctcccctcttccctctccggcaaggcagcaacagtgctgcaccaccaccaccgccaccgcggcctctcctcctccccgccgcgccgcgccacgccgccatgaacaccaacactcaaaccggcggcggcaactccgccccccgcgatctccgccggccggcgagatggcggcatgtacgccctaccctccccgccccgtcgaccgatccacctgctcctcgctccaggccgctctgctccgcgtttctgatccagttccggcggcaagccggagcggcagcgcatgcggcggccacctccacggcggagggctccgcctccgttctcgttacgccggcgagtagccctgctttgggccggcccaacaattcacggttccggcccaacattggtaacgagccgagctgagtccaagccgagccgctgtttttttaagcctcgcgcgtgcccgcctctgctgttctttctctcgccctctgctgctgttcccttctcctttctgacacgatcaagaaacgatcaagaaatcggctgctcccacttctcctatctgcgagaagaaatcaagaaaccctacagaggagaggatcggggggaacaagattcctgaagccatgaaactgagtctcatttccgacggcgacatccccgacagccaggatgatcaaggctccggtggaagagcggatgggcgacaggtcctagagagaggaggaggaggaggcaagaggagaagacgggttttcttggaggaggaagacgaggacgagaatgcgatgaaagttgatgaagaagccgtgatactttcctgcgcgcgtggaggccctgcgggcgtctcgacggccaaaattgatggatgcatcgataaacaggatggacaaggcagcagcaagcaaagaaagaagagctgcagcacggttatgaagctacaatttagagaaatcggattgcactgctctttgaggacatgcggcatcagcagattcgtacccacaccttcaacattctcacatgaggtcttctccaagataaagaacaataaggtcgtatttgatatctacagatgtaaggatgtcattcgacacttagagaggcctatcaggaagagatctgcagttctgcagattcttccattaaaagatcttgttgctgtagtgttatgctctggtttgagctttttactcagcagagtaacaaataaaatgatatcaatcctcaacagatatgacgatgaaataattgtctctatattctacaacaaggaggacaaatctgtgattacaacttcttctcgtttgtttgatggctgcatgtctcgtcaggtcacatcaaccccacttgagtgcattaggtcaaacaagcagaataatggtcagcagatttttgaatcagaaaatataaaatagccagatagtgtggactttgatgcaccaaatgcaagagcattgatacaacaacgcagcacctaccgagtttttgacttaaaggattattctctgctgtatcaaatacctgatgtgaatgtccatcaagttgtttttaggccatcattgttccttataaagctggagcagacacataatgtctatcctttcaggatattttgtgctcagaactttgaagaaacacactcgtttgtgcttgttgctagctcgaaacgacctgatattcaacctctacatgacaagatgataataaagcagaattttgcgaatgagaatggaaacctccagatacttgatttgcgtagttcaaagatcaccgaggtacctattgggatatatgagttccatgcactgcatggtagaaacctattcttgtctttccagaataactcaacagaactgagagatcttcaaggagatatagtgagaaattttgaggatcatgtactagatgaactgaattgcgtggatgataagttgttcataacaaaagatgaggatgttattatttctggatgcaagtcagaaggtatcggagcggtgcatataagctccatagaaagtggaaaatgcattacagacatcaataccaaggttattgtttctgcattgtcatataatcctgagttgaatgagatttacattgggacggcaaaggggaaggtgcaagtatggagtgcctgattctacacgtttttaaccatgtcaatggcactggcagatcttgacattctaccacatcagatactgcagaagttgaaaagccccaataaagatagctgatcttgattgaaaactttctgaatttccacgatcgtatccatgtaaaacttcaaaaaatgaaatggatggcgcttattgagttgtagtcctgattgaaaactttctgaatttctccacgatcgtatccatgtaaaacttcaaacaatgaaatggatggcgcttattgagttgtagtcgtccggtagcgttgtttctgctttgttcattcatcaatactgggatgttcagatttttgaggcagtttacctc

SEQ ID NO: 12203 - DNA, 1325 bp, Oryza sativa
  ref <308>: DATABASE ACCESSION NUMBER: AK109551
  ref <309>: DATABASE ENTRY DATE: 2002-08-28
ctcgctgctgcgaaaccagtcacgggccactcacaaccaccaccctaaacgtagctagctattgagagagagatcgaggtgggtgcaatggcggccatggtgagacggcggccgtcgccggcggtgacgacgatgccggtggtcctggtggtggttgtgtttgtcggcgttgtggtggggggagcgagcgcttcggcggggccgctcaaggcacactactaccggcacgtgtgcccggcggcggaggcggtggtgcgcgacatcgtgacggcgcgcgtcgccgccgaccccgccgcgctccccgccaagctgctccgcctcttcttccacgactgcttcgtcagggggtgcgacgcgtcggtgctgatcgacacggtggccgggagcggcgcggcggcggcggcggagaaggacgcggcgccgaacgggtcgctgggcgggtacgacgtgatcgacaccgccaaggccgtcctggaggccgtatgccccggcgtcgtctcctgcgccgacatcgtcgcgctcgccgccagggacgccgtctcctaccagtttgggagggacctgtgggacgtgcagctggggcggcgcgacggcgtggtgtcgctggcgtcggaggcgctggcgaacctgccggcgccgtcggacaacttcacgacgctggagtccaacttcgccggcaagggcctcgacgtcaaggacctcgtcatcctctcaggggcgcacaccatcggcgtgggccactgcaacctcttcggcgcccgcctcttcaacttcaccggcgccgccgcgccgtcggccgacccgtcgctgaacgccgcctacgccgcgcagctgcgggcggcgtgcgggtcgccgtcgaacaacgccaccgcggtgcccatggaccccgggagccccgcccggttcgacgcccactacttcgtcaacctcaagctcggccggggcctcttcgcctccgacgccgcgctgctcgccgaccgccgcgccgccgcgctcgtccacggcctcaccgaccaggactacttcctccgggagttcaagaacgccgtccgcaagatgggccgcgtcggcgtgctcaccggcgaccagggcgagatccggaagaactgcagggccgtcaacgggaaatgattttagttggtgattgaatgatgatgaaatcgtcgtgatcagttcataattgtggatttgtggatggatggagttttttttttttttttcagattttttgttttttttttaactttgtttgttgtgagtttggtatggtatagtgagagagttcaaagtaagggatatatatatagcggtttataatttatttt

SEQ ID NO: 12204 - DNA, 1418 bp, Oryza sativa
  ref <308>: DATABASE ACCESSION NUMBER: AK109552
  ref <309>: DATABASE ENTRY DATE: 2002-08-28
ctcatgcgatcgatatagctgctccatccgtttgaaggctggctgctgctggccgagggaggcgctgcatgctgctgcaagctacgaagcagtagcaattgcaggcgcgcgcgcacaagttcatattaacttgctaccagttcgggagctatactttgatccgcggaagaagatggacgcattctcccatgtcccgccaggttttcgtttccaccctactgacgaggaactcgtggattactaccttaggaagaaggtagcactgaagaagatagacttggacgtcataaaagatattgatctgtacaaaattgagccttgggacctacaagaacaatgcaagattggaaacgaggagcagaacgagtggtacttcttcagccacaaggacaagaagtacccgacgggcacacgcaccaacagggcgaccactgccggcttttggaaggccaccgggagggacaagccgatctatgtcaagaactgccttgttgggatgaggaagacgttggttttctacaggggccgggctcccaacggacagaagtcggactggatcatgcacgagtatcgcttggagaccaacgaatacggagctccccaagtaagtttgtgtactagtgcatgcatgctaccgaggattcagacttcagacacctaacatgctccatgttcaggaggaaggatgggtggtctgcagggtgttcaagaagcgagtcgcggcggtgcaaagggcggccggcgacggcggcgactcacctttctggttcaacgagcacgtcgcgttcatggcgccggcgccaggcctcgactcgccgtaccatggccaccgccagagccacccttgcaagctggaggtagagtatcaccaccacctccttcctcaggaggcggcgccgttcatgcacctcccaaggctggagagccccaagctaccggccgccgacatcattgtcgccaccgcagcgtcgtccgctctccagccgtgcggccacacgacggcgcagcagctgcagctgcagatcgagccggtctacgtgacggccgatgcgtcggcagcagattggagggatcttgacaagctggtggcgtctcagttcggccacggcgactcgactgcgaaggagcccagttactgcaatccggtgcaggtgtttcaggtcgaggggaagcaggaggatagcttggattacgtgtccacgtctgcctcctgcggaggggaggaggatttgtggaaatagccgcgtgaatgatgcaaaacacatactaacatatacgccattgtatacagcctaataacattgcggtgtgatttgatacagtgtataaatagctagcattgtcatggtaattaccaactgcccatctatatatactaataaagtataaccgaagtggttatacatgcatgcatgatt

SEQ ID NO: 12205 - DNA, 1642 bp, Oryza sativa
  ref <308>: DATABASE ACCESSION NUMBER: AK109553
  ref <309>: DATABASE ENTRY DATE: 2002-08-28
tgggtccaaagagccataaagccacgtgtctcttctaccttagcacacgtacattttgcctttcatcacaagtgcacacgtacgcatggccaccaccctcgccttcaccgtgaagaggtcggcgccggagctcgtcgcgccgtcgagggcgacgccgcgggagctccggccgctgtccgacatcgacgaccaggacggcctccggttctaccggtcgggcctccacttcttccggggccgcggcggcggcggcgccgaccccgccgcggtggtcaggagagggctcgccgacgcgctcgtgcactactaccccgtcgccggaaggatcagtgaggtggaggcgccggcgcggaagctggtggtggattgcaccggcgacggcgtggtgttcgtcgaggcggacgccgacgtctccctctccgacttcggcgacgtgctctgcccgccgttcccgtgctaccaggagctcctgtgcgagcccgacggcaactgcgccgccgtcgtcggccgcccgctcctcttcattcaggtgacgcgactcaggtgcggtggcttcgtgttcggcctgcagatatgccacaacatcgccgacgcggctggcacggtgcaactcctgcgagcgatcggcgagatgtcgcggggcatgcccgcgccgaccgtgccgccggtgtgggcgagggagctgctcatggcgcggtcgccaccggtggtcacgcaccggcacccggagtacgacgagacggcggccggcggcaaccacgacgtgcttgcccaccatgagccgctcgtgcagcgcgcgttcttcttcgggccgaaggagatgtccgcattgcgagagctcgccgccccagccggcgccgccgccggcaagaggatctcccgcttcgacatgctcgccgctttcctctggcagcgccgggcggcggcgctggagtacgacgacgacgacgaggtgcgcgtcatgttcgtggtgaacgcgcgcgggcgcagcccaccgctgcccgcggggttctacggcaacgcgttcgccttcgcggtggcggcgtgcacggcggggcgcctccgtgacagcccgctcgccgacgtggtgggcatggtcgccggcgcgaaggccagggcgacgtcggaggggaacctgcagtcggtggccgacctgatggcgcagcgcgggcggccgcggttcgggcgcgcggcgagggcgtacctcgtgtccgacgtgacgcgggccgggttcgagggcgtcgacttcgggtggggggagggggcgtacggcgggccggcggcggcgacgctggcgacgtttcacttgacggtgaaggatgcgagcggggaggaggtgatcgccgtgccgatgtgcttgccggcgccggccatggaaaggctcgagttggacgtgcagatgtcgttgaatcattgaacgatatatacattcctacgtgttctatgttgattgttagattcggtacatccgtacatgctatacgttcatattgttcatgtcaccatgtgcatgttttgttatgtcctacgtaactcctgcatataatataggagttacaacatgtaatagttaaattttaagttgcatgtttgtggactaatatatcacatgttaatacatctttttaaaaaaaaaaaaaac

SEQ ID NO: 12206 - DNA, 1403 bp, Oryza sativa
  ref <308>: DATABASE ACCESSION NUMBER: AK109554
  ref <309>: DATABASE ENTRY DATE: 2002-08-28
acactttacggtcttgaggatctatcgttagcaacgcactcttttcgtcacccacactctttctctggcatatcgcttgcctgtcactctttaccaacgaatctataccaccaaagtcgctagccgacttgccaccctctttcactcgctttatcagacgaatcgcagtgtcaacagtgtcaatccaacagtatacacaactttcaccgtcaacatgtacaccaagaacatcatctccgccctcagcgcgctcatcgtgctcggcaatgctgtcccgctgaacaacggcaagcgcgaccttgtctgggttactgaaatcgagaccgctattgagactatcggtgtcactactaccgtctgggttgatcccactcctactgccgaggcgcacaaccaccaccgccacaagcactcctctgctagttcccaggccgcaattgaagtcaagccgactcccagccctgcatcttccgaggctcctgttgagccctcttcttacgaggcacctgctccttacgtcgcacccaccacttcttctgcccccgagcctgccaccactgcccaggctcagcagacctcgagcactcctgagcccgagcctgttacccaggccgccgtcactccggaatctagctacgtcgctcccgtttctagctacgaggcaccttcgtccacctatgttgctcccgtctccagctacgaggctccgtcttccacctacgaggctcctgccgccagctctgctcccgcatcttacagctctggctcctccagctccggcgacaaccctgccgccggcaagtccttcaccggcgagatgacttacttcactccgggcatgggcgcgtgtggccacgattccactgagaacgacgagatagtcgccatcagcaaggacctcttcgaccagtacacccctaacggcaaccccaacaagaaccccctctgcggtcagaccgtcagcatcaccagcgccgacggcaccacccgcaaggccaccatctgggaccgttgcgtcggctgcgctgagggagatctcgacatgccccaggcattcttcaacaccgtcaccaagaacaaggccggcgttatcgctgatggccgcgcctacggcatgtcttggtctatcaactagagtgtctccttacggagacctcttgacggaaagggcgctgtagcgtagctttgagagctctgcggcaccttggcctggccaatctcttcaagcacatactagcgagcatgagcattgcatccgcgttgcattgcatggcatgctgcgcacgagcaatttttaacgatggatctgaaaaccaaaaatgggggaaatctttagggaaatctttccttggagagaaatacagtacatttcttgggaatgaaatttttgatgtctttgtttg

SEQ ID NO: 12207 - DNA, 1492 bp, Oryza sativa
  ref <308>: DATABASE ACCESSION NUMBER: AK109555
  ref <309>: DATABASE ENTRY DATE: 2002-08-28
atccacttgcacccccctcccctctcgccctctctcgcctcctccttctcctagcagcaacgcgctggcggcgggggtggcggcggcctcttctccaacggaggcggccccttctccaacggaggcggtccccttctctttgaagcggcggtggccccttcttccggcagcggcagcggccacaaggaggcagcggcggcggcccccttctccttgcagcggcagcagccccttcttccggcagcggcagcggctgtaaggaggcatcaacggtggcccccttatccttgcagcgacggcggcccccttcttccggcagcggcagcggccccttctcccagcaatggcagtggcccccttcgccggcagcggcggcggtcccctcatccagatccggtggaggaagcgagaggaggcggtgctatgcacggataatttttgctgtgtaatttttcctcttgtggttgaatgtgatgaagtatgattgatatgatcaagaggggaggagaagtgaagctagcgcccaggaggagggggtgtgcggcgcttgcttttttccgcgtccgattattttcgctcttttttttcgcgtccgattttttctgctatgacgaaaatcactctattttgtattaaacggacaaggaaaacaacttcaactttttaagtagtagaaattatcttaaaatacagtagaaatttaaagatacaagtttaaccttattttcaaagatttttttggctttgccactgcatcgacgacaatacctactcctaccacattctacgtttcccagcattgtttctaacagaactaatacatttatacatgttatgacggcctagctgttcatggtctgggagcagtagtaactcagcaagtcactgccttctttcatcaggttttgcttgatgtcttgaacaggaagacatcttcccatcaaaagaattaaatttgaaaatatattgtttgttttttcttagaaatattcgggttttaaattgttttgcacaaatatacggttggtatcgctcaacggatgcacgaaaatgacgtgggctgatgatactgacgattgtcgcgtgacaaccgcatgagaccgagcggtctcgcacaaccgagggctgatgatactgacggtgtcgcgtgacaacggcacgagaccgagcggtctcgcacaaccgaaaagctacaacagctgagcgagaccggctatcttgttatctgagctttaatcaatcactaattaggatgattaatcatcaattattaattaactaatatttaatcatgacaactaatcactaattaattatttttcaaaacggtgtcgctgtttggcagtgcgagaccgcgcgatctcgcgttagaccgagcggtcttgctcagttactgcgtgataccatcggtgtcgtcaacccatatcattttcgcatatttgttgagcgataccgatggtatatctgttaaattgaaaaaaaaaaagaaagt

SEQ ID NO: 12208 - DNA, 2699 bp, Oryza sativa
  ref <308>: DATABASE ACCESSION NUMBER: AK109556
  ref <309>: DATABASE ENTRY DATE: 2002-08-28
ctttatggctggactcgagcgcacggcgggcgccttcttcacgttcttcatctttgtctacgtcggctacctcgccatgtcggcgctcttccgactgttcggtaccgtctgcaggtcgtacgacggcagcgcgtctggccgccgtcatcatctcggcgctcgtcgtgttcgccggctacgtgatcccgcgcaacgccatgtaccgctggctcttctggatctcgtacatcaacccgctctactttgccttttcgggtgtcatgatgaacgagttcaaggacctcagcctcgcatgcgtcggcacgtacattgtgccgcgcaacccgcccggatccaacgcgtatcccaacgacgtcggcgccaaccaggtctgcactctccccggtgcacagcctggcaaccagtttgtggccggcaacgactacctgcgcgccagcttcggctacgactcgagcgatctctggctctactttggtgtggtcgtcatcttcttcgtcggcctggtggccgtcacgatgatcgccatcgaggtgttctcgcacggttccttctcgagcgctctgaccattgtcaagaagcccaacaaggaggagcagaagctcaaccagcgtctcaaggagcgcgcctcgatgaaggagaaggatgccagcaagcagctcgacgtcgagtcgcagccgatcacctgggagaagatccgctacacggtgcccgtcaagggcggcaagctgcagcttctggacgacgtttacggctactgccgccctggtaccctgacggcgctcatgggtgcttcgggtgctggtaagacgactctgctcgatgtgcttgcggaccgcaagtcgatcggtgtcatcagcggcgagcgtctgatcggcggcaagaagatcggcatcgacttccagcgtggatgcggttacgccgagcagcaggacatccacgagggcacgtcgacggtgcgcgaggctctgcgcttcagtgcgtacctgcgccagccgcagcacgtgcccaaggaggacaaggatgcgtacgtcgaggacattatcgagctgctcgagatgcaggagattgcggatgccatgatcggtgttcccgagtttggcctcggcgtcggcgaccgcaagcgtgtgacgatcggtgtcgaacttgctgcgcgcccggacctgctgctcttcctcgacgagcccacttcgggtctggacggtcagacggcgtacaacgtggtgcgcttcctcaagaagctctctgcgtccggtcaggcgatcctgtgcacgatccaccagcccaacgcgctgctcttcgagcagttcgaccgcctgctcctgctcgagcgcggaggcaagacggtctactttggccccatcggacccaacgcgacgcacattgtcgactactttgccgagcgcggagccaagtgccccgaaaaggtcaacatggccgagtacatgctcgacgccatgggagccggatcgatgaagcgcgtgggcaacaagccgtggtcgcagctgtacctcgagtcggagctcttccaggagaacctggctgagatcgagaagatcaagcaggagaccaacgcttccaccaaggccaacgaggacgaaggcaacaagaagaagcagaccgagttcgccacctcgttcggcacgcaggtcaaggtggttctcaagcgctcgctgctcagcacgtggcgccagcccgactaccagtttacgcgcctcttccagcacgccgccatctcgctcatcacgggtctttgcttcctcaacctcagcaactcggtcgcctcgctgcagtaccgtgtgtttggtatcttcatgggtacggtgctgccggcgatcatcctggcgcagatcgagccgttcttcatcatggcacgctcggtgttcatccgcgaagactcgagcaagatgtacagcggctcggtgtttgcgatcacgcagctgatccaggaggtgccgttcagcattgcgtcttcggtggtgtacttcctgctcttctactacccgacgggcttccagacgggctcggaccgcgccggctacttcttcgccatgctgctcgtcaccgagctgttcgccgtgacgctcggccaggcggtggctgcgatctcgccgtcggtctacatcgcgtcgctcttcaacccgttcctgatcatcatcatgtcgctgctgtgcggtgtcacgatcccctacccgaacctgccgcacttcttcaagagctgactgtactgggtcaacccgctgacgtacctcgtgtcgggactgataaccaacgagatgcacgagctgcccatccgctgtggcgagtccgagctggctcgcttccagccgccgtcgggccagacgtgcacgcagtgggccggcaccttcctcaacgcctttggcggctacctcgagaacccggatgcgacggccgactgcggctactgccagtactcgaggggcgacgacttctacgctggcctcaacatcaagttctccgagcgcggccgcaacatcggcatcgtcatcgcctttgtcgccttcaacgccatcgccacgatcgtcgcttcgcgctacatcaagtacgccaaccgctaggaggcgtgcgaacgaacattccaaattttcccacatagataccagtcttgttacgccttagcatcttaacgccttccgtcgttgttaactttgacgtttataatagatgttgttgattccaag

SEQ ID NO: 12209 - DNA, 1630 bp, Oryza sativa
  ref <308>: DATABASE ACCESSION NUMBER: AK109557
  ref <309>: DATABASE ENTRY DATE: 2002-08-28
aacctcttcaccctcctctctctctctctctctctctctctctctctctctctcgctcgcatttgcttgcgattcccaaatcccgatgcctcctcttggcaactagccccctcctcctcctcctcctccgcctacgactgccaaatcccctcctccacccctcgcgccggcggcggtggcagcggcgggagccagcacacgccgccactgcccccggcgccgcatgggaacgggcatggtggcggcggcggaggaggaggaggaggaggaggcgcgcacgtgcggctcatgtgcagcttcgggggacgcatcctgccgcgcccgggcgaccaccagctccgctacgtcggcggggagacccgcatcgtgtccgtcccgcgggcggcgacgttcgacgccctcgtcgcggcgctggccaaggtcgcccccgcgctcttcccggcgggcgggccatccccggcgctcaggtaccagctcccccaggacgacctcgacgcgctcatctccatcacctccgacgacgacgtggacaacctcatcgaggagatcgaccggttccagggcctcgccgccgcctccatcaagccgccacgcctccgcctcttcctcttcgcctcctcgcccgccgaccacgcctccgcggccgccttcggctccgtcctctccggcgccggcggcgactcctcctccgaccagtggttcgtcgacgcgctcaacgcccccgcgcctgcccccatcgagcgcggccgatccgaggcctcgtcgatcatctccgaggtccccgactacctcttcggcctcgacaccacctccgacgaacccagccctggtcccggaggagcccgccccaaggtcgacacggagatggcccacgtcgaggacgacgcgccggttctctcgcgggggacgccgcctgccccgtacgtcaccgagagcgcgccatggccggccccgccgccgccgtacatgacgcagcaggtgtactacgtccccgtgcgcccggtccactacctcgatccgtcttcgcagggcggatacatgccgggtccagtctaccacattgtcggtggcggaggaagcgaggcgcggggagatctctactccaccgggggcagtgtctccgccgccgccggcgtcggcggcgtctacggcgtcccgcaccccatgcagccgttcccgccgatgatgtacgggcacgcgccgccgcccggcgcggtggtctactcgtcggaggggaagccgccgatggaaggtggggcccacgcttcgtaggccccgcaagtggagaggagggagggaggcagagcacggcgcggatgagctgtttccctggaggagctggtcctgagctcttccatcctcgtgattgcatatgccttattctactaaggatttttgcattgccattgccgtgtggtgaattcttatttttattcttcttctttggatggcttatgtgggttgctgtatagatgagggaggtggaggatgggattgatattgcaattttcgtcaagtgaaaatagatttgctatagttattatatttataataatatattatataagagtaagtacatctggtgtgattaagtagtagcaagttaatgtaatatgggattcatatgttc

SEQ ID NO: 12210 - DNA, 1595 bp, Oryza sativa
  ref <308>: DATABASE ACCESSION NUMBER: AK109558
  ref <309>: DATABASE ENTRY DATE: 2002-08-28
gcaaaacaaaagtgcgagacgtgccaagcaaggcgggcggagatcgatcgagatcgaagaattagttgcagtgatttaattgtttgcatggcaccgacgacgaccatgggaagcgccttatacccgctcggcgaaatgcggcggtcgcagcgcgccgacgggctcgccgccgtgctcgccatcggcaccgccaaccctcccaactgcgttacccaggaggagatccccgacttctacttccgcgtcaccaacagcgaccacctcactgccctcaaggacaagttcaagcgtatctgtcaggaaatgggcgtgcagaggcggtacctgcaccacacggaggagatgctgtccgcacacccggagttcgtggaccgcgacgcgccgtcgctcgacgcgcggctggacatcgccgcggacgccgtgccggagctggcggcggaggccgccaagaaggcgatcgccgagtggggccgcccggccgccgacatcacccacctcgtcgtcaccaccaactccggcgcccacgtcccgggtgtcgacttccgcctcgtcccgctcctcggcctccgcccctccgtgcgccgcaccatgctccacctcaacggctgcttcgccggctgcgccgcgctccgcctcgccaaggacctcgccgagaacagccgcggcgcgcgcgtcctcgtcgtcgccgccgagctcaccctcatgtacttcaccgggcccgacgagggctgcttcaggacgctcctcgtccagggcctgttcggcgacggcgcggccgccgtcattgtcggcgccgacgccgacgacgtcgagcgcccgctgttcgagatagtgtcggcggcgcagacgatcatcccggagtcggaccacgccctgaacatgcggttcacggagcgccgcttggacggcgtcctcgggcggcaggtcccggggctcatcggggacaacgtcgagcggtgcctcctggacatgttcggcccacttctcggcggcgacggcggcggcgggtggaacgacctgttctgggcggtgcacccgggctcgtcgacgatcatggaccaggtcgacgcggcgctcggcctcgagcccggcaagctggcggcgagccgccgtgtgctcagcgactacgggaacatgtctggcgctacggtgatcttcgcgctggacgagctgcgccggcagcgcaaggaggcggcggcggcgggtgaatggccggagttgggagtgatgatggcgttcggcccggggatgaccgttgatgcgatgctgttgcacgccacctctcatgtgaattaagttaattaattttgtttcatgtagtggttaattggatataatccggggttaccggaattatattcagtgaagccaagaattaagcgtttcttcagctcgttttctgaccgaagtcggatgtgccacgacgtgggatagcgcgtttgttgcatcgtgcgttttaatcggtcatgtttgtgtgtaatatgaaacaaaaaagaaaaagaagaaaagtttgtagtatgtaacaaactcccacttgaggagatcaataaataaaggagaaagaagatcagaaaagctgcgaattttgcagcacc

SEQ ID NO: 12211 - DNA, 1534 bp, Oryza sativa
  ref <308>: DATABASE ACCESSION NUMBER: AK109559
  ref <309>: DATABASE ENTRY DATE: 2002-08-28
caaatcgacggaaacccaaatcggcggcggcggcgacgcgtcgaggaggagctcgtggtggcagtggccgaggacggcgaggttcctgtgggagatggcgcacgagaagcccatccggttcacgccgcggcagctcgccgggttcacgcgcggctactcggcgcggctcggcgccggcggcttcgggacggtgtacggcggcgcgctccccaacggcctcggtgtggccgtcaaggtgctccgcagcggcatgggcaggaggtccgaggagcagttcatggcggaggtgggcaccatcgggaggacgcaccacatcaacctcgtcaggctgttcggcttctgcttcgacgccgccgtgcgcacgctggtgtacgagttcatgggcgacggcgcgcttgatgcctacctgttcgaccggacccgcgccgtcggcgacagcgacggcctccggtctcccccgtcctcttcgctctgggctgaggccgccgtgagtcaaaatcggcggaaacccaaatcggcggcggcagcaacgcgtcggggaggagctcgtggtggcagtggccgaggacggcgaggctggcggtgatgtgcgcctggttgcggcggagcgggctgcggaagaccgcggcggagtggccatggagggagcagcagaacgacaagcaaaaactcgccgcggcagcggtggcgaggcgatggaaggaggagaagttggcggtggcggcggcgagctcatggaaggcgcgcgaggaggagaacgcatcgggatcagtggcggcaggtaggctcgcgaggaagtgagcatagatggcggaggcggtgccggcggggggattggaaggcggcggccgcaagaagagcagcggcgaggcgggagcaggctggggagagtgagaggcgcgcgacggtcggcatggggacagcgcatagggagtggcggcgctcggccggcaagggagatgccgcctcctgctcccgcatcgccgtgccgccatgtcctcctcccacgggccgccgccgtggatgggagtggtggcgctcggcctcgtcgtcgtcgtcggcgcctccgagcaaggatagggccgctgccgccgccgtgctccccgatatggatagggccgccccaagcccgagcgccgcctctcctgcctcgccccgccgagctccgagccggccaccgcccttcaccaccggcgtcctcctcctccttcgccgccgcatcgacggcttgccccgctgctccctcccggccgcctcagcgacgtcatccctgcgagtgcgagagcagagcgagaggaaggaaagagaaacagagaaagagaaaggggaaagagagggtgacgtggatatatgacatgtggggcccacgctgactcagccgccacatagaccaaaaccggggtcaaaaccaccgagggattttgggtgaccagttttgtatagttaggggacctcggttgtctggtattgcggttcaaggacgttttcgtatctcggtgacaagttcagggacctccggtgtactttttcctat

SEQ ID NO: 12212 - DNA, 3805 bp, Oryza sativa
  ref <308>: DATABASE ACCESSION NUMBER: AK109560
  ref <309>: DATABASE ENTRY DATE: 2002-08-28
aatgtgttcaaggtcaacttcatcagcgcacgcacgcacgcatcactttgcctctcgtcccccattccgtccttgcctcgtccgtcacatccacctcgtgtgcacacggcgagtctgtcttcccttcttcgcgcgcaagcacaacgagccggccgcgatcgtcacggggcgcggttgggaagaacagcagagtttgggctgtctgatttgccgtctggctgctgcccgcgagcttccggcacctctcatcaccaccgccagcagcgacgcttttctcacacactacgacccttctgctgctgtcagccgctgccgccgttggtccaacccaatccgcttcccgtgcctgccgtctagctccaatcccccaggcccggcctgtgactgctcccaagctgcatcatctgcatcctctgccccagcagtcgccgcacccgagaccccttcaccacttcccatctcggtctgaacgttgacccgaggcgcgccgacgacaaaagcagctgcctcgccgcctgagaggtaccagactactcccacccagccttcgttgcgcgtgtagcatccaccgctactatgtcgctcaaaaaggctctcagcaccctcaagccccgaagcggatccaactccgctgccggcagcgacaacgagagtcctgcgcccagcggccaccacaaggatcacaaggaccatgaccaccacaccagccgctcgggcacaggtctttcctccttgtccaatggcattggcaacctcagctttggccgccactccaccgactctgggagacggtccatggatgtaggctcaccttcgccctcaagagcttccaaggagcaccaccgcgcctcccacagcccacttggcttcctccgccgcaagacgcgtcttggctcagacgattcgcattcttcgactgaagacttgccattgaaccgcgaaggcgagcccctcagccgcaaccagcagcgcaagcatgaacgccaggcagagaaggagaagcaccgcaaggaggccgaggctcgcatggaagcagatcgaaagcgtaaggaggagatggagcgcaaggcggccgaggaggagacggaagaacaaaagtccaagtatggcaccctgcccgtcaactactatgcgggccagttgaagcacgaggagcatgtcgacctgcgccagctcacggccagcgatgttggcaaggttgtgctgttcagggctcgtctacacaacatccgcaagctgagcgctcatctcatgttcgtcgagcttcgacagcagacccacaccatccagggcattcttcacgagcatggaagtgtgtctcagcactttttgtactgggctgagcatcttcacgtcgagtcgattgtccgcgtgcgagctgtggttcaagagccaaaggccaagcagggcgaaatcattggcgtgtccatccacaacctagaggtccacatccatgagatgcatgtcgagggaacgccaacggagccactcccattcaccgtccatgaggccgaagtcagcaagtcagaaacccaagccgaaggtgatactcgccaccgcgtctcagaccgagctcgtcagaacaacagaatcatcgatttgcgcaccacaacttcgcagggcatcttccgtgttcagtctggtgtctgccaggcattccgtgctcacctacactcgctcggcttccttgaaatccatacccccaagcttcagggcgccgcctctgaatctggagctagtgtcttcaaagtcgactactttggcaggcccgcattcttggcccagtcgcctcagctcggcaagcagatgtgcattgcagcagatatgaagcgtgtcttcgagattggcccagtgttccgcgctgagaacagcaacacccaccgacatttgaccgagttcacaggtcttgatctggaaatggcgattgatgagcattaccacgaggtccttcgcacccttgacagcaccttcaaggccatcttcaagttcgtatatgagaactacaaggaggagattgaggtcgtgaagcgacagttccctcacgaagacctggtttggttggacgagactccagtcatccccttcgccgaaggcattcgcatgctcaatgcatctggataccgtgatgagaatggaaacgagctttccgagaacgaggacatgggcacgtgacgaaatcgcattgggtggtgtgatcaaagagaagtacaagacggactactacgttctggacaagttcccaacatccgcgcgaccgttctatgctatgcctgatcctgacaatccggaggtcacaaactctttcgatatcttcttgcgcggacaagaaattctttctggtggacagcgtatccacgatgcaaacatgctcgccgcgaagatggagaagatgagaatggacccaaagacgctggaagaatacatgactggtttcgaatggggtgctccaccacacggtggcggtggtattggtatggagcgtattctcatgcttctgttgaagcttggcgatatccgaaacgccacgctctttgcccgtgatccaagatcattgccttacaagccaccagtcaagcagctcaggcatccagaagcaagcactttgcatcccccttggcaaggcacagatagagtcacagcccaccaggaccagcaatcgatcgagaagctcattgccaactacggtgatgcttcgaacacatcctggctcgagcccaagttcgagcactggcgagactcaaacaccggtgcagcggttggtttcgtccctcaagatgggtacgccatcaccattggtgatccactttgtcacgccagccagtacgcgaagacgatcggcggatacttgcgatacatcaagaaagaccggcatctgaagcccctgtggttgctctgcggcagccaagttgaggaagtgctcgcgaacaagttcgattggcgaactctgtctgtcgctgctgagcagcgtctcgatccaggaaacaaccctgcagctcgggatcctgaaattcagcgcaagtgtcgccacgctgagaaggaaggcgtgaagactcatgatatcttaatcggcactaccgtgcccaaggacgtcaaggagaagatcgaccagcgaattgaggattggctcaagaaccgcaagggcaagcaggtccatttgacagatgtgcacccttggcaagatgtggcacacagacaataccattacactaccaccaaggatggtcagatctgcggtctcgttattcttgcccagctctcgcctgaccacggctggcaagtcaagttcgcgctcgacttcccgggtgcaccatccggcgccatcgagttgctggtcttgcactcgttgaaggccgcggcagcgactggagccacctccgtcacattcggtggtggtgccagctcgaaactcaccccaggacacaacctgaagggtactcgtgtcaaggttctggccaaggcctaccacgctattgcgacggagttgaagttgaccaacaagagcgagttccgagagaagcttggtgctcaggatgaccctatctatgtctgctatccaccacatggtctcggccccggtggtgttcgtgccattctcagcttcttcgaggacgaggatgacacttcgaaacttggttagtcgccgatgaaaaagaagactacttggcctctctgttggacaagttgatgtggctggcatgtcgaggagacgggataggatgagagtggaagagcaccctcgttgcattgcgggtgttgtaattaagcaggtcgaggtcatgaggccaatgcaggccttctacgtttg

SEQ ID NO: 12213 - DNA, 1515 bp, Oryza sativa
  ref <308>: DATABASE ACCESSION NUMBER: AK109561
  ref <309>: DATABASE ENTRY DATE: 2002-08-28
acggggccgagacgggcggtggcacgaagctgagcagggggcgggcgccgccggagttgggcggcgacggggcgccaacagcagccgcctccaccgtgctcgcctgccaacagccgccgccgtcctcctcctctcccgcctcgcccgtcgacgcccgcgccacgtgcagctccaccgggatgccgccgtgcttccgcaccgccggccatcgcagcatcgtcctcctctacctttcctaccatctgtaccgaaaacaactattcttcacagatcatctaagactatagatcaaacacaaaacaaaccaagtaaaccaagtacaagacagaacaccaagaagaacaggtcgcgcgagatcttacaatttcctcgaaaagaaagttggcgattcctcgctcctcctcgtcgcagatcgatctcaaaccttcagggagaagaaaaagatcgtctcccacctcgccccgtcgacgcccgcgccacccacgacgcacacgccttcccgccgaccgttgacgcccgcgcctccccattgacgatgggggcgaggtcgacggcgatagggggcgacggaggcgtcgctctccccgtcgcgccgctctcctcgaaggcggccgcggcgccgccggagtacgagatgccatcgatgaaggagtggctcgtctcccgcgtgctcgcgctcgacttcctccgaccccgccggcgagctcgaggccgtcgagctcccctcctccctcgaggtgctccaggagcagctcgaattcgtcctccgcctctccaccgacgacctgtcctcctacccgctcctcctcgcctgctccctccgcaagaacgcctccgtcgccgtcgaccttgcccccatcgattgatgtccatggcggcgcttcaccaccaccacagccaccagatcaaggcgccgacgccgacttggctcatcgtgaaggctatcccgccgccgagggacggggccaagaagctagccgcggcggcgtactcgccgctcctgctatcgccgtccgtgtggcagcgagcgcagcaggcgagcgtctggcaggcgagcgcggtggcagcaggcgagcgtgtggcaggcgagcgcggcggcggcggctgctgttggtgccccgtcgcagcccaactccggtggcgcccgccccctgcttagcttcgcactgccacccgtctcggccccgtcggcgttgcctacctgctgaagaagggaaaagagaagaatgacgtggatagtatgacatgtggggctcacgtgggtcccgctgttgactcagctgccatgtcggacaaaaccggggtcaacaccaccgaaagacatcaagcgaatggttttgttaattgagggatgtccgatatctggttttgcggttgaaggacaattttgtaactcgatgacaagttgagagaccttcggtgtactttttccttctaggatcgaggcctccacaaacaaaggccttataaaaggaagaggattttaatccctcgaggggatatcccctcgttgtt

SEQ ID NO: 12214 - DNA, 1597 bp, Oryza sativa
  ref <308>: DATABASE ACCESSION NUMBER: AK109562
  ref <309>: DATABASE ENTRY DATE: 2002-08-28
acggcaacgattcaaacagccacgtacattcgaagcccaagagactcgggccgccgccgccgccgtggccgcgtgggtaatccttgctggctttgcccaccgccgccactaggagcctgggaagctggcctctccctggcgcggcgccgccggaaccccatcgcccctaccaactaccccctccgcccgcccgcgccgccgccgactcctccggcctcgtcctctggctcctcgccatggctgcgccctcgaacctcatcgccgacgacaatcctggccccgatcccttcctctgccgcagcgtcaagcccgccgcggcgcgccggtggtagccatttgggcacgcggccgctcgcgctacccgagcagatcagggcgaggagtacgtacactgtggaggacaggctttgcccagcggtcgaagagggggggggggggggggcgcttcgtctccgccggtttcgtcttggccccgagctccagccaccggccccgagagaaggtaatatcaagggtatgctcgtctcttcttgcatggtgctgtactgcagatttgcagctctgagttagaacttggaattgtttggtgtgctattttgctaagctcatggtaatggcactgctccccccctgctgtctgtctatgtctgtttgacattggttgctgaaatcctcctggggaaaactgctgaaaaatacttccccgtttcatattataagattttctagtattacccacatttatatatatgttaatgaatctagacatgtatgtgtgcctagattcattaacatatatatgaatgtggacaatgctagaaagtcttataacctgaaatagaggtagtaccatgatagggtaccttatctcctgtgactgagtactgtactgtggtctgtgtggttgtcagttgtagctaatcttctttaattactgtgagaaatgcaattaaggtgatctgctggccctgatcagaatcttaaaaaacaataatgaacatttgcacattggtaactggaaacatgtctttgagaagtaaaactgccaaagaaatagtttacattcatgaggataaaaccttggaagatacaaaagcttgatattgatgaacacgagtctttcaatatgagtaataacatagaaatagatttgcaaggtaattcatcgcagtacttgattcacttgtttgttccttttttctttgtaaattgtgcatgtcactgcaaacatattgtggaaagctttgagcagtaaagttgctattgtgatcgacaagacctctggacgcctaatgaacttcattcacttgatgggccccccaagatcaggcattggttgatgctctttttactttgctaagtccttttgagagtttgttaagagttgtcttagtcttagctaagtctttactgatgctatcttttgtgttcctccctgtagagggttaccttttgtctccttcctgggctgttgtccttgtatctgcacctaatgatgtaaatgggcatcccccataactatgctgttttggctttctacataagccgggcctgttggcctctgatctaaaaaaaaacctgcaaacatattgtcttg

SEQ ID NO: 12215 - DNA, 1080 bp, Oryza sativa
  ref <308>: DATABASE ACCESSION NUMBER: AK109563
  ref <309>: DATABASE ENTRY DATE: 2002-08-28
ttttttaaattgcgatagcaagatcacaaatttctcagcgccggctgccgcctaaccctaaccatcgccgctccgatccttccctcccccgccgccgccacagacgattctgacggcccgccttcgcgcgcgacgccgccggcgcccctccccgccaactcccctcctcccctcatccaaatcgactccgccggcacgaaagcgcccctcctcctcgaccgcgttccgacactgccggtgccccctcgctccgaccgcgttgcgccgccgtcgaatcccgtctccattgtcaaattgattgcacactaattttgaaatatgggagcacatcagaaggttctcattatgacagcggatggtacacagatgcaatcgtaaaccttctgtctatatagtcaataaaacagttttactggatccttgaatttgctgttctgcaacgtggagtgtatatagcatacttgagaatcattggttgtcactgcattatagttgtacatcatagatcccatcaaatattggatcaattgtgacttgcgagcacatgtgtgcagcgtgagcagttgggctgcaacttgccagggcaaggttggaattgctgcgggatcatccgaggcctcgacacgacataccctcgtctcattgctcagtttacagagtcaagttccaagaagactggaaagaaagttctcttatgtcaaacgcaagactcctcatccctgctcccgcaggccatcgatcccgcctgacagcaaggcctaagcatcgctcgatctacttttctttttacctgtgtatatgtgtttgttgcgttccaatttgttgttctttgatttgatcaagagcagtttgtcgatggttgatatgttccctaggggttcgtattataaatcatgttgctttgttgatcatgtttgtattgatctgtttcaggtaactacatggttgtttgtcgatttattatgttaccaaatgtaaattattgtgcattgcaaagagggtcatctttgttttaaacaatctgcaacttacattgcatatgcgatgagctgtactgaaattcctgactgttttctaatg

SEQ ID NO: 12216 - DNA, 922 bp, Oryza sativa
  ref <308>: DATABASE ACCESSION NUMBER: AK109564
  ref <309>: DATABASE ENTRY DATE: 2002-08-28
agtagtgacatccagcgatccgagcgggttctcccaaaccgttataaaaggaccgcaggaggacggatctgtctgtctcctcctagacggagcaggtagtcgggaattcgcagcgtcggctcaccatcttcgcgtcgccgccgcctttccatcccatccgacgacgtgggcgctgcccccgcctcactttccatcctgcaggcgcccggcgcccctccgtcaatcaacgtccttcccccctccccctccccttccccctccttttttttttttttttttgctgctaattggggcctctgtgcggaacgccaaactgccttttccttaactacctcagctttcatcccattccacctcccttaaagggaaaaggcaggttccgcctccagaggtctcatctccttccccgccctcagtccgccccacaggatcccccaaattgcagcccattctctctgtagcctgactccggaggcggaggactcaggcccgcggggtgcctcgcagaaggcgtccccccgacgtgggaggcagtttggtccccttcccttgcccttagcttaaatcgctctgtcttccctccccaccctcgcacccatcgccctttctccccgttctccctcctaagtacccccccccccggtcctccccgccctgcccggcccgcccctgtctgcccgcaccctcggccctcgccctctctctctgtctcctgttctctgccccctctgccccctctggcttcgctcgctcgctgcacgccgccctcgctcactctctgtctgtcgcctgtgctctatctttctcactgactgtcttctgctacttctgtccactgttctacaaaaccctcttcactatctccccaaacttatccaaaaacaacgagtcaacccgccccgccccaaagcccgtccacttg

SEQ ID NO: 12217 - DNA, 846 bp, Oryza sativa
  ref <308>: DATABASE ACCESSION NUMBER: AK109565
  ref <309>: DATABASE ENTRY DATE: 2002-08-28
gtgatgcgttgagaaatgtcaaattcgttggttgcgtctgaagatgtgggcggttcttgaagagagcttggaataatgatctgcgttggttgataaaagtttgggttttttagtacatctttttagcgactgtactttgtgtcgatctgatatacctatcctcttatagtggtatttgttagcacaagtggctttatagctgcagtttgtatctcttgaacaatgtgtaaacctgggtgcgatttgtgacaagtttacagcttgaatgagtcagtccggttccatcttggtagcaaaaaaaaaaaaaaaaaaaaaaaaaaaaaaaaaaaaaaaaagaaactggcattgcgatttgcgaatctatcgacgccaccgatcgacctacgcctgcaaattaaattccgcagctagctagcaacaacaactcccgaccggccgcggccacgacgcgcgcacggacggacggacgacgacatgcctcgcgcactgatcgccctcgcgtcggctgtcctgctgctggtggccgcggtggcgccgccgctcgccgccgcggacgacggcggcgccggagtcccgggggaagggaagctggagagcgcggggtccgcgattaagtcggcggccgccaacgcgttcggggtcggctccgacatcggcggcgtcccggtcaacccgtcgccgggtggcgccaacgcttaatatatttacagtattacagtggctgtttccttgtgactttaatttgtcagagtttttggaggccatttcattccatatatacctaattaattactacctaaatactagtatatgtaattaatcacgcttgcttgtgtgtgtctgatc

SEQ ID NO: 12218 - DNA, 1012 bp, Oryza sativa
  ref <308>: DATABASE ACCESSION NUMBER: AK109566
  ref <309>: DATABASE ENTRY DATE: 2002-08-28
atccatctcccccatgtggctgccctgggtgaagacgcgcccctcctccccttcctccgccgccgcctccccctcgccctccaccgcgctcgccgccgccgccgcctctcctcgcttgtccttctcctctccctccctcaaggacctccaggctctcctcctctccgaccactcgccctccccgacgccgccgcagctgccgcccaacaccgccccctgctccccctccgtccgcgtcttccaccgcgtccgagtcgccgcctccgccctccgcgcgctccgcaccctccaggcgccgcacgccgccgtggccgaggccgaccgccgggtggtgctctacttcacctccctccacgtcgtccgctccacgtatgaggactgccgcgccgtgcgcgccatcctgcgcggcctccgggcctccgtcgacgagcgggacctcgccatggacccccgctacctccaggagctcggcgcgctcctcccccgcgcgcgcggtgtcaccctccctcaggtcttcgtcggcggccgccacctcggcggcgccgaggaggtccgccgcctccacgagtccggcgagctccgacgcgtcgtagccggcgccggcgcaaccgccttcgccgcctgcagccggtgcggcggcgagcgctacgtgctctgcggcagctgcaacggcagccacaagcggtacagcctcaagggcggcggcggcttccgcacctgcgccggctgcaacgagaatggcctcgtccggtgcccggactgctccccgccggccgtctgatccagatccaaaggtcacaatctcatgactactagattttaatgtttttttagctcaaacttgagatatgaaatgagctgtgtgtgtagctgttactcctactacttgttattattgtagtggtgtttttgtgtgtgacagtgcccaattgaaacttccaagttcttagcatttgctaaccaacgtttctaatgtttgattaggatttagtaaaagagttgttgtttcctt

SEQ ID NO: 12219 - DNA, 2181 bp, Oryza sativa
  ref <308>: DATABASE ACCESSION NUMBER: AK109567
  ref <309>: DATABASE ENTRY DATE: 2002-08-28
ggaaaataaaagttcggtgcaatgaatcgcgcggcgaggtcgaggtcgccggaggacgcgtcggtggcggcggcgcggaagctgcacctcctcctccgctcccgggacctccgcccggcgctctcctacctccgcaccctcccctcgccgctcaccctcctccccaaccacgccctcaacgccctcctccgcgcgctcgccgccgccggccgcgtccgcgccgccgccgccctcttccgccgcatcccttcccccacaccgcactccttcaactccctcctcgccgccctcctccgccgcggccgccgccgcgcggcctccgcgctcttcgccgcgctcctccgctccccctccgcctcccccgacgccgccaccctcaacaccctcctccacggcctttccaccgcatccccgcacccgtccactcccgcgctcctcaggctcttccgcttcttgcccgacacctacgccttcgcgccggacgccatctcgtacaactcgctgctctccgctctctgccgcgccggcgacgtgctcaccgcgcgcaagctgttcgacggaatgcgcgtcggaggagaagaaggcagaggagctgtctttcctaacgttatcacatacacgaccgtgatcaaggcgtactgcgccaagaggctcgtgaacgaggctctcgcgatcttcaagctaatggttgcggatggtgtggcgccgaacaggatcacatacaacacgatggtgcaggggttctgcgatgccggcaggatggagctagtgaaggaggtgttggagatggactcgtttaggccggacacttgcacattcaacactctggtggccgtgcattgtagggaaggccggatcgaggatgctatgaaggtgtttaatcagatggtggagctccgtgtgagacgtgattctgcaagctatagcatggtcatccgggtgttgtgtgagaatggggaatttgggcaggctgaggagcttgtggatgagctcttggagaaggaggtgctcaagaagagagggggttgcacgccgctcattgcagcgtacaacccggtttttgtgtacttgtgtgagcatgggaagacaaagaaggcaaggatgctgtttgggcagctgctggaccggaggagcaaggtcgatgttcctgcattcaagacattgatccttgggcattgcagagagggtgatttcgaagaagggtatgcattgctgctctcaatgttgaagcgggatcttgtccctgatgatgaatgctacattgccgtgattgaagggttttcacagaggggaaggatgaagtttgcatgggaagccttgcacaggatgttgaatagcggtcttcggccaagcacaagtacttttcactcggttcttttggggcttttgaacaaagatggttgtgcaaaagaagcagctgatttgattgagataatgctagagaggaagattcgccaaaatgttgatctttcgacaaatttggtagatacattgttcaggaacaacctaaatgaccgtgcttacaagattgttacatctctatatgaccatggctattacatcaagatggaaaagttaatcgcaaatctttgcgaggaaaagaagttcatagaagctgcagattttactttgtttagcttggagaagtctcagaattttggtgtagccattccaagcatggttctggatggtctttgcatgactggtagagcttcagaagcattccggctgttctatgaactcattgagaacagaagtgctttggcttctgtcgctgcacctcgtagtttagttgcacttcatcatgcactggaggaatccgggaaaatgaaggaagctgattttattgctagacagatgagacgtgcaagtgccagaataagggaaagaatgtagtgggttgctttgtcccaaggagcatttcaatcgcatgccctttgcttctccaaacaggatggactaataagtgtgaacttaaaagaacgaacaggatgcagaaactgtgcctgatccactgccccataagaaatggatcaaccaactgtatgatgttagaatgcagattaattcagcagatatcctttttttttcagggaaactatggcgggtggattagcaccggcctgaacatttattgataaataaagagatagttacaaataaagataatttacatggagg

SEQ ID NO: 12220 - DNA, 1460 bp, Oryza sativa
  ref <308>: DATABASE ACCESSION NUMBER: AK109568
  ref <309>: DATABASE ENTRY DATE: 2002-08-28
attttaacacacaacgcacgcgcaccaatctcatttctagtttactccaaattaaagaccagtcagaattttcgcctttgcaaaactcctctcatttcatttcctcccaagagtcaagctagcccttcttgcttgctccgttcaacgcctcttccccagcttcacagtactccatgtctggacctggaggaggaggtcatggcctctacgaggatcatcctgcagccgccggcttcctccccttcgaccacgacgacgacgtggtggccagcttctcctttggcagatcggcggcgtccggaggaggagccggcgccggcgccggcgctggagacgatgatggtgttgggctcatcacgccctactccagcatcacggattatctgcaaggcttcctgcaggaccccgtgtacgcgtcgtccccgttgggcggcgatgctgccgtgaagcacgaaacggtggtggatcatcccagtcaggccggcggcgtggcggcggcgccggccacgccgaactcgtcggtgctgtcgtcgtccagcgaggcggctggaggggacgatctgcgccggtgcaagaaaggtcgtcggccggaggacgaggaggaggaggagattgacgatgagggatcggccgttcagagttgcaagacgaacaaaatgaagaataaaaaaggggcgaagaaggagcgtgagccacgtgtggcgttcatgaccaagagcgtggtcgaccacctcgaggacggctaccggtggcgcaagtacggccagaaagccgtcaagaacagctcctacccaaggagctactaccggtgcacggcgccgcggtgcggggtgaagaagcgggtggagaggtcggagcaggacccgtccatggtgatcaccacatacgaagggcagcacacgcacccgagccccgtgagctaccacatgcacaggcagcaggggctcatgcatgtgagcgcgcgcggtgtcatgcccggcgccgccggcgcctaccagttcggcgcgccgccgccgccgctccttggcttcgacgaagccctcgccgctcgggtgcgaatgacgatgaaccagcagcagcagcagcagcagttaggcttcgtgccgagcatacacgccgccgccgcccggccgacgatgcctcctcttcatctctacaccgcgcagcaagacctcttccttccgtgacaggcagtcaccacggctattgatattagatctttcttatttacggtttacagaatgcatgctgctcgagataaatttgtgcgcggctatatatatatggttacgttaccgatgaccaagtgaagtgtgggatgcatgttttgtgtcctcgtttttttggttggtctacaaaacatgtttgtttgagttgcattgctaagtgcctagctagctatataaacactgtctttaattccaaactgtagatcatgaggaatttgggtcttgttattg

SEQ ID NO: 12221 - DNA, 2163 bp, Oryza sativa
  ref <308>: DATABASE ACCESSION NUMBER: AK109569
  ref <309>: DATABASE ENTRY DATE: 2002-08-28
atcattcctcaccttctcagctctcccctctcagcttcctagacaagcctcccccctcccccacctctcccccttgtttcgtgtctgcttctactcggtcttcaccgtctcaaccaaccacactctctttcaggacttttcagccactccgatctacaccagaaccctcctcccatcgagcttccttaagatgccttccaagatcgccctctccatctcggtcttgaccgccgccctcggcatggtcaacgccgctcctcactacggtgccgagtactcgtactacaacggcggccacaacgtcgagtcgaccaacgagaacaagctggtcgacgcctccgatctcggcctcaacatcgacatcctcaagcgcaccgactactcggcctgcaagaagtacatctcttcgtacaacggcggccacaacgtctactcggtcaacgagaacaagctcatcgacctcagcgacgccaccgtcaacctcagcctgctcagctccaacggccgcaagcagaagacgtggaagaacgcccccgcctactgcctcgagtacatcaagagctacaacggcggccacaacgtcatcgtcaagaacgagaacaagctcgtcgacctttccggtctgctcgccaacattggcatcctgagcaagcgcaacgcccccgagttctcctactacgacgctggccacaacgtcgtctcggacaacgagaacaagctcatcgacgcttcggacctcctcgccgacgtcgacatcctcaagcgcaaggctcccgcgtactcggtctacaacggtggccacaacgtcgtctcggacaacgagaacaagctcatcgacctgtcgaacctattcgccaacgtcgacgttctcaagaagcgcaaggcgcccgagttctcctactacaacggcggccacaacgtcgagtcgaccaacgagaacaagctgcttgacctctcggacctgctcgccaacatcgacatcctcaagaagcgcaacgctcccgagttctcgtactacaacggcggccacaacgtggcctcgtcgagcgagaacaagctgatcgacgtctcgcacctcactgcgctcgtcgacgtgcttagcaagcgccacgagcccaaggtccagtactacaacggtggccacaacgtcgagtcgaccaacgagaacaagctcatcgacctctcggacctcactgctctcgtcaacgtgctcagcaagaggagcctcaagggctacggtgctcagatccacgctcgcgacattgccgaggacctctaccgccgcggcaacgacgacgaggactgcacctgcgtcaagaagcccaagccgactcctcccaagcagaccaccaccactcctcccaaggacgactgccctccccctcctccggcccagactgtgaccaagacccgtcaccaccagcacacgcagaccccccagcccaagcccacggacaagcccacgcccaagcccactgacaagcccgagccttcgcctcccgctccgtcgcccaagcccacggacaagcccacccccaagcccgagcctcaccacgaccagcccacccctaagccccagtgcggcggtgacgaggtgtacatcaacgagggccacaacgttgtttcgaccaacgagaacaagctgcttgacctgagcaacatctcgatcaacattggtctgctcaccgacctcttcggcggcaagaagacgcagaaggttgcggctgactcggtctgcaaggccaaggagggctgctgtgtgcccaagtcggtctactactacaacggtggccacaacgtcgagtcgaccaacgagaacaagggcatcgacctttcgggtctcaaccttggcctcaacatcctctaaagggctgtaggcgctgccgcccagaggcactaaggataggatagtggctgttcggttcttcgagtccccacccgccagggttcgcgggacacggtagaaaccacccacacttttcttcctctccgagcgcttctgaggctctgccctcttccggcttcggctggaatgctctttcttctttctcttttcccctctctctctgatctttggaaccacactcccctacggaactctctttctggctagatttgtctcggctttccctctcctggaatgaacacacactcttttctctc

SEQ ID NO: 12222 - DNA, 1653 bp, Oryza sativa
  ref <308>: DATABASE ACCESSION NUMBER: AK109570
  ref <309>: DATABASE ENTRY DATE: 2002-08-28
agcttgccaaaacaaatgcatagttaaatttatcttcactccaacaccatctccattacactatccaatctaattgtagatcctacatatcagcatctctactatttcactccttcaaccccccccccccctctcctctctctcttctcccctcttctctgccgcaccatcagtggaatccacgcgtggacggcggtggtggaggccgcgcaggagcagggaggtggcgctagtcagcatcgccaccgccgtcctcgtcgtcacgggcataggagaacgatgagaacagactctgagtatgccagctggatgcttagacctttggtgaaataaaccagacaacagcattcaataaataacgcagctgtacaacaatggtcagtggctcggtgcatacaatacgaacttccgacacacctctgcatctacccctccacccctccgtcaaaaaaaaaaaaaaccaatcttagctacgaacatagacatatgcgtgttcaagttcgtagctagggtttgtcttttttgaggcggagtagtacatcacagcattgacaaagttaatgagattacagaggagcccttgcaggctaaggggacatagaggaaaggagtgaagaggccttttcatgtcaacacatgcctgaaatggatcaagaatccccttgaaagttctcatcttcacagctgaaaattaaaaccataagcaatctgtctgaggaggttttatcctacccattaatgccacagtgcatgtgtgttgtgttggattgggatacttctggtttaagaaattcggaggaaagccgaggcttcaaagacaaatggcagataggtttgcatgttaaccccccccccccccccctctctctccccaaaaaaaaaagggtcagccttcatcagttcaaatatttatcaccaaaatattgcttctttcactgcagtggccatctacaaatagcaaatctccatgaatcatcaataagataagaacatgatttagagtgtttcgaatgaaaacctgttattgaagcaattgttgtgttcaccagaagcaattcctatattcagctttgcaacaaacttagtgttatctctgggccttcgtatttcagcctatactccaaagagaaaagaaaggtttttaatacagtgacaaaaggatgattactaatatggttgccaactaacctggacagtcactttatcctgcgtgggcattgcagccgccattttatcaagaaatatcgaagtaagctgagagtaggaaatcaaacatgagtatgaactccaaatagttgggtcaagtaacagttatattaaagaccacaatgtttctcagactgaaggactttttctgcctgcagtgtcttccgttaaaaagaaaagagaaaaaaagatagtacaaaatatagcaattcaccaaccagaatggaggatagaaatgaggtgtggttgagagaagataggatcatagaacttgcagaaaaaaacaggtggggatacatggatggggattcctttttactatggaagagtaattctcagatgaaccagcaatagttggtgctaacatatttttttcacatgtttagcaatgcaattgaaaaccaaatagctcagcatcaggaaataaagttcttttttttgcctttc

SEQ ID NO: 12223 - DNA, 794 bp, Oryza sativa
  ref <308>: DATABASE ACCESSION NUMBER: AK109571
  ref <309>: DATABASE ENTRY DATE: 2002-08-28
acctctagcagagaacgatcatggctcggtttggggcggtaattcaccgcgtgtttctaccgctgttgctgctccttgtagttctcggtgcttgccatgtcacgccggcggcggcggcggcgggggcgcgcctctccgcgctcgcgaaggcgctcgtcgtcgaggcgtcgccccgtgccggccaagtcctgcacgccggcgaggacgccatcaccgtgacatggtcgctgaacgcgacggcggcggcggcggcggccggggcggatgccggctacaaggcggtgaaggtgaccctgtgctacgcgccggcgagccaggtgggccgcgggtggcgcaaggcccacgacgacctgagcaaggacaaggcgtgtcagttcaagatcgcccagcagccgtacgacggcgccggcaagttcgagtacacggtggcacgcgacgtcccgacggcgtcgtactacgtgcgcgcctacgcgctcgacgcgtcgggggcgcgggtggcctatggcgagacggcgccctcggccagcttcgccgtcgcgggcatcaccggcgtcaccgcgtccatcgaggtcgccgccggcgtgctctccgcgttctccgtcgccgcgctcgccgtcttcctcgtcctcgagaacaagaagaagaacaagtgattgtggtttgcttgtgttagtagtctgtacaattgtaatgtgtgactgtgtacgacagcacggagtgtgtctacagcgcccagcacacacacctccgtatgttcaacctacaaaaccaacggaataatagatggatctttg

SEQ ID NO: 12224 - DNA, 728 bp, Oryza sativa
  ref <308>: DATABASE ACCESSION NUMBER: AK109572
  ref <309>: DATABASE ENTRY DATE: 2002-08-28
gaagcctcgcacgagtgcaaagccgacagccagcaccaccgccaaaaacgcgaggcgagttggagttggagctggatccctctcgccattgctctctctctccagcctcattctcttcccctctcgtgctctctgctgcgagtgcggctgcggcgttgcatcgcatgctctttgtgaattgtgggtgagagagcggtggccggacgagctcgccggagaggaggaagaagaagaagacgacgagcttagctttgcaatgtgctgctacgtggggaaggcgaccaagatcttcctgtgcctcgcggcggcgctcatcgtagtgggcctcgtcctgggcttcgggctggcccaccggacgtggggcgagcggaaggtccagccggactgccggtggcccgactgccagctccagccggcctacggcggcggcggcggcggcggcgaccctctcccggccacctccggcgccggcgacacgccgcccggcgtcccgctgacggagccggccgtggccgcgttccccggcgtcgcctctgcttcgtcggccgcgccgccgacggcgagcatgccgtaccttgggccgcccagcccgttcgcagtgggcctcgccccggcccatgggtgaaagcaagtcgcttcggagtatattttttttcttcttttttttttctgttgtatttttcttcttctgaatttgaaatactatgatggctgtgaattgtttctac

SEQ ID NO: 12225 - DNA, 614 bp, Oryza sativa
  ref <308>: DATABASE ACCESSION NUMBER: AK109573
  ref <309>: DATABASE ENTRY DATE: 2002-08-28
tcggcgccgccggtcgcgtacccgcaggtcgtgcgcccgccgccggggcagatgccgccgcccatgcggccgccgcagatgccgatcccgttccagcgcccgccgggcgtgccaccggcgttccctggtggccctccgccgcctcctggcccgttcatgaggggaccaccgccgatgggcccgccgcaggtgaggcctgggatgcctggaggaccgccgccggggatgaggccagggatgccgcctccgcccttcaggcctgggatgccaccgccgcctcccggtccgcagcaacctggacaaaaccctccgcaatagctttgctggttgttcttgctataccaactatggaagattcaccggtgccacctttgcttcactgttctatctcatattggggttacaagtagttttcttgcggtatcagctcagagaagagatattaatccttttattatcagtggagcactcttgtttctatgcgaggggactgtacgtagatgttaagagttagggacttggatagcctgtttcatcgtgtgtcctgatagctgttgtactcgactactcgtcttgtgttttttgatatccagcataattaacttgagctcgtc

SEQ ID NO: 12226 - DNA, 568 bp, Oryza sativa
  ref <308>: DATABASE ACCESSION NUMBER: AK109574
  ref <309>: DATABASE ENTRY DATE: 2002-08-28
acacctcagtcgaagctcgaaaccatctgcatcctcctcgtctccacccgggcctccccagtccccttctcctcccggcgaggcggcggccgtcggcgaggccgcctccgcctccgacttcaggcagtgggaaggaaagaagagcttggaacggaggaggcgggagctgcctccgctccgactctccgagccatggggacctcagcccagggagccggacatccggaagcaaatcgatcgatgacgcttaaagagcttgagaagttgggtcgttaaaaagctagtgaccagtcagtcagtgaaggaagaggtgctaaaacctggtgatcgtgtcttgaaagataaatagggatctcggtaagtgtacctgatgataggaagtcatgttttgagcttcaatgcatgtgatgcagtgtttatatcagatgttgatatttgacaatgacatgaacaaattattttggtttccaagttctccttctcaatctgttgctcctgttttcattttgttgcagttcatatccttgtgcaattctaatacatgacatctgctattattgaggaaacc

SEQ ID NO: 12227 - DNA, 596 bp, Oryza sativa
  ref <308>: DATABASE ACCESSION NUMBER: AK109575
  ref <309>: DATABASE ENTRY DATE: 2002-08-28
aaaaaccctagcctctcttttctctctcgcgcacgaccgcgcgacgcgaaggtcgccgccgccggcgaccttcgcgtcgccgcgccttgcaccgccggcgtccgggcagcgcctcgccccgccgccatcttttctctttcccctcaccatctctagccctccacccctctaccgagtgaagtgagagagagagacggccgaacgagatggcagcgccaccgcgggccccctcgccggcacgtgcgtgcacccgctggtgcgcgcacggccgtcgaggggctccttgacgacgccctgtgccctcccccattccccctttgccggcgttgacgatggccagcgacgagggatgcaagatatcgaagatcgatggaaattgctgccgcctacaaggtgcaagaaatcatcacatccggcatttaagtgtgtgaaagactggttctgatttttttttttgctttgttgtgtttcttctctgtgccatagctagaagctagactgaaaacaactatggtatttttaggcttttttatcttagtgaattcatgtaaaaatatttagttatggttctatccagtttttgatggttgttcttg

SEQ ID NO: 12228 - DNA, 672 bp, Oryza sativa
  ref <308>: DATABASE ACCESSION NUMBER: AK109576
  ref <309>: DATABASE ENTRY DATE: 2002-08-28
atctcttgcatcgatcttaatttctcatcttttcgctctcgatctcctacagaagcaatagtagccagcaaatcaatcgatcgatccgtacaatggcggccctgaagatgaacaggatggccgtggcggcgctgttcctcgccgccgtggtggtggcgggcggcgctggcgctagcgcccacgtcggggttggggctggggctggggccgacgccggcgtcggcgccgccgtcggggctggcgctgacgccgccctcggggttggcgccggcgccgccggcgccgccggggctggagttggagctggaattggagccgccgccaacgtcgccgggtctctcaccggcgccgctgagggcgccgccggcgtggcacccaaggtgcatgtgtgagatcgatcgatcgatcgagcgcgccgcggcttccatctccacgactccatccgcccgcagcggctccggcgatccatatttttataaattcgcagtcgattgtttgttgttaatcaaagtttggttaatttatccgtcgagtgtttggttgtttatttcatatgcaaacctcgcgatttgtgataaataattaccgaaatgtatgtgtgtgtggggtgctaattcatccttcactccattaatttgttataaatatatatccttgtactagtgtaaatgt

SEQ ID NO: 12229 - DNA, 551 bp, Oryza sativa
  ref <308>: DATABASE ACCESSION NUMBER: AK109577
  ref <309>: DATABASE ENTRY DATE: 2002-08-28
ctccacccttctcaagcgctctctcgtaggttcgtcctgtgtttcccttcccccgccccccccccttcccatggcgagcaacccaagcagctccgcggcgggcggcggcggcgaccatggtggcgcgcgcctcgaagacctagcactggacaaggtggcggaggcggccgacgcggtcgccgccgcgtcgagcgccggcgaggtcgtccgcgcgatccacgccgtcgcggccatcgtcttccccgtcgactccgctaccgtagccggtaccgtggacgaacccttcaggagccagggtagccggtgatctctacaatgcaagtcatggatggaatccacaagtcaggcgtttggggtgttgaatgctggctgttttgctgaatgtcttcggtttattttcatctttgagctgctgtagttaacatggctgtcatgttttgggtcaggccccatgggcttgtgtgatgtttagtttcattacttgctctgaaccttttgtaagaatcttatcatttcgttaatgaaatgggagggtctccgctctctgtctc

SEQ ID NO: 12230 - DNA, 707 bp, Oryza sativa
  ref <308>: DATABASE ACCESSION NUMBER: AK109578
  ref <309>: DATABASE ENTRY DATE: 2002-08-28
gtgcttccctcctctcatggcggaccacatcgtcgacggcggcggcggcggcggctgttcctttggtgaattcctggagctcggccattccgtgtactcgctgccgcttccgccgccgccgtcgcagccggtggtggtcgccggcgggaacaatgatcagtatggcgtgtcgtcgtcgtcgtcggcggcggcgacgacgagcaggatcgggttcaggacgaggtcggaggtggaggtgctggacgacgggttcaagtggcgaaagtacgggaagaaggcggtgaagagcagcccgaacccgcggaactactaccggtgctcggcggcggggtgcggcgtcaagaagcgggtggagcgcgacggcgacgacccgcgctacgtcgtcaccacctacgacggcgtccacaaccacgcgacccccggctgcgtcggcggcggcggccacctcccgtaccctacttccgctgcgccgccgtggagcgttccggcggcggcggcctcgccgcctcccgcgcacgcgcaggcgtggggggcgccgctgcacgccgccgcggcggcgcactcgtcggaatcgtcgttctgaacgctgaatttacttctgtttttgtttttcttggttgcttgttagttgtaccgccgttcgtgatcgatcgatcggttcttgtatgcactagacttactacttaaaaaaaaaagagttaaatctt

SEQ ID NO: 12231 - DNA, 1204 bp, Oryza sativa
  ref <308>: DATABASE ACCESSION NUMBER: AK109579
  ref <309>: DATABASE ENTRY DATE: 2002-08-28
gtgtcgccttatccctcgccacgccgtgcgcgtggcgcgcccggaaggcgagagacatggcggcgatggcggcggcggcggtgccgagcgacagaccaccgcttccgtggcgcgcgcggctgctcgtgggcgccgtctccgttctgcactcggcgtcgctccgccgcgacggcaccgtcaaccgcttcctcctgtcgctgttcgaccgcgtcgtgccgcccaacccggcccccgacgccgccggcgtggcgtcctcggaccatgccgtgtccgacgacctccgcgtcaggatgttctttccgggggcagctgccagggatggcggcggcgatcatctgccggtggtggtatacttccacggcggcggcttcgtgttccactccgtggcgtccgcgcagttcgacgcgctgtgccgtcgcttcgcctcggccatcccggcggtcgtcgcgtccgtcgacttccgcctcgcgcccgagcacggtttcccggcgccctacgacgacggcaaggcggcactccgctgggtcctcgccggcgccggtggcgccctcccgtcaccgcccgccaccgtcttcgtggcgggcgacagcgcgggcggcaacgtcgcccaccacgtcgtcgcccgcacgccgagcagcgtgtccgggctcatcgcgctgcagccgttcttcgccggcgagacgccgaccgcctccgagcagcggctccgcgacgcgccgttcgggtcgccggagcggatatcctggctgtggcgcgcgttcctcccacccggcgccacgcgggaccacgaggcggccaacgtgcccgccgcgctccggcgcgacgccgagcggcgccgcgcgttcccgccgaccatggtctgcgtcggcgggtgggacgcgcaccaggacaggcagcgcgactacgccgacgccctccgcgccgcgggcggcgccgaggaggtcgtcgtcgccgagttccccgacgccatccacgcgttctacatcttcgacgacctcgccgacagcaagaggctgctcaccgaagtcaccgccttcgtcaaccgccgccgcctcctagtgctccacattcttgaacttgcagtagccgacattacagtttgcttcactgtatcgctagctcgtctccactcacacaatttctcatttgatttgatttgatttgattcatacgatgaattcaacgagacgagctgttcatgatc

SEQ ID NO: 12232 - DNA, 1503 bp, Oryza sativa
  ref <308>: DATABASE ACCESSION NUMBER: AK109580
  ref <309>: DATABASE ENTRY DATE: 2002-08-28
gtatcaaccgccgccgccgccgatatccgtcgtcctagcgtcgccttaatcctccttcctccccatcccccagcgcccgcatccccctccccctgctgacagctgctccacatcggcgcccaaaccctaacctcgccaccagccgatctgccacatacgccgccacaaatcgccattgccaccgattcctccagatcaggcgccgccgccatcatcgccctaccgccgtcgtcgctgtcccgctggccgctgctcgcgcccctccgcccatcctttcccctccccccaccaccggcgaaaccctagaaccacgccagtcaggacggaatcgaatccgatccccatctcgcgagtcgtgagcagagcaggggaggtgaggggcgtcgtcgttccatcgcgtcgcatcgccccattcgacgccgccgagatcgccgtcacccgaatcctgcgacgccgccgaacccttctcgcgtcatcgtccccttccgccgccgccgcgcactgaaccagaggcgaggtcttccccagccaccgccggagcttccccatccgccgcggctggagtcgacgtcgtccccatccgccgccgctggaggcgaggtcttccccatccgtccccagtcgcggccggagccgacgtcgtccccatccgctgccgccggagacgaggtcttccccatccaccgccgccgccacagttcaccgctacccacgaggtcgtccccttccgccgccgtcgcgcactgaaccggaggcgaggtctttcccattcgctgcctcctccgccgcactcatcgcctgtcttcatcgtgcgcatccctgccgtgcgccatgtttagttgtcttcaccctcgacgccccggagccggacgcccactgcccaactccacgccaccggacaacctccatccctgccgtcctcctctccatcgtgtgcaacttcttcgttatctacacgcccgaggagagatgactcctaccgcggaggttgatgcacaccccccgccttctttctgttgtgccagtattctcatcgaggatagcggtggattgtgttgggcgagggtagtaggacgacagaggggcggaggcagctcggggtggcgggcagtagcggaggccgcttggggcgccgaggacagcagtagatggcggcaagcaagggcggggtacggaggcagctcagggtgggcaagatggtggcgggaggtggcgaaggctgctcggggcgggcagatggcggcggggtggcggcgtggctgaggcaacaatggggcggcatgtgagcgccgtcgggatggtgcagcactgccggcacatgcctcatcctcgtcgtcggcatccgtgcgtgcgagagagaggtttgagaggggagagagagaggagagagatctgatgggtgggccccatcgattagttgataaaagaattgttgactgaactaccacgtaggaccaaaaccgctctcaaagctatttaagggagttttcatcctgtattgat

SEQ ID NO: 12233 - DNA, 1005 bp, Oryza sativa
  ref <308>: DATABASE ACCESSION NUMBER: AK109581
  ref <309>: DATABASE ENTRY DATE: 2002-08-28
ctctctctccctccccctcccctgttcattatcttctctcacggccgttggcgggcggcggcggcggcggcgcagagctacgagggcggtggcggcgcggagctgcgaaatcgacgactacggcggcagcggctgcgtggagctgtaagggcggcggctgcggcggcggcgtggagctgcgagggcagtggcggcggggagctggtgcgagggcggcagctgcggcatcggcggcgcggagctgcgaaatcgacagctacggcggcagcgtagagctgcgagggcggctgcggttgcgtggagctgcgagggcggcggctgcggtggcggcgtggagccgcgagggcggtggcggcggggagttggtgcgagggcggcgacgctgcgaatcacgagcttgttgcctcgctcagaagtggccgacctcgccggagccatacgcgcggggaggagtcatccctatgcgctcgcgccgccaccgcttggtcgaggacgaggtcgagctcaagctctacatccgccgccgcctcgtcgagcttgagttcctcatccccaagcagctcgagttccaccggcgagctcgaacatggagaagatggagttatggagctcctggagccggcagaagaggtagacctttgagctcgtgctcgccggcggtcggcacggaagggaaggctggggatgtgcttgagctccgtcgccgcaacgagtcccctgctccacggccaccgatctcctgctcagctccaccgctgctctctgtctgggaggaagaaggatagagaaagaaagggaagaggagatgggggaagaagtggccactaacgtgtggctctaatttttatttttagttttatttgctgagtagacttccacatcattgccacatagatgaaaaccagctgaaaaaccacttgagggtgtaaagtgaacggtattgaaagttggagggggtgaaatatctggttttaaagttttgggtgtattttagacaagacaaat

SEQ ID NO: 12234 - DNA, 1644 bp, Oryza sativa
  ref <308>: DATABASE ACCESSION NUMBER: AK109582
  ref <309>: DATABASE ENTRY DATE: 2002-08-28
attgtaccgctctactgtccactctccatctcttcttcttcttctgaatttgatttcatccattgaggatgagtggtgatcaaggattcatggcgtttaggcggattcgaggcgacgaacaagaggaggatagggatgatggtgggtggcctgaggccaagaggaagagacagacggtgccatctttcatatcagttatgagaggagcaatggctgccgaaaagattcagaaactcggcctggatctggaaccattttttcggaaggcggttcaggaggaactggaaagaagcctttctaaacatggacacctactgtacagatctcctccaatgcttgtcaactccgtcgattcttcgctgaagctcgccttcgcgaagcggctccagctcccaatcttcaccaacaacaagctcgtcgacgtcgacaacaaccctctccaagtccacctccttcacatgagctccaccaccacctctcatcatcatctccccatgatcaagaagctggaggtgctagtcctggatggagatttcagtcatggtgatgagggatggagcagcgacgagttcagcggcgccatcgtgagggagagggaaggcaggaggccactgctcgtcggcacgctcaatgtggccatggccgatgatcatcttggcgttgcattcattgatgacgtggcgttcaccgacaactcgagctggaccaggagcaggaggttcaggatcggcgtgcgcgccgtggcggtggcgggtagcggcgatggcggcgagctgaggatccgggaggcggtgagcgagagcttcatggtgaaagatcaccggggagaatcgtacaagaagcatttccctccgaggccagatgatgaggtgtggaggctgaagaacatacggaaagatgggccaatccacaagaggctggaatctgaacgtgtcaggaatgtgcagggttttctgaacctgcatgccaccaatcctgaaaagctcaggaagctcgttgtcatgtccgatcggctctggaaggcaacactgcaccacgcgaaaacatgcgattttagagctgcagaaatgatgcaagtgaagcaatcttcaatcgaggcataccagaattgggatcagctggacgaagctgagactaacaagacagcctcaggcaatcttggtcaggcacatgaaggatcactacaggcagatgagataggcaccgtatcagggcctcatttccagagcagaaaccagatggattctgaagattcattgtctgctgctgctgtaactgaagatgcagatgatgcactgtggagcccttgcatgacaagtgatggccatggcttgatcatgtggaaaaacaacacttcagtgtgggaccaaacgaactaagttcagcacaacctgattaattagatctccaattgtttgtgattttccctaatcatggagaaggcacaaatctgtacatattgacaccactttttttgcagcaacatgctgtttctttttccctgtgcactaagataccatgatatggtgatagtatgatataaagtaccttttttctattttggactggatagatatgtaatactactctccatgcatgataaattataatgctgcgtatagatagttagtaatctttactacc

SEQ ID NO: 12235 - DNA, 1482 bp, Oryza sativa
  ref <308>: DATABASE ACCESSION NUMBER: AK109583
  ref <309>: DATABASE ENTRY DATE: 2002-08-28
tcgattggtaagtgtttctttttatttgtgtgtgtgtgagtgactggcgaagtaaatattgcacttccttggttacagaatgtttgcttgtgtagatgatgacttgctggcgaatgtgccaaaaataagtcggcaagagcttgcagaagcctgtgaagacttcagcaatatcattggatctactcatgacacggtggtgtacaaaggaactatgaaggatggcagtgaaattgctgttgtgtcactatcagcttcagtacattactggacgagttacgttgagctgtacttccagaaggaggtggtagaaatggccagattgagtcatgaaaatgttgcgaagatggtgggatacagcaaggagtccgatccattttcgagaatgctagtctttcagtacccaccaaatgggacactctatgagcatcttcatgatggagaaggatatcagctatcttggcccaggcggatgaaaatagcactcagcattgctcgcgccctcagatacctgcacactgagatgcagcctccatttgcagttgctgcactgacatcaagttcagtttatctaactgaagatttctccccaaaggtccgtctcatctgcttgtgccttgtgacatggcaatgaacatggtgtcctagattcggtgcagtcacacacaaattgtcctgttcatgtaacagcttttttttagataatggattagattaaacccagcctctacacctttgtggggtgtacacagctaaatgtaacagctgaaatggtttatgcgtttgcagataattgattttgagagatggagagctctcctgacaaaaccagggctcagctctggcagcatagtgaacgggtcattcaacaacatcatagactcgcggcacaggcgtttcatggacatccaggccaacacgtttgctttcggggtgattctgctggagctgataagtggaagagccccagtttccaaagatacaggagatcttgtggactgggcaaggaagcacttggaccagaccgaagaattcatcaagctggtcgacccgaagctgatgaacgccaaccatgagaacctgggcatcgtctgcaacgtggtgaacctctgcatcgacgccgagccgtgccggagaccgtcgatgaacatgatcaccgccattctggaggaaggcatcgacacgtcgccggcgaccgtccttcgggactcctccctggcatgggcggaggcagagattgccatctcgtagtcgtagacggacatgcaatttgctgctactcggacagtaactacagagacgcacacagtggttttgccacaaagggctttttaacctttttttttctttttgattcgtggctactgctttacgtttcctcggtgcctttttgcctctccctctcccagatcacatgaaaaatgtgtggatattttgtgagcggatttgatgtgtgatatgtcatatgtgatctacccaggattt

SEQ ID NO: 12236 - DNA, 1456 bp, Oryza sativa
  ref <308>: DATABASE ACCESSION NUMBER: AK109584
  ref <309>: DATABASE ENTRY DATE: 2002-08-28
acacacacacacagcaaggtcgcggcgggcgtcggcgacaccgaggaggcacgcggtggcggtggccgagggcggcgcggcgtgaggcgggcggtgggggcgacgaatctggcaccgtgcggcggcaggctagggtttgggatattttagatttttatttttttgtttgctgaatttattttcacatgcggccggtataagcaaccgcatgcgaaaataggattttcgcatgcggttgggccggccgcatgcgaaaagggtgatttttgcagacccttctcccccatgcggttgccccaaccgcatacaaagatgccttttgcccgtatgcaaaaagcctttctgtactagtgtatttagaaccagatggagctagcacaaggtagtaagggtgtgtttagttcacgctaaaattaaaagtttgattgaaattagaacgatgtgacggaaaagttgaaagtttggccgagtttaggccctgtttagttccaaagttttttttttccaaacttcctactttccatcacatcaaacctttcatacacacaacttttcagtcacatcgtctcctatttcaatcaaattctaaactttgggccgaactaaacacaaccttagttccaaactttttattcaaacttccaactttttttatcacatcaaaacttttatacacacataaacttccaacttttccgtcacatcgttctaatttcaaccaaactttcaattctggtgtgaactaaacgtaccctttatgtgtgtaagaatgttttgatgtgatggaaaagttaaaagtttgaagaaaaatttagtatctacaccaggcctacctaaatagtggccatcattcagtacatcgccgtctacacgtctagttgcattgtgatcaagtcaactaactctgtcccatattacttgtcttatatgatactaactctgtcccatattacttgtctttttgagttttttttatcaatgtttgatcattcgtctcattcaaaaaattttggaattattatttattttgtttgtcatttgctttattatcaaaagtactttacatatgacttatctttttttatatttgtactaatttttcaaataaaatgaatggtcaaacattacaaataaaaagtcgaaaaggtcatctattatgagacggagggagtacaagagcttctacgaaagcagtaagctaggtattattataggctaatagctgtggataacccttacggcggcgtgcaaagtaaggtggtcaggtcaagcttctcgcctggtcaggtctccatgcatgcatgcctgacgtacaaaatacaccatgtgtactatcctagtcatgtctatgtcgtatttatacgtatgtgttcatttcagtatatatatccaaaactagctagctagttgtgtgtatatatatcgatcagcttccaacaaaggcctacatgatgat

SEQ ID NO: 12237 - DNA, 1586 bp, Oryza sativa
  ref <308>: DATABASE ACCESSION NUMBER: AK109585
  ref <309>: DATABASE ENTRY DATE: 2002-08-28
atgaccaccaccaccgcagcaacgctcgtcgacggccatggacgacgacggcgagacgccgatgccgtcgctcgagctccacaagcttcccaccctcgccggcgccgccatcccgaacccgatcgcgcgccacccgctgtaccacccgtcgccgagcttcttcatctcccccaccgacgtcgtcctccgcgacatcctcttcgacgcctcgccggcgtcggccgccggtgagcggcggcggcggcatgtcgcggcgtaccaccgcgcgggccctcgccgcgaggtcgcgttcgacccagcgacggtgcgcgcggccatcttcacctgcggcgggctctgccccgggacgaacaccgtcgtgcgagagctcgtcgtcgggctgtccgagctctacggcgtgcgcggcggcgtgttcggcgtgcggaacgggtaccgcggcttctactccgacgaggtcgtcccgctcgacccggcggcggtggagcactggcacaaggccggcggggcggcgctcggcacgtcgcgcggcgggttcgacctcgccaggatcgtggacgccatcgagcggcacgggttcaaccaggtgtacgccgtcggcggcgacggcacgatgcgcggcgcggcgaggatccaccgcgaggtccggcggcgggggcggctcgccgtggcggtggcggggatcccgaagacggtggacaacgacgtcggcgtcgtcgaccggtcgttcgggttccacacggcggtggaggcggcgcagcaggcgatcgccgccgggcacgtggaggccgagagcgcggcgaacggcgtcggcctcgtcaagctcatgggccggagcgccggccacatcgcgctccacgccacgctcagcagccgcgacgtcgactgctgcctcatcccggaggaggacttctacctccgcggcgccggcggcctcttcgacttcctctaccgccgcatcaaggacaacggccacgccgtcgtcgtcgtcgccgagggcgccggccaacgtctcatcccaagaaccaccaccacctcggcctccggcgcctgcgccggcgccgacgagtcggggaacgagacgttcctggacgtgggggcgtggctgaaggcggagatgagggcgtggtgggaggaggagcacgccggcgaggtgttcacggtgaagtacatcgacccgacgtacatgatccgcgccgtgccggcgaacgccggcgacaacctgtactgcacgctgctggcgcacgcggcgatccacggcgccatggccgggtacaccggcttcgtctccggcacgatcaacggcaactacgcctacatccccatggacgaggtggccgaggcgaagaaccccgtggacaccaaggaccacaagtgggcttgggtcaggtccatcaccaatcagcccgactttatccgggccggtccgacgagctagcccaacagcccaccgtatctacttaatctttttggtttgggttgaaccagtcaataattagcactcaatatgtatactatcttatatattattccttccgataaaaaaaattccaatctatggttaaaatgggatataatttaatacaacg

SEQ ID NO: 12238 - DNA, 1379 bp, Oryza sativa
  ref <308>: DATABASE ACCESSION NUMBER: AK109586
  ref <309>: DATABASE ENTRY DATE: 2002-08-28
tttcagtaaatatgagatctcgagtctcgattctactctgtctccaatctacgcagcgaaagccggcgccgccgtctcctcgagcgcgccgacggcggagaagaccgcaggcacggcggtgtctacggcctcctccccttccttccagacccccgccacggccgcgccgcgccccgccctagcctccgccgccgcctccccagtccggccgcctggcctctccacgcgcgcacggccggggcgagcaggtcttttgggggtgggcgacgccgcccgtgccgcggcctcctcccacctgaatccatcccagctcgcgccgaattcggaggtgtcccgtacaattccttctggatttccatcattccatgatgcctggtggattgtagctgctcgtgtttccacgaaagaaggtttgggggtttatctccgaatccttcttctgggagggatactctaattggtccggtttgctgcggaaatctgtggagctcgggtagatgctccgtgttagtttcgccacagcgcactgcaaattctagtggagtgaagaggaatatggtagaggggttgccggcggagttgccaatcgtggacgtggccgctcgtttggatggcaagagctcggagctgccagagaatggtgcattgctgaagggtgctgaggaatcccaggatttgggaggtaatcccgtggcggtgttgacgttgcacgaaggcaaagaggtgatcctcgtcgatgacaatgatagtgagcaggaagacggtgggagtggcaaggtggatgagaatgcgccccgggtcggattgagattcaaaacttatgatgacgcgctgaagtactataagcaatatgccgcggattctggcttttcagcaatcattctgaagtcgtcctacttgaagtcaggggtgtgccggaggttggtgcttggatgcagtcgagctggaagagggagggcaaacgcatgctatctgtctagagaatcaacgaagataaattgtccagctaggatttcgttgaagctaaggcaagatagatggcttcacattgatgacgctaagcttgatcacaaccatccaccgaaccaatcctcggtgtcacatatgaactgttataagaaattgacagatgccaagaatgaggaaactgcttcaagatcaaaagggcgtaggaatgttcccataggtgacaaagagcaagggagctttactgagataggaaggcttaaatttggggaaggagatgatgagtacatccacaagttttttgggagcatgcagaacaagaatccaaatttcttctacttagtagatttggacaaacaagggcgcctaaggaacttgttctggagtcacggatgttaataaattgttctcct

SEQ ID NO: 12239 - DNA, 838 bp, Oryza sativa
  ref <308>: DATABASE ACCESSION NUMBER: AK109587
  ref <309>: DATABASE ENTRY DATE: 2002-08-28
atgatgaaaaatagaaaaacaatccctcctaccaactctgtcttgtcttccttcctcctccgcttcccttctgttcttcccatcttccaagcaatcgatcggtccctcaactccggtgagcttcgccaacggatttgggtcgtgacacggcgctccacgggaagccacttgagcaccttcctgcccagcggctcgccgcgacgccgccgctgagtcaccgatgcggcaggggactgcgacgcggacgcactacctccggacctccctgctgcccccgaagagaaggcccgacctcgcctcctccagccatcgatggagggcaggccggtgatgcggctgctgcggcgtggatcggggatgtggctgcggcattgaggaggggggagggtcgccgccgccggccgtctccgtgcccgccgcgtgccgagctcctcggtagggcggcggatccggccctcccaaggacggcgccgccggatccgccgccacaggccgtcgccgagcccgccgcccgccgccgtcggggaagggaggccaccgccgcgcatgggaggtcggggaacgaaggccgccgccggtgccgagcgggtcgccgccgagcccgccacgccgcacagctcccgtcggtgagagagagaggagaggaggaaagagtgagaggctgataggagaggataggataggataaggacggtggaagttaaaatatcaggagaggaggggagatagaagaggagaggaaaaaaattgaatggaggagggaaaaaaataatttcaaaatattaaaatttctaatcgaattttatcatactaaataaacttatgtgaaaaagttgtc

SEQ ID NO: 12240 - DNA, 1612 bp, Oryza sativa
  ref <308>: DATABASE ACCESSION NUMBER: AK109588
  ref <309>: DATABASE ENTRY DATE: 2002-08-28
aggccaagctaccggtgctgccggcggcggcggcggcggcgggcgccggaagcacgaacggcgaacggctaaggcacctgcctctcgggactcggggaccagcggcagaatcttctccgggcggcccttttctcttgccccagtggcctctgctgcaaactccgcacaaatgccgcgccccgctgagcctcccagttctcgccgccggcgatatgtgtaggtatcgtcacagaatttagtgctacatctgtatgatcagaagaactgacaaccaatgacaagtagcggaagtttccaatggtttcatgcaaatattgagtatttattctcaagaaatctcctccagaaacaaaatgtaccagatcatggataagatcatgtgtgacaaagcattccagtttttcatcagattctgctcgttgaatcattgccctctgaattaaatcatcgaagtacatcctgccaatgttttcatggcgcccagtacaatattgcttgaggagtcccaaacacatccagagatttatcatgtcttctttccagaaatagtaccccttagggagcagtgaaaggaaaacaaagcagcgcttcaattgtactggcattcgatcatagctgagttttagtgctggcagcactcgatcctcttccgcagattgctcatgtattattgagagaaacaaattgcttgggagcttatctttttatacaagaaactttgagaggaggcctctgcaatttggaagctttatttcatcaaagaagaaacacagactattttttctgataaaccaaatgtagcattggttatagctaggataaggggataatattaccttcttgtcacctttgcgcttgcgcttgcgacttctgctgctctgcctttgattgctttggtcctccatcctccgtcgaagcaactcatacctgtattcatcgacagcatcctgggcatcatatgcaagctgctgcagctcccacaggcgaagtctctcggcttcatctcttatattgtgttcatccatcgcatcgagggtccgctgaatccttgccatcgtcctctgcagatctcttagatctctgaacgaagcactttgctcgtcagatgatgatgaaacgatttgaggagaaaccaaggaagaaagcttgtttgttgtccactttatgattccagatgctagtagtccagccatctcttctcaactgctctttctgatccaaagacagagttagaccaagctgagagatgaatcagattaacaaggcaagaggaacatatagaagttcagggtgttgaccttgtggacaagtgcaatgcaatttttaatgcacaagctgtggtttccaacctccttacaacaagaggcatatattggttttcaaccaattcctgttattatgtttccaacctccttacaacaagaggcatatattggttttcaaccaattcctgttattatagtgtcaaaactgcataactgcgcacacagtaccactagctgaaatgcattatctgctcttttttttttgcggggaaatgcattgtctgcgtggacacatcatttcagaatatcaatgtaatgctcagaactattcttgtatggtgacatgc

SEQ ID NO: 12241 - DNA, 2544 bp, Oryza sativa
  ref <308>: DATABASE ACCESSION NUMBER: AK109589
  ref <309>: DATABASE ENTRY DATE: 2002-08-28
atgaagtcctccctccctttctttcggaggtgctgacccgctgcaaggcagatatgactaagtgacatattgaatatggcgacgactacagcatgtcgtagaaggagataagaggtggagccaacgacccactaagactcacgtatctacaactacattcccgagcggcagtcaaacggaggcgtgaatgcaagatgccagcggaatgatcgaccggacagaggctagggcagctttcttcccaccgcgtccttccttgtgtgtcggagatacaaagcgagtgcaccggaaaagaaggggaactgagtcgatctattccatggcgaagcatccgaagcataactgcacactcacacgatctttgccgagagataggagcattcggtggaaccggtgaactacacttgcttcttgatagatgtgtgggacagagggctcgtggtacctgctgcccacccttcctccgctttgataaccgtgtgaacggagagtgggcagagcaaaagggaaggaggtcctcatacggagtcgcacacttgagcagtgcgggagactggagaatgggtcgagtaaactcccttagggccgattaaatcacagacgaggaacttttcttgatttttgctttttgatttgaagggtatgttctaaaaaaagaaaggcagaggtaaatacttcgaagaggcggctcggtagggatggaatggtcaatcgtcaagtcaaggatgacttctttgttggcgaaacgatgggggggagaaagcacgccagtgattctccgagccggtcttcatttccaacgcctcgggaaacaggtcgagatagatgacagcacctttttatcctcttccttaccgggaaggcgcacttctcttcttcttctggccttcacctcctgcccggcccggaaatagaacccctttctgatccattcatttctgcaagcaggcgggatccagagctaagccccctcctattcgaagccgggtgtggcctcgcccttttgctcttccttcggtttggctccacgaaggcgccgcctagactaggagccccactcatattcaaaaggcgcccagctttaaagacgatgataataagtagttaggctgccatttttccaatatcatggaatagcatggcccggggctaaggtaactccagtgggagagccgtgttatgggtgaccttattgcacggttcagagagcacttgtgtatgtgatgcaagtgaacgtgtacgaaaaagctgtcgtaaagtttcgttgttcgttccgtagttgaccctatctatgtttctatgatggcccaagaacacgcttattctttagccgtagagagacttttgaattgtgaggtaccattacgagctcaatatatacgagtgttattctgtgaaataactcgaattttaaatcatttacttgctttaactactcatgctatggatgtgggagcattaactccgttcctttgggcttttgaggagcgggagaaattgttggaattctatgaaagagtctcgggagccaggatgcatgccagtttcatacgacctggtggagtggcacaagatctgcctcttggcttatgtcgagatattgattccttcacacaacaatttgcttctcgtatcgacgaattagaagagatgttaaccggcaaccgtatctggaaacaacgattagtggatattggtactgtcactgcacagcaagcaaaggattggggattcagtggtgtaatgttaagaggttctggggtatgctgggatttgcgaagagcagcaccttacgatgtttatgaccaattggattttgacgtaccagtaggtaccagaggagattgctatgatcgttactgtatccgtatcgaagagatgcgacaaagtgttcggatcattgtgcaatgtcttaatcaaatgcctagtggcatgatcaaagccgatgatcgtaagctatgtcctccatcacgatctcgaatgaaactatccatggaatcgtgcgccgtgtgaaacgtagatcatcgccgttcttaaccgagactcaggttaagctccgtctcggaaccgtcgtggggttaggagtaaagcatcccgaggttggcgcatctcgttgggcgtggagaagcattgggaaccccaatatctttcttcggagcagtttcttttcccgtcccctcgccccggcatagcgcttcgcttccggttcttcggaagaatcaactgacttctcccttcttcattgctccgggggaaagggaaccgtctaccagttgggaagctagacatcaaggttgtggcttgatgaggataactaagctgacacgccggagttggctgctggcacaacagggtggtgccttaccgcaccgcaggcgcacgcgcggtagcgttcgtggtggtgcttcaggattccaatgtactgcgtccaagatcagaacgagcttgccggcggaccactgccgtcccattctttagtgagctggagcgctgccatcttatccacggaaaacgcgtcaagctatcgcttcgggtcgaagcact

SEQ ID NO: 12242 - DNA, 2217 bp, Oryza sativa
  ref <308>: DATABASE ACCESSION NUMBER: AK109590
  ref <309>: DATABASE ENTRY DATE: 2002-08-28
cggcgtgatggacctgcctcgtccaatggagggcctcggcgaggccgggccgccgccgttcttgtgcaagacgtacgaggtcgtggacgaccccggcacggacaccgtcatctcgtgggggttcgccggcaacagcttcgtcgtctgggacgccaatgcgttcgccgccgtgctcctcccgcgctacttcaagcacagcaacttctccagcttcgtccgccagctcaacacctacgaaggtcgatccggatagatgggagttcgcgaacgaggggttcttgcgggggaagaaggagctcctgaagacgatcaagcgacgccggccgccgccgtcgagccccccgtcgtcttcgtcgtcgtcgtcgtcgtcgcagcaccagcagcagccggcggcggcgtgcctggaggtggggcagttcgggcgcgacggcgtggtgaaccggctgcagcgcgacaagagcgtcctgatcgcggaggtggtgaagctgcggcaggagcagcagacgacgcgcgcgcagatgcaggcgatggaggagcgcatctcggcggcggagcagaagcagcagcagatgacggtgttcctggcgcgcgccatgaagaacccgggcttcctccagatgctcgtcgaccggcaggccggccagcacggcgcccggaacagggtgctcgaggacgccctctccaagaagcgccgccgccccatcgagtacctcctcacccgcaacggcgagacctgcgccgccggcgagtcggcagctatgctggcggcggacggcgtggcggagccggacggcgacaccaccccgcgcggcgacggcggcggcggcggcggcggcgacaccgagagcttctggatgcagctgctcagcctcggcctggaggagaagcagcgagaggacggcgtcgccggcggcgtccaggagagtaacagcggcggcgctgacgtggacaacgacgaggaggatgacgacgatgacgtggacgtgctcgtgcagagcatatatcacctcagccccaagtgaaaggtcgagaaggttccacggcgaaaacgaagggtacgtttcgtttcgtagggtgacgtaatcgcaacagtagcgagtagtaggaatgtaggggtagcactgcacttgtctttctttccatttttttatagtttcggacatcttgtcgccgccctgcaagttgccaaaaaaagcagccaagccccactgccacaggcgacggaaggttcaagaagtcgagaagcttctcccgcgggggaagcttctagaggtgtccagtaagacagcacagtagctgcgggtgttcaagaagctgggaagcttctagatgtcctctaggacggtggcttcgaatgttcttcttctggaatttgcacctagtatcagctaattatgtgcgctgtattttgcccatgctactgccatatgcaactggtgcctcttatcccccaacagctactgctgcccttttaaaatttgaaagttacggagtaatttcagctgatttttaagtttcttcattagtagtttactttctgtattggttgtcaaatcttaaataaagttctacttataaatatcttggctatactagttcattttccccttgtcttttgtcatggaaggctgcctgttttgtcgtgtggtgacagttctgaacttttcatctatactggagtgctacgtggagtatatacatacaaagtgctccattttgtttgagccgtgccgtgagcgcgtgtccttgaccagggaaaaaaaatgttttgctttcaggttgcagaggacaagaggatgtcggtgccaaagatattttcaaacatactaaccgaaaagggcaccaaaatatcatcatctgaagatcttaacagtatcaagaaagtggttcccagctcatcaaatctaggagtactacgtggtaggagtatcaggctccacctgtacctggtgtcttaattaaggaaaaaagaacagagaaacgctcggagagatgattcagaagcttgacagcgagtatttcaggagtacgggtgtcgcttgctgcgagatttcacaacaggagactgtctgtcacggcgttgctgtaccacctctttaaaatggatcgtgggacaggacagttgacacgtagagtaacactcgtactacccgtttccgctaaatgtcaaaatcttgtacggagtactatctggattaaaattaaagtttatctatg

SEQ ID NO: 12243 - DNA, 1312 bp, Oryza sativa
  ref <308>: DATABASE ACCESSION NUMBER: AK109591
  ref <309>: DATABASE ENTRY DATE: 2002-08-28
atcactttgccgccgccgccgccgtttcctcctcctccctttccgagagagatggggcggcgcgcgcgctgcctctgcctcctcctcctcctcctcctcgtcgtaggtggcggtttccacgtggccaacgcgcaggcgtcgccggcgccgccacagacgggcacgagggcggtcaaccgcgccgtgtccaccgtcatcaccgtcgtcatcggcgtcttcttcgtcctcgtcttcgtatgcgtcatcgtcaaccagtgctgcgactgcgactcctccgctggcgctggggctgggcaagggcagtcgtcggctgctcggcgccgccgcgggctcgacccggcggcggtggcggcgatcccggtcgtgccgtacgcggaggtcaggaagcacaggagcggcggcggcggcgcgctggagtgcgccgtgtgcctcaccgtgttcgacgacggggacgacctccgcctcctcccgcagtgctcccacgcgttccaccccgactgcatcgacccctggctcgagggccacgtcacctgcccgctgtgccgcgccaacctcgagaagcagccagcgccgtcgccgcctgccgtggagttctcctcctcgcctgctgcggccgcggcggcggcggaggagtcgcgtacgcccgaggccgcggcggtgcgggttgaggaggtggcggaggcgagcgacgaagaggagacgaggaggagggaggaggaggccgtggagctggagagtctgcgcgccgtgcggcgggcggcgaggatgccgaggtcgaactcgacggggcactcgctgtgcgcgctgccggcgccgcgcgcgccggggccgggcgacggcggtgaccacgagaggttcacggtgcggctgccgccgcacgtccgggaggaggtgctcaagtcgaggcgcctccggcacgccacgagcctcgtcctcggcatcaggggatcgagccgcgagggcagctcgaggggcggcggcgggagctggcacggcgcgcggcggtggccgtccttcctggcaaggacggtgtcgtgggcgcgcggcggcgtgggagcggacaccagcgcgaaggagacgccatgccgtgatgcggtctgatccgtgcaaagccggcgagattttgtgaaaaaaaatttctctttttatgtagaggaattaatttaatttgttcgcgtgcgaaggctgaaaaaccttgtacatacaccaggttgtttgccatttgaaattattataattttgcttattagtagtaatcgcgtgcacgtaatgtacaaaccgtggcaaatatatttgaaatttcgtttgtttt

SEQ ID NO: 12244 - DNA, 2719 bp, Oryza sativa
  ref <308>: DATABASE ACCESSION NUMBER: AK109592
  ref <309>: DATABASE ENTRY DATE: 2002-08-28
caaatgattaaatgatgacgatgagacaatatgttaatcgcaaaattccacctttggtcactgtctgtgttagggctggaggactctccggtggattcctccttatcggctccgttgaccgccttcttgtgagcaagaaggaagccgcttcccttaccgagctcccctataagcaagcaaatccgccatggtaaacattagcaacactgcatctggcgcggcaacaggtgaaacgtcgttcggtcggatacaccaggtcctaccggaatcgggaggcgactcgccggtcgcgttggcggcggtctgagaagcgctgaaaggattgccaatgggggtcggcgccgcggcggcgcgcgacttgaagtctagcagctgcagccccatgaggcggcggctgtggagctcgatcgcctgctgcagctcggcggcctgctgctgctcctccagcttcctcctcagcagcatctcattcgcgctgttggagtgctgcagcattctcgcacctgacaccattacaaacagactcatgcgatttcagcaacaatcattcacccaatcaccatgaagaagatgatcgcaaaagctcaccgagctggtgcatgtcgaaggggtctctggcatcgagtccagttggagtagtgcagctggagaagtccaccctctcgcccggctggtgctgcttcctgcaaagtaacagcaagttacaaattggttataggggatcaacctagagaggcaatgtggactgtaagtaagctcggcttgcctgtacttgtcggggaccttgcccttctccttgtatggcttgacgagcacgcgggcgtcgcagatgaagtgcgggttgcccttggcgagaatcagcttcaccgtctccgggtagacgaaggtgacgaagccgaacatgcgcttctgctggtacgggatgcgaacgtcgtggacggggccgtagatgcttcaattgagagggcatcatcagattaaagctatggcatggcggtgacggtgggcggtgggattatagtatactacctgaagtagttggagacgtcctcctcgcggaaggtgctatccgccgggaaggtgaggtaaatctggcgcgagccggggttcatcatgctcgcgaagtcggcgcgctccagccgcggccgccccatgaacttgtgcgcctcgtcgccgcctagcatcagcgccgccgctgccgccgccctgcaaatcgacggaatcggagctaagttaaagggatactggtactccaggaggagctcggaggtggaaaaagttggcacctctggctctcgttctgctgctgctgctgctggaggagcaagctcaaacacttggtggctgcggatggcgagccggggagtgagccggtgggcgagtaggggaaggcggcggcggcgaggcgctgggacttggagcggatgaggaagtcctgacactgctgctccacggcggaggggtccatcttgccggcggcgtcgtcggggaggccgccgtggacgaaccggcaagcgctgccgttcttgcagtagccgcgcgcgtagtagaggcacggcttccagccgaggccgtcggcgccgccgaggcagagctcgctgaccgacgcgctccggcggtgtccggggccaccgttcgcccaccctaggttgtaggagaaaaggccgccgtcgcctccgccggggctccggcactcgccgccgtcgaacatgggcatctggtgccccgcggggacgccgccctcgttgaggaacgcgagctggtcctgcagctggagctcgtccatgagcgggtcgccgccgaagaagggcgatggcgggcccccgccgttggccgggctgatgagctcgtcgccgaggccgaccatctcctccccggcgccattgctgatgctgttgttcctcgaaaacaccgggggaggcgcccacgaggagggggaggacaccgagagcggcgagggcgcggtgccgcagcgcccggagttctgccgcgagagcatgaagggcgagtgggcggcggccgcggccgccgccacggaggtgggcgtcccgggcccggacgccgggaggaggccgagctccttcctggccttggccatgacggtgtggagcagcgcctcggggccgaaagcgaggcgtatcatctccttctcgccatggtcctggatgaggaggaagcccatgatcttggctgcgtggtccgggtcgagcgcctggatccgcgagaacaccaccttggtcgcctcgtaggcgtccatggcgagctccacagcaagcaagcaatcgagcttcttcgtcctcctcctccgctttctttaccacaacactcgttgcttcttggcttcttggcttcttgctccgctgctgctgctgagctgtgttctattaccaccactagagtgtgcagcaaagcaagctcaaagaagaagaagacgagagagagatcagtgggagcggcgccactgaggcagtgaagagcagaggaagagctccattttcccccagaggaagaagagctcgctcgcagccgagctagaacaagaagctaagctatggctatgtagtagaagtagtactcgtactagtgcgctgcatccctatcgatctatactactcctttctttacttggcttgccccttgcttttgttggggccgggggagtgacaggtgatgccacaatttctccagggtgtttttcgcgaaaatgtttttgcattgt

SEQ ID NO: 12245 - DNA, 2676 bp, Oryza sativa
  ref <308>: DATABASE ACCESSION NUMBER: AK109593
  ref <309>: DATABASE ENTRY DATE: 2002-08-28
ctctctcggttgcgatggcgatggtgacggcgcggcagttcttggcgtcggcggcggagctggggagcgggcggcggcgctgcggcggcggcggcgcgtgcgacatgcgggaggacggcggggtggaggcgctgatgcagtgccagcgcgtgagcgacctgctcatcgcggcgtccttcctctccatcccgctcgagctcttctacttcgccacctgtgccgacctgtccgaggtcaagtgcgccgtgctccacttctgcgccttcatcgtcctctgcggcgccacccacctcctcgccgcgttcacgcacgcccacccgcactccgccccgctgctcagggcgctcaccgccgccaaggtgctcgccgccgtcgcgtcgtcggcggcagcggtctcgctcctcaccttcatccccaagctgctccgcatcaaggtcagggagtcgctgctccgcgacaaggccagccgcctccaccgcgacctcggcctcgtccgccgccgcgaggaggccacctcccgcgccgtgcgggagctcacgggccggatccgcgcctccccgcccgacgcgcacgccatcctccgcaccactgcgctccagctcgccgacgccctcggcctccacgcctgcgccgtctggatgcccgccgccggccggccccacgacctcgtcctggtgcatcacctcacctcccggcccgacgacgcggccgacttgctgctggaggttggtgacgcgtgcaccgtcgccgccgatgaccccgacgtggtcgacgtaatggcgagcaaggtcgccaaggtgctcgggccggactcggcgctcgccatggcgagcagcgtcggcgcggcgccggcgggggcggtggccgccattcggatccccatcctcagggtgtccatctacgacggaggagggacgccggaggtgaccgaggcgagctacgccatcctggtgctgcttcttcccccccacgacgccgccggcgggtggagcagccacgacctggagatcgtccaggtcgtcgccgaccaggccgccgtcgcgctctcccacgccgcggtgctggaggagtcgcggtcgatgcgggacaggttcgccgagcagcacagagcgctgatgcaggccaagcaccgggccgccatggcgaccagggcgttcagctccatccagagcgccatgtgccacgccatgcgaaggcccgtgcactccgtagtcgggctggtctcaatgctgcaacatccggaggcagacacaatgcggccggagcagaggctcgccgtcgacgccattgcccgaacaagcaacctcttgtcggcgctcatggacgaggtgaccgtgaaccggcagcatttgtccgtgcagaggaaacccttcagcctgcacgcgctgatcaaggaggccatcagcgtcgccggctgcctgtctcattgcgggggagctgggttcctgcaccagccggaatgcgcgctgcccgaatgggtcgtcggcgacgagaggagggtcttccacctgctgcttgacatggtgggcaccctgctgaaccgatgcaacaccgggtccggggcgtgccgcctctcgttctcggtcaggatctgcaatgtgggtgaagagaggtatagccttgactggatcccgatgcgaccgaccttctccggttgcaacgtttgcgtcaagttcaaggtcgggatcgggagatctaggagttgtgctattgagaggagtttgccgtgcgaattgcctcgtcgttctgcggccactaccagctctcagatggggcatatcttcagcggctacttcaacaagattgtgcagatgatgaatggtaacatgtggtcggcgtcggactccgagggcgtcggagagagcgtcaccctgatcctgcagttcaagctgcagcagggacatgtcgaagcatccccgccgtacatccctcacttgaacggcctgagggtgctcctcgccgacgacgacgccatgaaccggggggtgaccaagaagatcctggagaggcttgggtgccaggtcatgtcggcgccgtcgggcgcccactgcctgagcctcctggcgagcgccgaggcctccttccagctcgtcgtcctcgacctcgacgatcgcgccgtgccctcggcggccatggaccggtttgaggtggccctcaggatcagggagctcaggaacagctgctggctgctgatcgtcattgccgtcgcggctggcgtcgtcgccaccgatgatggcggcgccgtgcaggagctgtgccagcgtgccgggatcaacgggctggtccagaaaccggtcacgctgccggcactgggagctcagctctgccgagtgctccaggacaactgatgatgctgcctgcaatggagtgtgtaccgaaaagagcaaggactgaaattggtagatgcatcatgcaatctactaccaggtagtagaagaaaactggaatgtacagtaccgtattgctgtctctttatcatggtgttgcatctgccggccttttgcttcgttcatttaccgaatttgctggatgattatcgaatttgtctgaacaacatcatgtaattccggccaagctggtgtctgaagccgtgctagcagtcttttagttagcacggctctagacaccagttcatctcgtgtactcgataatcatctcgtgtactcatattatctt

SEQ ID NO: 12246 - DNA, 1504 bp, Oryza sativa
  ref <308>: DATABASE ACCESSION NUMBER: AK109594
  ref <309>: DATABASE ENTRY DATE: 2002-08-28
ctattctctccctctcccctacagccgttcgcggggagcgagcggaggcgggcgggggctgaagcagcggcggacggcgggagctgaagcggcggcggcggaggtaggttggagtccatgtcgtgccgctgccaccaccacccgcaccacccgacggccggcatcgagatgtcgtcggcggccgagctcccctctgcgggtgtcgcggcggctggcggagactgcggcgagcggcggcggctgcacggagtcccgagcggcggaggcgcaggtgtggagcggcggcctgcgagcggcgcgacggagacgcgggtgtggcggcggcgacctgcaggtcgagcagggcgcggccgagctcgccgtaccccgccgcgtgtgcctcccgccgccgccgctgtggtctcctccatcttcgccgtggtggagctcagcccgggcaccgccgccgcccgcaggcgatcagctacaccgtccgctccgaccgcctcgacgcgctcgcgctgctcctccttctcgcagcagatataccccatggtgaacgaagacgcgcagtacggcgacgagctccgggccgtgtgcccgccggatgcggaggagacggcgtgggtgcacctggaccacggcacgccgggggagctcgacagccagtgctacgtacaggaacgtgctcgccgggaaggtgctggctattcaactcggatcactgggcactgatcagcgaagcggcgacgaggcagatggtcgaggacaacgcggtgaaccagtcagccctttgcttgttggcttgccgcttgatgttagtacacacatgcactgcctgttgctaccgcttgtgcttgctagccgcagtccagccagtcctcatctgtcgccccttgccgattgcctcggcaaccagcaggagaatgctcaacgcagatgcctcccaactcgcgtgtggttgcgtcgttgtcggctggctcagcacgccgaccgcgtccatcggcggcggcggcgcctcccccgcccgcgccgctcctcccgccttcaacgccgccgccgtcgcaagtgcaggagaagccgccgccggatgctgccatcttcgaggggatgccgacgcgagtcgcggtggcgagacgcaagcggcccttacgcgttcgtgggcgcggcgggagaacggcggaggcgggtgcgtcgtggccggcagagagggcgtggagcacagtggtggatagtgcagtcacgaggccgagggtggcgaggacacggccattctcgtggcccgttttcttccttccgacggccaaccttccacggcgggctcgatctccgccgccgccgccgctccggccctcgcccgcatgccgccgtcaccgctccagtgccactcccaggactccgccgccgctggccaccgtcccacactcgcggagagaaagagagaggggagaatatgatttatgtgagccccacatgacagtgggtcccacccatacttttggtgaatgacaaatgggtcccacgt

SEQ ID NO: 12247 - DNA, 815 bp, Oryza sativa
  ref <308>: DATABASE ACCESSION NUMBER: AK109595
  ref <309>: DATABASE ENTRY DATE: 2002-08-28
aggtgcgtttgcagagcaaaaccaccaccaatcactgcctccgatccgactggatcaggtaatcgagccgagggaacccgcgagatcggattctgacgatgttcttcttcttcgtggggggcgtggagcagggcgcggggcgggtgctgaaggaggcggcgcggcggtgcctccgctgcggcggcgcggccgacctggtggagaccgagaaggtgctcaagctcttcttcgtccccgtcaagcggtggcccgggaaggaccccgcctacctctgccgcgagtgcggcctcctcgggcctggatccctcggcggcggcggcggcgaggccgggacggggccgccgctcctcccccgcgacgcgcggtgcggcgcgtgcaaccgcgccgtcgccgacccgcagttccggttctgccccttctgcggctccgcgctgtgatcccgaccgacgcagccggcgatggatttctctttgacggtatgactccttgctttttatttctagcagtaagcattttggttgcgtgatgagtgtagatgtaaaacgagctccttgtaaactactgacaagaagattagcaaaataagtaatcaagtgaagtctactcgcgcatcatatgtttatgtcgttaatcatcacattgcttgacgatgcctgcagcggtgcagcctgctcatgtttctggcatcaatgcattgtccatattacgcatgtaattgtcaggtaaatcttaaatgtcttactagtactgtataacagtataactttaccatttgcactgatacagtctgaaatacaagtaacatgttttacatt

SEQ ID NO: 12248 - DNA, 2103 bp, Oryza sativa
  ref <308>: DATABASE ACCESSION NUMBER: AK109596
  ref <309>: DATABASE ENTRY DATE: 2002-08-28
ctcctcctcctcatcctcacgcgcggaaactgtttgtactcgagcccactccaactccactccactacgccgatcgtgtcacacgcacgcgcgcatggcggcggtcgcgctgctctcgccagcggcggctgcggcggtggtgacagagggtgaggagaagccgccgctggaggaggtggaggtggaggtggaggtggtggtgcgggcgatcgtggccgacggcgacgggagggaggcgaatgcggcggcgccgggggcgaattggtgcggggaggaggaggtgccggcgcatgcagcggaggggggcacggtcgccgcgatggtggacgagaatgcggcggcgcctgcagcggagggggacacggtggccgcggcgaagggggaggcgcctgcagcggagggggacatggtggtcgccgcgaagggggcggcgcatgcagcggcggagggggacacggtggcggcggcggcggtagcgggcgagaacgaggcggcgcatgcaccagcagcgggggggaacacggtggccgcggctgcggatgtcaagggcgagtgcttcaagcgattccggtggccgacgaggcggcggccgtggcggagggggttaacgcgatcgccgcggcggagcgggaggaggacgacgagggggtgaagtggctgaagcactactcctccctccagagcatactcaccgtcggggacggggacttctccttctcgctggcgctcgccaccgcgttcggctccggcgacaacctcgtcgccacctcgctggacaccattgaggacctgaggggcaaatacagcaaagcagaatcaaatataatggagctgaaaaggatgggggccactgttttgcatggcatcgatgcaaaaaggatgaaggatcacaccaacctgaagctgagacggtttgatcgaattatcttcaattttcctcatgctggattcaaaggaaaagaggatgatttgcatatgatcaatttgcacagggagttggtatggggtttttttcagaatgcaagacacctgcttcgaccctatggtgaaattcatgttagccacaagataggattgccatatgacaggtggtgtatcgagcatctagcatatgagtcttctcttacaatgattgctaaagttgatttcagaaaagaggactacccaggttacaaccaaaagagaggagacagtgcaaagtgtgatcaaccttttgaactaggtgcttgctgcactttcatgttcatgagagatttgacgaggctgaaaagggcacgtcggaacaggatcaatgcatcttcactgggaatccaagcccaacatgacatgccatttcacccacgtccgcttgttccagcatatcctcagccacatttcccttcacaagtcaatgcagctcacaggcaagttcctccagagcattaccccctcggaattgctcatgggcaagagccaggttttctagataactttggtggcatagagaggtatccttaccagcgtggcgctatcgggacagtgatcggcatgccaggcactccttcaccaatgcgcggaataaccagaagtagcttccctgcacctcaggagcagccttggcgtcaagagagatatattatggatccagaagtaagagatgatcactaccattttgcccgggaatacccgaggaatctgcaggagtatgaaatggagaggcaggtgatgccaggaggaaccaggttgaggtacgtcgatttcctggaaaatcgttacgaggaatctgttcggaggcaggagcacctgcgaaggctgattgcagagtatggtggatacgactgatggtcttcagtgtatgggtgtatcttttatctgcttgtagaacagatgaactcgccctttcaagatgtgatatgctcggtctgatatgggtattgaaagatgcttttgggttgaagctgtacaggtagagtcattttgtgtggcaaattatcgtctagccacaaaaacatagcagcataaggaaatgctctttagtgtaagaaatcctatactttcaggcaatagttgctacctgcaacaagccaacaactatcttcatatatgcacagcgtttcgagcgcc

SEQ ID NO: 12249 - DNA, 1833 bp, Oryza sativa
  ref <308>: DATABASE ACCESSION NUMBER: AK109597
  ref <309>: DATABASE ENTRY DATE: 2002-08-28
ctcttctcccccgacgacgccgcttccccaattccggctccggcggcgagcagctggctgcggacgcgccgtcaaaaccccaggaggatgtggatctccggtgtactctccgcggcatgccggcatcggcggcgcgaagattctgcaccggcttagatcgacggcgcccctcgccgcggggctttcgtggagagcagccaattgtctgaagatgtgaatatcaagattccaaatgactagcgacaagatcatgtatgtgcagacgacccctgaggctgaaccaaactcatccaggcatggcatggggaaaaaacagaccatagctcatcccggcatgaacgaagaacccgacattttgcatattttttctgatgctctggattcatgctaacgatggccagaagctgcacctagaagcagaagcttaacaggtggcacaaacggcagttgaagcttgactccaattagaagtcatgatagtttttctgttgctacttggactggaagagctggtgtgccagggcaccatcctctgtgttcttgaagtttaagtcaacacctcaataggcactggtttaatgagctcttctcagccatcacaaacttcgaatagcagggccaaagtctgacaaacttttagttaggatacctggaatgtgaggagctgcttcagatgcacttgaacttccctttgcaattcgctacaaagaaaaagataaagaggatctggaacatcagctcaacctgggactggcttccaatcacacaccaagttcatcatagaaaggccatgcatcaagctcttctactaggaacattattattcagtctcagtcctaattcgccaatgtgcaccttcagtcttgagccagctctgcaagcaataactgaacatttaaagaactgcattttgtgcagcgatatggtgcggtttcagaatctgttgaaggaaatagcagtgttgtaaagatgcacaaatggtgcaacatgggtgctcaaacctgactaccgttaatgtgtttatctgcaccttggacggcagaggggaacctctctatttagacctgaagagtcattgcaaagagtcattactggacagtcttatttggtagaaggagaatggcctcatgcaagaagagtgttctctttgttgtctctgaacctgcctgtctaggatgcccatcttggtacccagttggcaccttgcaaggacgttgcaatattgtttggaaaacaacctcatcattctcaaatattttgcaatgtagtgtatgcatgcagcaagatggacacaacacaaatcgatgaaaccagcctcagtgagagtccgagctggccgagggtcagcctccaaattaaaaaaatatttttttcctggtctttggaatgccaagacgatggagatgcaggcaatcctgaccgttcattttttcacgtgtcagcacaggagccctctagattgggccggtgttttccgttaccagtgcctttcagctcatgggccacggccagcaattgttccaactgccacttttggggcccattccgttgggtgcgtgcccaaggtgatccggacatgtgggcccctctcgtggtagaaacccttgaacaaccgatcaagatcagctcaaaatcgaatcagcatgggaacaaaggaagagagatgcatggatgtagtttaatttgctcctaatcttatcttagccacgtagcatgtgtacggtttgatgtgtgtccacagatgggagaatttactaatcataaaacatgaagtggtaccgattgcctctataaaattatggggaaaattccaaatacctctaaaagtcactc

SEQ ID NO: 12250 - DNA, 1698 bp, Oryza sativa
  ref <308>: DATABASE ACCESSION NUMBER: AK109598
  ref <309>: DATABASE ENTRY DATE: 2002-08-28
acttcttctttctcaattcccgccaccccggcacgcccgctctcctctgctcggcgcaagttcttcggctgcctcaaggtgcgtacaccacgcccgagtctctgctctgttttttacttgctatgcatctctgttcgtagcttatcgatgtcgagtcaccatgacacctgttccgtgctcgtgccgttagagttagcaatgggaatatgggatgcgaatggcaattccgttggtagagatcgagaaaggcgagatctttcttgccgcggcgcgcgcaggcagcgcccacagacaagagctagcagagcggcagagaaggccagcacccagatctgcaatgggtggtagccccaccgctcattcctttctccttaatttcgctcccctccttcgttttttttttccctttttctcgtccttctctcgcgtgtcccggtcggagggtgggggcgtgccggcgcggcgcggcgtgggtgctcgatggccgcgaccactccgtcatctctatctcgtctctcctcatcatggatccagccatggagaagaaccccacaaaagtcatacaggagagatagatagagtcgtctcttcgtgctggctcgagatctattattggctagcaggttggtttttcggtgggaagcagagtggttcaatacaagcggacaacgacgcgttcatcggcaaggttaggtggatggatagattaggaggcgggccgccatatctctcctgacgcctgcaatttgccgtcttcctcgttacctacccgatcaagagagatcatcattccctctccatctcccctctttttccgcacggggtttggagagatcagccgatcaggtcgccgatccttatcccaatgccgtctttcagtccgatttctactgtatacgcacgcgtatcgcgttcttgctacctgtactttcagaattctgccgcttctgcagcggctgcagcggcgcagatgccatgacatgggtgctgtcctgggacacatcacacatggcatctgcgtactagacagggcggatgggtcttggagttcaggggcatgtcccgactcccgcactgtggcctccgtgatcacgcgggcattaagcgggttctggattagatcagatcagatcgtctcatcgttcttatgctgcttgctgcatttttcgcagggtgaggaggagctgagttagcagggctgcgaccatgaaggcgctcattctcgtgggaggcttcggcactcgcctgcggccgctgactctcagcgtgccaaagccgctcgtcgatttcgggaacaagcccatgatcctgcatcaggtcagcacaaatactccaatctttttatctcacaatacagtcttttcagttcgtcaggcatgacaatagagtagttatggagaacttatttggggaaatggtaatgcaagatgaaaaatgtcagtttgttccattacccgagttggggataagatgtagacagttgatgttattggcctcacactctagtcatgtctcttatgatggatcgatccatatgagttgattcctcacaacagtagcatctatttgcatcactgaatttgttcattctagtcataaatagttgtgacaaattgatattacatccgtcccaaaataagtgcagtcgtagggaaccgtgtccgacgtttgaccgttcgtcttatttgaaaaatttat

SEQ ID NO: 12251 - DNA, 1487 bp, Oryza sativa
  ref <308>: DATABASE ACCESSION NUMBER: AK109599
  ref <309>: DATABASE ENTRY DATE: 2002-08-28
aagtgacacacgcacgcgccccacctgtttcccccattccgcgttccgacgccgagtccggcgcatggagcgcggacggcggcggcggtggcggcggcatggacgcgctccccgacggcgtggtgcagcacatcctgtcgcagctcagcagcgcccgcgacgtcgcggcgtgcgccggcgtctcgcgcggcatgcgcggctgcgtgccgttcctcccggcgctctacttcccgcggggcgccttcgacgcggcgggcggcgcggccgcggccgacgacgccatcgggcggatggtggaggccgcggcgcggctggaggagctcgtcatctactgccccttctccgccgcgcgcctgccgcgctggctcgccgcgcggagcgcctcgctgcgggtgctcgagctgaggatggactccgccgtgtcctccggcgcgggatccggacacctggactgcatcggggccgtcgcgaacctcgaggagctgaggctgtgggggctcacgatgacgcgcgccccggcgtggggccagctggagcggctccgcgtgctggagatcgtcggcgccgcagtgcgggacgtcgcggtgaacggcgccgtcggcgcgtgccccaacctcaccgacctcgccgcgccactcgtcgagtcccttgaaatccagggcttctgctggatctcgctgcagggaggcatcagactcaagcaccttacaattgccaagaacactggtactgggagcgtgtacaatatagagattgggaagctcccagagttggagaagctctcgctgcgcggtgttcagtggagctggggagcaatcagctcggtgctgcagtgcgcatagagaggtgaagtatcttgtgatgaagattgagttctgcggtgatcatgatactctcgagccattcccggaggtggatcttgttgatttcttcaacagccacccgaagctcatcaagtttgagatccatggcgccatgtttgctgccatgtgccagaagaacagcctgaaaaatttggattcaaggttctcgatcccttgcttggaggaggttctgatcactgtgcgttcacctctgaacgctgagctgaagctgaacactcttgagtccctagtcaagtacagtcccaggatgcggaggatggtcgtcaggatttctcagatgaagaactgccatgggtccgcagatggcttcttcgaagagatttgcaagttcatgtatatgaataacgggagagtgcggatcgaatgaaagaaggaacagcagcaatcctgaactgaagtcgaatttggggcttggtttgactaccgtgagttgcagctggaccaacaataattttattgagttatgttcttcatttaaattttttcaagttgtgctatgttgtttattgttgttcatctggtctggagtggagtgagtgaatgttagttcatcatgcttatattgtactttgaagtttgaatcagtctaaaattttctgcttg

SEQ ID NO: 12252 - DNA, 1324 bp, Oryza sativa
  ref <308>: DATABASE ACCESSION NUMBER: AK109600
  ref <309>: DATABASE ENTRY DATE: 2002-08-28
atagcgagaagaagctaggctttgttgtcaacatggcaagagctgtgcttacactgactgttcttgccttcttgtgccttgtggccctcggcttgtccggcagagccaatgccaatgcaacggcggggaggaagatggttggggtgtatgagctgaagaagggggatttctccatcagggtcaccaactggggagctactatcatgtctgtgattcttcccgactccaaagggaatttggctgatgtagtccttggctacgatacagttgctgaatacgttaacgggacggcctacttcggaggactgatcggccgcgtagccaacaggatcgccaacgcgcggttcacgctggacgggaagacctaccggctgttccgcaacgacggcaacaactcgctccacggtggtcaccgtggattcagcaaggtcatatggacggtgaaggagcacgtcgccggcggcgactcgccgcgcatcacgctgtactaccacagcttcgacggggagcaaggttttccgggcgacctggacgtgttcgtgacgtacgagctgccccgcccctacgtgctggccgtgcgcatgaacgcgacggcgcggggcaaggccacgccggtgaacctcgcccaccacgcctactggaacctcgccggcgagggcagcggcgccgccagcgtcctcgccgagacggtgcggatccacgcgtcgcggtacacgcccgtggacgccgcgacgctcatcccgacggggcgggtcgcgcccgtggccggcacgccctacgacttcctcgccggcgccccggtgggcgcgcgcatcgtcggcgccgccgttcccggcggcgccgtctccgggtacgacaccaattacgccgtggacggcgccgcagccgacggcgagcggcggcggctccggccggtggcggaggtccgcgacggcgcgacggggcgggcgatggaggtgtgggcggaccagccgggggtgcagttctacacgagcaacgggctcgccggcgtgcgcggcaagggcgggagggtgtacggccggtacggcgcgctgtgcttggagacgcaggggttccccgacgccgtgaaccacccgagcttcccgtcgcagatcgtccggccggggcaggtgtacgagcacaacatggtgttcaagttcaccttctagtgcgcacttgggcggaccgtacgtagcagcatccgatccgtgcatgcgtgcggctggtcggatgtgtactgtcacgttgagacctgtagtcctgtactgaaaaggaataatggcgtgcgcttgttgctttgctccaaaaaaaaaaaaaaaaaaac

SEQ ID NO: 12253 - DNA, 1968 bp, Oryza sativa
  ref <308>: DATABASE ACCESSION NUMBER: AK109601
  ref <309>: DATABASE ENTRY DATE: 2002-08-28
acgaaaacatagattagatcattagacgtgctattaatttgcgacctgttaaaaaataaagtacgaaaaaacatcaaaattaatctaaaattgagatttaaaattaaaattgaacatcaattgattaccgggagcgaggtaatcataattgagattcaaaattggtgtttgtgtggacatgtgaactcaacacagtggcggcgctgaacgcgattctggggaggtggggcacgaagccgccgacgacatggaacatcaccggcgacccttgcagcggcatcgccatcgacgaaacgaccgacatcgataacagcgaaaccatcaacccgggcatcaagtgcgactgctcctacgacaacacgaccgtctgccacatcaccaagctgagggtgtacgcgttggatgttgtcggtccgatacctgcagaactggagaatctcacctatctagctaacttgaatttacagcaaaattatttgacaggatctttaccggcatttattggagaaatgacggcattgcagtatcttttggtgggaatcaatgcgttaactggaattttaccaagggagcttggcaatctcaacaatctccttgcgttatgggcatccgacaatgatttcactgggagaatacctgattatattgggagcttatcagatttgacagagttgaggattcaaggaaacaattttgatggtcccatccctacaagtttttctaatctcgtcaatttgacatctttgcgaataggcgatttagtgagtgggagttcttcattggcttttatgtcaaacatgacatccttgattgttctaacactgaggaattgcaggatatctgacaaccttgcttcagtggacttctcaaaatttgtaggactttattacttggacttgagttttaacaacatcactggcaaagtgccttcagtccttttgaatctgaattcactcatttacctatttcttggaaacaacagcctctctgggagcttgccagacacaaagggtgctagccttaaagttctagatttctcctacaacgagctctctggaaagttcccttcttggtatagcacggaaagacatttacaagtgaatttggtgtggaacaacttcatgatagatagttcaaacagaagtattttgtcatcaggtctaaattgcctacagcgaaatactccatgtttacctgcttctccagatgattcctcatttgcagttgactccggtggtactagacccattataggctcagataaatcttattacgaacccgacgacacgaatttaggagaggcatcatactatgtttcgaactcaacaagatggggtattagcaacacggggaaattcatggaagccgctaattttagcttcatagtatacacttcacgccagtttacaaacacgcttgatagtgtactattccagacagccagaacgtcatcctcttcattgagatactatggcattggactaaagaatggattttacaacgtcgagcttcaatttgcagagatcttctttccagacaacacgacatggacaagcttgggaacaaggattttcgacatatttattcagggagaactcagagaaaaggatttcgatataaagaaacaaacaaatggaaaatcttatactgttgttttgaggcagtatgttgttagagttacagaaaatttcatggagattcaccttttctgggctggaaaaggaacttgttgcattcctagacagggatcctacgggccattaatctcagcattaagtgtatctccttatggtggcaacaataaggttgatcctggtcctattaaaaacagtgctggtaaaagtaaaatagctttggtagctggagttgttgtctgtactatagttttaggccttttatccacagggacatttctttggagacagaaaaggaaaaaaatggaggcggagatgggaggtagttaaaatt

SEQ ID NO: 12254 - DNA, 2854 bp, Oryza sativa
  ref <308>: DATABASE ACCESSION NUMBER: AK109602
  ref <309>: DATABASE ENTRY DATE: 2002-08-28
gttgattgccaccatcgacaacaccatctccaaagtgctcaagggccacaagggatcggtaaccgggttgtctttcgatcccagaaacgattatttggcatcaattgacaccttcggcacagtcatcttctgggatctctgcacggggactgaagcccgtagtctgaagcggattgcgccgacatttggttcagaccactcaatcaacaatgccctgtgctggagccctgatgggcagttccttgctgttccgggattgaggaataatgtggtcatgtatgatagggacaccggtgaggaggtgttcactctgaaaggggagcatgagcaaccagtgtgtagtctctgctggtctccaaatgggaggtacctagtcactgctggattggataagcaggttctgatctgggatgtgaagtcaaagcaggatgttgagaggcagaagttcgatgaaaggatatgtagcttggcttggaaacctgaaagtaatgctgtagcagtgatcgacgtaactggcagatttggcatttgggaatcggtcatcccgtcgactttgaaatcgcccacagagggtgcacctgacctgaactctactaaggttcctttgtttgatgacgaggatgatgaggagaggccgagtacctctggtggactggatgatgatgatgatgatgaaagtcttggtgaattaggtccattcaaccacaagagattgaggaggaagtcaacctatcatgatcactcaaatggagatagtgaagatgaggatctgatacttcagatggagtcacgcaagagaatgaaagatacacatagagataacaaggaggttgctgataaggcaataggtgattcagcaacttcagtaagactggttacagcaagaatgcaaactgcatttcagcctgggtccacaccacctcaacctggcaagcgaaatttccttgcctacaatatgcttggaagtatcactactatcgaaaatgaggggcattcacatgtagaggtagacttccatgacaccggaagaggtcctagagttccttcgatgactgattattttggtttcacaatggctgcactgaatgaatcaggaagtgtctttgcaaatccatgcaagggtgacaagaatatgagcactcttatgtaccgccctttcagtagttgggcaggcaacagtgagtggtcaatgaggtttgagggagaagaagtgaaggctgtggctgttggtgttggatgggtcgctgcagttacaactttaaattttctgcgcattttcacagagggagggttgcagatgcatatcctctcagtcggtggcccagtggttactgcggcaggccatggagatcagctagcgattgtgtctcatgcttcagattgtctttcatcaggagaccaggtgctggatgttaaagtactgaagatatctgaatgtgctcaatcattgtccagccgacttgttttaactcctgcctctaaattatcttggtttggtttcagtgagaatggtgaacttagttcctttgattccaagggaatactgagggtcttttctggtcaattcggtggaagctggattccaatatttagttcaatcaaggcaagaaaatccgaagatgaaagccactgggtggtgggcttagatgctaataatatattctgcattctatgcaagtccccggagtcctatccacaggtgatgcccaaacctgttttgacaatacttgagctgtcatttcctcttgcatcatctgaccttggtgccaatagtttggaaactgaattcatgatgaggaaactgcatctctcacagattcaaaagaaaatagaagaaatggctgctttgggtctggacacgattgcattagatgatgaagcattcaacatggaggctgcacttgaccggtgcatcttgaggctcatctccagctgctgcaatggtgataagcttgtacgagctaccgagcttgcaaaattactaacactggagaagtcaatgaagggagcattgatgcttgttacacgcttaaaacttcccatattgcaagaaaggttcagtgccatactcgaggagatgatgctaaacaatgcaaaaattgccaatacatctggtgttttctccaatagtaatacaaactactcaccatcaccagcgttgagcactcaagcagtcccaccagctaaggttgtgcaaaatggaaacagcttgaagttacctacattgcctaaactgaatcctgccgcccaacgaagcaatccaactgaatcaaacaaggcagaggtagaacaagcagacaatttgaaagaaatcagtacaaaggtttcacctgcacaaactccgttagttaaaattccaaaaaacagtgaaatgggtgtaaaaacgaagaaagataatgatggagcatcacatgcaactacagttgatcagaacccaaagggaggcagtggtcaggttggccttaaaaacaagagcgtcgatagctgcaatggtgtacagcctcagcggccagttaaccccttcgcgaaatcctcatcaagcaaagaacagccatcatccctttttgattccatcaagaagatgaaggtcgaaaatgagaaggttgacaaagctaacagcaagaaggtgaaagtgtaactgcttgtcattatctcatgatcttcgggagcaaaccagcagttaggtatcctccacctttactgacatatctgtgcttatatttttcatttcagttgtgataatgtaggtgaaaatcactatttacttcttgagctacgtttttgtgtatggcttcagagcttaatttctagttatgaggtggtacacaatgtatgatagtaaacctgtttagat

SEQ ID NO: 12255 - DNA, 1483 bp, Oryza sativa
  ref <308>: DATABASE ACCESSION NUMBER: AK109603
  ref <309>: DATABASE ENTRY DATE: 2002-08-28
aaaaacacctttggagtttggggttcgaattcaaactccaaaatcgcgcctccgatgatccgatccggcctccccacgcatagatcgcaactaacctcactagctagccgcggcgcggcgcctatacaagataaacaaacgcgtcaaattgcacggcgccggcgagcgagcgggtcggagaccgcaccgccgccacaccgatcgatcggcaagattggcatgcccggcggccacaacaagcagccggcgccgcccgtggcgaccaccggctgctccgccctcgcgtcctgcctctccttccaccgccgcgcgccgcggccgccgcctgcgcgcgccaacgtcgtcgatggcgcgacggcggcgaccactagagcatccgcggagcagtaccggcggagggtgcagttcctggaggaggagatcaggaggctcggcagtaggctcgccgagcacggcaggagcgccaatggcggcgccatggccaccagagatcgggtgagcagcgcctgcagcggcatcggcgccacggcggccaacaagcgcgtcaccgtcggtggccacggcggcgtgcgggaaatggtgaggctggaaggcggtggctacctgcacgagatcaaacgggtggtgggcatgccctgggagcggctggcgctgcaggtgtcgcagcccgtcgtcgccgagaacgccgccaccgcgtcggaggttcttgacaagatgacagagacgagcgcagagaacctgtgcaagttactgtcaaagatgatgccgatcaaggacatcgccggccggaagaatcccggcaaagtcatccgccgctcggcgaggctcagctccggcgacgacttcttggaggctctcttcttcatggaaatggacaagatggaaggactggtccaacaaggcctaaagattcgcatggcctcgacggctgactctgcctcgtccacggctgccggcgacgacgacggcgaccggaggcaccaggcgacgaaggattccatggtctctgtggtcctgattcaggtgagggatcccgagcaagggtacgccgccattggtgaccccatgatcggggtcatggaggcatccctggagaagaaggatggcagggtgaagctggagatgcaggggatgcacgtcgcagggatcctcttcggtgcaagcagcaagggaaggagtaatggcagagccatgatgtggagtgcttgcttgggacagtgcaaggggtctcacaatggccgccgcggcggcggtggcggcgccggcgccggtgatgtctgccggtgcggctttgttcggaacacaaatcgtgttttccgacggtagagattggcattcttggtatgtctagtaaagtaaagctcaatcagcattgtcctgttcttagcacgggagcagaagagacagataataacaatctataataaattttgtgataggtatttataatgtactaataaagtttgtggacgtttcttccatt

SEQ ID NO: 12256 - DNA, 1468 bp, Oryza sativa
  ref <308>: DATABASE ACCESSION NUMBER: AK109604
  ref <309>: DATABASE ENTRY DATE: 2002-08-28
aatccaacacagacacacctctatctcctttgtttctgttcccaatttctatttcacacacatcgatgatcgatcgatcgctgcacctctgaatcttagctcaaattccacctcaattatcaccaaatcaatggcggccctcgaccaacaaccgctgcttcacgacggcggcgaccagaagccgccgccggaaggagcggcaagaaggttccggcgatgcaggacggcgccctcctccgagcctccgcccacggacaaggacaactcctcggcggccgacgcgcctcccaagacgctcttcaccggcggcggccgccccagcttccggctcgtcggcctcctcctcgtcgcgtacctcctcctcggcaccattgccttctacctcgccatggaccacatgtccggcacccgcaccacccgcgccctcgacgccctctacttctgcgtcgtcaccatgaccaccgtcggctacggcgacctcgtccccgccagcgacgccgccaagctcctcgcctgcgccttcgtcttcgccggcgtcgccgtcgtcggcaccttcctcagcaaggccgccgactacctcgtcgagaagcaggaggcgctcctcttccgcgcgctgcactcgcacacgatggtgcgcgccatggagatgaacaaggtgaggtacaagctctacacggcggggctgctgctggtggcggcggtggcgtcagggacggtggtgctgtggaaggtggaggggatgcgggcggtggacgcgttctactgcgtgtgcgcgacggtgacgacgctggggtacggcgaccggagcttctcgtcggagggggggcgcgcgttcgcggtggcgtggatcacggtgagcacggtggtggtggcgctcttcttcctgtacgcggcggagctgtacacggagcggcggcagagggagctggcgaggtgggtgctgcggcgccggaccaccaacatggacctggaggcggcggacctcgacggcgaccaccgcgtcggggccgccgacttcgtgctgtacaagctcaaggagctcggcaagatcagccaggaggacatatcggagttcctcgacgagttcgacaacctcgacgccgatcactccggcaccctctcccccgccgacctcgccgccgcccagcctactccggacccgccgccttccctgcgttagacatttcatttcaccgccatttttctttctttctttcttggaaatactcctccaagagttagtcctactgtacatttactgatgtaaattactcaattgaaattagtagttgtccaaattgaagcctgtataacattttctttgtctaaaattatatgtataacctattttgccttttttttttactaggtaggagtaggacttgttaggagtactatactaaactgatatagtagcatgtaaaaattactccactaatgtgaaatttttgtgttacatgtttcttct

SEQ ID NO: 12257 - DNA, 1985 bp, Oryza sativa
  ref <308>: DATABASE ACCESSION NUMBER: AK109605
  ref <309>: DATABASE ENTRY DATE: 2002-08-28
gacaaatccatagagaccacccccaacccacggccatggcggttctcgtcccgatcgacggcgacggcgacggagagggagagggaggtagagccaaggccgtcaccgaccccgccccggcccccgttcccgctcccatggacatcgacggcgatcgcggcgcactcgacgtcctcgccccccgcccccatggccatggacctcgaccgcgaccgcggccgcgaccgggacggatacggcgacggagcggcgctcgtcgcctccaccagcaacgggcgcgggcggggccgcggccacctcaacgatctccccgaggacatcctcgccgtcattttgcgccgcctcttggacacccgcgccgccgccaggaccagctttgctgtcccgccgctggcgccacgtctggaaatgggtgtccggcctcttcttgcatcactaccagccccacgactccagcatcgtgcgcgccgccctcgccgcccacgccgtgcacgcggtcaccaacatcaacaagctctacgtcgtctgcctccgcagcgccacgccggacgccaccgcctcctggatccgcgtcgccgcgcccctcatctccggagagctcgccttctgcaacagggcctcggttccgttccacatgctcttcgacgaggtattcagcgatccaatcgaagaaagaggcgcgctcgagctcccctgcttcacgagagccaccaagatagcgctgcgcctggggtttcttggcctatcgctaccgccgtcgggcgtcttcgccgcgctcagggagctgcgcctttcgtttgtccggttccatggcgaactcaccctggacgatactgtgatgccgttcttggaagggctagagatctacagtgcccgtgtcttggcctccctgacgctcaggctgaagcatctcaactggatgaatctgtccgctgtgcggggattgcttcggctcaatgccgtggtgccgagactcaagttcttgactgtatcctgttgcttctgttcttcgacatggctggttgcaatggcgggcgtctgcattgttgcagaggagctgcaggtgctcaggtggctagattggtactgtccaagattgatcaagttcagccagatgccgcgcctctatgtgctaagcgtctccccattttatccttatggacggcatcgtcagcatactaaattcaatccgagctgtgacaggcttctcaagacattttcacgcattcgttgtctcgagatgttggttttcatcgaaccacacctaggtggcgttaatccattgatggaaggcataaccagactccctgacattaggttcttgcacctacaattctcagcacatgggcatgtttatggagctagtgtgttgtatatgctgacaatgtgtactggtatatcaaacctaaaaatcggaggagatcgttacaaggatcaagatgtgtgtccaccgaactgcagctgtgatcggccaccgaactggagagataataaggacatttcgatgaggtctctaagagaagtgcagatgctcaacttcagaggaaaggaacatgagcttgaccttctgagggtcttagtcagggtagcaacaggcattaggaggatcagaataacctgccatcgttcgttcgctgcttgggagagactgtctgcagtcatacgaagttttgcaagaccagagacttctgtggaagtgagtcaagcccctccctctttgcagcgacagtgaactgagaagtaagaagaagctttgttaaaaaaagaagaagaagcagctttgttggctgccgacccttgatgtacctggcatgttttggcccgattgtgctgtaaagaaaggaacagagaaactgatctagctgcggccaattttgctgccattgtagtttgtcctcatgaacaattcttagcatttgacattctggaatgccttttgttagtatggtgcagggtgcacttgttgcttagtttggtcagaactg

SEQ ID NO: 12258 - DNA, 1427 bp, Oryza sativa
  ref <308>: DATABASE ACCESSION NUMBER: AK109606
  ref <309>: DATABASE ENTRY DATE: 2002-08-28
ccaacctcactcactcactcaagccaagctagcaatcgatcgatcgagctcaatgcctccatccatggcgacggcgagggtggcgtcaccgtccacggacaggaagcgcaaggccagcagcgaggacgacatagacgccgccgccgccgccgccgctctcacctcgccgctggcgccggcgagggggaggaagcggttcgtcggcgtgcggcagcggccgtcggggaggtgggtggcggagatcaaggacaccatccagaagatccgcgtgtggctcggcaccttcgacaccgccgaggaggccgcccgcgcctacgacgaggccgcctgcctcctccgcggcgccaacacccgcaccaacttttggccccgcccctcgccgccgcccgccgccgtcgcgccaccggagacgacgacgacgccggcgctgccgtccaaggtcaccaacttgctactgctccgcctcaaggctcgcaaccagcaggtcgtcgacgccggcgccgcggcgccgcaagaagccgctctgttgcagctgcagcagcagacgccggcgtcgtgccaggaggtgttcgtccgtagccacggcgaggagtacggcttccacgtcgacgacttcctcagcgacgcgtgcagcaacgagcagtactccggcgacagctcgctgggattggacgacgacgacggcgaggtggaagacgaggaggaggaggagctcgacttccagttcatggacgtcgcgcccggggcgtcgtcggcggcggcggaggcggggctaggcggcgagggcgcgctgtgctcgccgttcgagatggtcgccgcggagctcggcggcgcggtggacgtggccgcgcacgacgcgatgaggcagatggactacgagaggaagatctccgcgtcgctctacgcgctcaccggcgtctccgagtgcctccggatccgcgccgccgccggcgccaccgccgctgcgcgggaccacctcaccggcctgagagaggcttgccggaagaagcagaaattcgccgccgccgcggcggcgccgccacagcagcaagaaccatctcctcctccacagcagcctgagacgccggcgagctcaggcggcggcatgtcggagacggcgagcggcggcggcggcgacggcgacgtgctgatgtggagctcactggacttggctccgatttgccacatggcatagttattattagtagtaaacaccatacttaattagggctgtggaatttcttggtgatgacatgcatgcatggctgatggctcagacgagagctctggaaattattagctttgcttagctttgccccaattgttttgttcaacagcaaaaaataaagtttagttatcctctctgatcatctcatataaaccacaaattatagataatgaagtgtttgatgtgtttgttcatgatt

SEQ ID NO: 12259 - DNA, 1608 bp, Oryza sativa
  ref <308>: DATABASE ACCESSION NUMBER: AK109607
  ref <309>: DATABASE ENTRY DATE: 2002-08-28
cagctcgaatcggaggaccagctccgccgccgacgattcttgacttgccttcttctccggcggcgacgattcttggcttctttggttgattggtcgggcggagcagcggtcgaacagcttgcgggcatcaacaggcgaggcatggcgagggggctgtttgcgtgctttgggaggggaggggaggaggcggaggaggaagcagggaagaggccggcgctgcggcggcggaggacggtgaacctcaggtcgctgtcgctggaggacctgtcgcggacgctggcgaagacgaacctgcacgccttcaccctggacgagctcaaggcggcgaccaagaacttctccaccagcaacttcctcggcgagggcgggttcgggccggtgtacaagggcttcgtcgacggcgagctccgccccggcgccctcgagtcgcagcacgtcgccgtcaagtacctcgacagcgacggcgtccagggccaccgcgagtggctggctgaggtggtgtatctggggatgctgagccatcctcatctggtgaagctggtaggattctgcaaccaagatgatcacaggatgctggtctacgagtacatgccaagaggcagcctcgagaaccacctgttcaagaatcttcttgcttcgttgccatggtcgacgcggctgaagatcgccgtcggcgcggcgaaggggctcgccttcctgcacgaggccgagacgccggtgatctaccgcgacttcaaggcctccaacattcttctcgacaaggattacacggcgaagctgtcggactttgggctggcgaaggaggggccgcagggggacgcgacgcacgtgacgacgcgggtgatgggcacgcacgggtacgcggcgccggagtacatccttacgggccacctgacggcgaggagcgacgtgtacagcttcggcgtcgttctgctggagctgctcaccggccgccgctccgtcgacaagcggcggcgcggccgggagcagaacctcgtggactgggcgcgcccctacctccgccgcgccgaccggctgcaccgcatcatggaccccagcctcgagctgcagtactcggcgcgcgccgcgcacgccgccgcgaaggtggcgcaccagtgcctgcagagcgtgcccaagtcgcgcccctgcatgcgcgacgtcgtcgacgcgctcgagccgctgctcgccgtcgacgacgacgtgcccatgggcccgttcgtgttcacggtcggcggcgaggaggcggcggcggcggcggccgggagtagcgccgccggcgacgccggcgacgacgagccggcgagggggagccggcggggaaagaagcacgtcacgtcggccgtgcacgcggagagcccgctgcgcgacggccggtacgcgagcagggtgaaacgaccggagagcccaccgagtgtgatctgatgagtacatagaacaaacaaactgaatttgtacatagcaaaactacatggtccttgattcatttgtattatactacctttgttcgtgatgttttttgtctaaagaatttgctaagggaaacgttgattaatagagttgtttaactccctttgtaacttgtaagaaagaaaaggggagtatttttct

SEQ ID NO: 12260 - DNA, 2110 bp, Oryza sativa
  ref <308>: DATABASE ACCESSION NUMBER: AK109608
  ref <309>: DATABASE ENTRY DATE: 2002-08-28
gagctgccggcggaggtgcgaagccatcgaggtgagtggaagcttctggaaccttaccctcctttttcctttctatctcgctgcggttggcttaatttgcctctgcgggcgcgtcgcggttttgcttctagaaccttctagttcttgtggtggtatgaagtttctccgtgagtgtcaaatgtggatccgccattagagatggatttgagttcgctgtgctttgtgacgataggcttgtttcggtggagatttcatggataggtcgacgacgagttcatagaaggaggggctttatatgcattagatgaacggcttccaacagtttccgtagcaagaagcttctatggtttaatctaattctaggagggcggtaggggtgatgtttgtgtgccgaagtcttgctaacctggatcaatggaatgcgcttgttgtgcaatgcagttggaaactgtggagtagcccgtgtgacagtgtgagttaattacttggttgcttatttgaggattaggatacacacaggaggtcatgagatgttgtttggttaaactgaacatttaatttgtagtctattaggctgaaaggaaaataaagaaccattcagcctagttgcaagactagtttttctttgtaacgttggtgaattgtactgtgtttaagccaaactaagttgttaaaggtttagactgacgtccccttatgtgatgtttatctttgttgttgttgtcatattttgaaaattgtgcattcaccatctctaaaatagctcatagggcattaacgagtgatttcaatcgaggtgccttgtttacaactattgctttgcatattctgatcattgcaatgttttcaaccagttattgcatatggtggcaccaagcatgaggttacaactgcattacttgcaagggaatcacaagtcacaagaaacacatgttattacaatggatgtaagatttttttattcccagtttattttcccatgattttgcgacagtgaatagttttattttttttaaataaaatgaacttacatgatcattgatgttgtctttaacaacaactcaccaatgaacaaccatacattgtcatatgtgaactctggttaaagagtatctttttgtaacttaagataaatgggcatctgtcctgcaaatggagatggaaagtttgcatagaagtaacagtgatatgctattctgcttataatcacctttccagatatatgttgtgctgtactagcagtctaatacatactatatgatgtctgttgttaatattcagaaaatgaccctgttttttgccaccataagtttccaacttttcaggctatcatatttcagtatgctgtgatagataagtgaacctctttgtgtgtaaatgtttcatggtctgatggataaacaagataattgtgtacagaacccagcttgcagcatatctgcattaagcagatgtagttttgctgcaagcaaagcatggcttattgctataccattgcctttgtgagtggaatggtatatcttctaaattaaggaaaagatgactttctccttttctggagctatgttggggttggctctgttcaagatcagagggagtatattcctcctctcaagagctcaaaacttttcttgtgaataagtttccatgttaaggactgcatagagccccttttccattgataggtacacccaaggcagcgggcagtctcattatataaaattatgttggtatggtcaaagcgcaccatcagcaggttgaaccttcctacttagttcttcaattccttgtgtcaaaggtggtcctatggcagaagattgattgcttcaatctaaatggaattaaaacaaagttgcagatattaatgaagcacatgctaaggtgaccttcatctgagatgtgactattgacatcacatacgctcattttgagttggttctctaaattccagagatctcttgcatttaggccagcaagctcctgtccatatttatcaataaacacaggacggagttgatttaacattctgagaaaaattgtcacaatttgatttcttatacatgtattctttctcactaacttactaatattatggaagagaagctgcttc

SEQ ID NO: 12261 - DNA, 1530 bp, Oryza sativa
  ref <308>: DATABASE ACCESSION NUMBER: AK109609
  ref <309>: DATABASE ENTRY DATE: 2002-08-28
atcacacaaaagcatcatctatctatctaaccagagtgataaaatggaggtgcaggtgaagaggagttcggtcgtgccgccgccgccgcgcgagacggaggagacgccgctcaccgtgttcgaactcgtcgcgccgacgtaccacgtcaccgtcctcttcgccttctcgccgcccaacccgaccacccgcgccctcctcgacgctctctccgccacgctcccgcacttcccgctcctcaccgcgcgcctcgaccgccgcggcgcccgtcgccgcccgttcttcgtcacgggcagaggtggcgccggcgcactcgtcgtggaggccgaggtgtcgtccgacctcgctgaccacctcccgctcgcgccgtcgccggagctcgcgcgcctccacccgccggtcaacacggacgcgccgacgccgcatgtgctgctggtgcagatcaaccgcttcgcgtgcggcggcctcgtggtcgtctcgtcggctcaccaccaggccgccgacgggttctccatgagcaccttctttcacgcctggaccgacgccgtccgtcgcaacggagctccgctgcttgaccgacctgtaccgtacggccccggcgcgctctcgccgcgccggccgccgcggtgcgagttcgagcaccgcggcaaggagttcttgccgcacgacggcgtcacgagcaggcaaggacaaggcgccgacaccggcgccgtccgcatcgacccttccgaggtcgccaacgtgctgctgcactacccgagcgagttcgtcgccgagctcaagcggcgcgcgcagggcaagtacaccacgttcgagaccgtgtcggcgcacgtctggaagaagatcaccgccgtgcgcgggctcgacgccggcgcgcgcacgtcggtgaacgtctccgtgaacggccgcgcccggctcgggacaggaaccgtgccaaacggcttcttcggcaacctcatcatcaacgcgagctccggcccgacagcgagggagctgaccaccggtactctcgcggacgcggcggcgctgatccgcgcggggatccgcgccgtcgaccggcgctacttccagtcgttcatcgacttcggggcgctccacgtcgacggcggcagggacgaggaggagccgcttcagccggcgaacgtggacgagcccggcgtgctgtcgccggacgtggactcggacagctggctgcacctggagctgcaccggctggacatggggctcggcgggcggctcgccgggatcctgccggcgaaggtgccagaggacggggtggtggtggtgatgccgagcctgaggaaaagtggtggggtggaggtgttcgtggcgctgtgggagaagcacgcgaatgagctcaccagcatcgcttacaccatggattagtgaaacactaaccaagatgtagctgcctaatcacgcatgtaataataacaacctatctgattactactcatgtatactactcaagtatactgctgcaattaacgaatgtgtgcgtgcgtaaataaagaaaaggttatcttagaagt

SEQ ID NO: 12262 - DNA, 1936 bp, Oryza sativa
  ref <308>: DATABASE ACCESSION NUMBER: AK109610
  ref <309>: DATABASE ENTRY DATE: 2002-08-28
ccagctcgccgctccacccttgcggcgccgccgtcgtcttccgccccagcgacgacctcgtcctcgccgccatggcgtccttcgccgccgcgtccttcttgtccttgaagaacccgaacaccggccgcgagcacaccggcacgttcagcaccaccggcgccacgcggacgccggaggagtatgaccggtcgacggcgcgggagcgtggcttcgccgcggcgtggagggtgcacggtgagctggagctgcgctccaggccctggaacacgatcttgccggaggagttcatgcgcggggagtcgacggagaggcagcgcggcggcggcggcggggaggggcggcggcgcgcggggcttcggccggcgcgggatgaggaggatgaggaggtggagtggcggtgggaggaacggacgaggcggatgcggggcgggttggggtcagcggcggagtcgagggagaggcgcgggatgtcgtcgtggtcgtggccggaggaagacgacgacgacgagagggagaagcgggaggaggcgagggagagagacgcctccgagtcggagctgtcgcggaggagcggcgcagaggcgagctccgacgcggaggccccggacgagcggccgttgttccgttggagcagcagcttcagcgacctcgccgccgtcgagttcatcgctctcccgggggttctcgcgggcgcagacgacggcgatggcttcgggctctgcgctgccgctctcttcagcccgagcaactcccgccaccggctcgagcagctgggcgccttaggagagaaaacgtacgggtcggcggcgtcaaccgcggcggtagccgcccgtagtggcttcatcggctccgaaggcgccggcattgcctcaggctgcggcggccgtggcgccgccgcatccatctccggcacagccgccgccttccgaagcgggagcagcttcccgtcggcaaagagctcgtccgccgggagcatggtggcggagcccccgaggctgaactcgaagtcgatgaagtccttggatatcgccggctccggcgtcgtcgtcgtcgccaccgccgccgcggcggccaggggcgaagaacacacgaccaccgcggcagcctcctcagccccggcggcgtcgcggctgaacgagacacgcggaccatgccatccaccgaacggcatgacagccgcgggcgcagctgcaggcaagttactcgcgacggcggaggccatggcaggcggcggctaagcgcatcaacggtaagcagcgcgacaagaagaagtatatctcgtggtacccgatctcactagactgccggtacggtactaatcacacacactggtttttatgggtgtcactagatagggctaaggtgtgaggcggggtaaaggcgcgtatatataagctgggtaaaggtagtaaaatctcgaaatgtttttcgatctggcggcgaccgaccgaggaggtgagggtctcccggttcgcggaagcgcgcggcaacgcaaaaacaagtccggcctttgggcgttgccgttccaggtgagcgcagaggcaaagtgtgttcgtcggtttccgtggatttatttttgcaacggcgccaccggccggatcggtacagctacggacaggcgagatacagaggggaaaccgtgggggatgtgcaatggttttttgagatgtgtttcttccttcccagttgctactcggatcaccgtggaatctgtttgtggctagtaggaggatatgtgttagaaattagaatctcctggttctggtctaatcaattgttacgttttctacatcgaaaaatatgggatagttggctagtggctatatcggttcgatgttgtacgttcctagtttactttttacgatacgatgggtgtaacgcgcaaaaatgtattttatatgaaatcaatagatcaacaatgtagagtgttgaaagc

SEQ ID NO: 12263 - DNA, 1562 bp, Oryza sativa
  ref <308>: DATABASE ACCESSION NUMBER: AK109611
  ref <309>: DATABASE ENTRY DATE: 2002-08-28
agatcccgaggatctccttcccaaagcatccctgattccttcccaaacgcctaaaccccaccaccgccaccgcccatggccgacggcgccagcgcgaaccccggcgacccgccctcgccggcctcggcgaggtcggggcagcggaagcacgtccccgactggctcaacagcccgatctggtccgcgcctccccctcccgcgcgccaccgcgccccgtcccctccccgcccgcccccgcctccccctcctcccacgcagcccgcacctcccccgccgccgcccgcccggagcggcggaggcggaggctccgacgacggcagcgacggcgacgacgagggcgccgcgagctcgtcgcggccccacctcgtcccggagttcacggtcgcgctgggcaggaaggtggtggatctggctgagctgcggaggctcgcgtgccagggcgtgcccgacgccgccggcgtgcgccccgtcgtctggaagttagcagcttctattgggatacttgccgactgatcatgcgctgtgggcatatgaactggagaaaaagcggtcccaatacagtgctttcaaagacgagcttctagttaatccttcagaagttactcgaagaatggaggaaatgactatatccaaagggaacagacataattctgaaggaactggagtgcttccaagggcagaaattgtccatgatgaacatcctctaagcctcgggaaaactagtgtctggaaccaatttttccaggaatctgaaactatagagcagattgatagagatgttaagcgtactcatcctgagatgcaatttttcaatggggattcttctgatgccttgtctaatcaagagtcgctaaagcgtatacttaccatatttgcaaaattaaatccgggtataagatatgtacaaggaatgaatgaagttttggcaccactctactatgttttcaagaatgatccagaagaaaataatgctgagtcagcagagccggatgcatttttctgtttcgttgagctgcttagtggatttcgggataacttttgcaaacagcttgacaacagtgtggtgggcatacgctccacaatcagcaagttatcccagctcctgaaaaggcacgatgaagagctctggcggcatttagaggttgtgaccaaggttaatccacagttttacgcattcagatggatcaccttgctattgacgcaggaattcaagtttcgcgactgcatccatatatgggatgcactgttaggtgatcctgagggacctcaggccaccttacttcgaatctgttgtgctatgctaattcttgttcgaaggcggctcttggccggggatttcacagcaaacctaaagcttctccagagctatccacccacaaacattgaccacctcttacatatcgctaacaaactgcgagggcctattccctactgattgattatcttttgtttctcatgtttgttcttatatgttagtttgcaatgttcaaatatgtttgtaaatgattctcccatgccctatgtgattggatggttgatttaaagcatcggttctcatatag

SEQ ID NO: 12264 - DNA, 1853 bp, Oryza sativa
  ref <308>: DATABASE ACCESSION NUMBER: AK109612
  ref <309>: DATABASE ENTRY DATE: 2002-08-28
gtacaaacatttactgtaccagctagcgctccagtccagcctccaaccggccatgcccatggcggcggcggcggccttcgcggcgcatgtgctgcgaggccggtggttcatggcgtacggctccttcctcattatgtcggcggcgggggcgacgtacatcttcgccatctactccaaggacatcaagtccaccctcggctacactcaggagcagctcaacaccgtcggcttcttcaaggacgtcggcgccaacgtcggcatccacgccggcctcatcgccgaggtcacgtcgccatggttcatcctcgccatcggcgccgccatgaatctcgggggatacctcatgctctacctctccgtcaccggccgtgtcggggccaagaccccgctctggctcgtctgcctctacatcgccgtcggcgccaactcgcaggccttcgccaacaccggcgcgctcgtcacctgcgtcaagaacttccccgagagccgcggcgtcatactcggcttgctcaaaggattcgtcggcctcagcggcgccatcttcacgcagctctacctcgccttctacggcggcggcaacaccaagccgctcatccttctcgtcggctggctgccggccgccgtctccctggcgttcctcggcaccatccggatcatacgcacgccgcgctcgccagccgcggcgcgccgcgaataccgcgcgttctgtggcttcctctacgtgtcgctcgcgctcgccgcctacctcatggtcgccatcatcctccagaagaggctccgcttcacccgcgccgagtacggcgtcagcgccgccgtcgtgttcgccatgctcctcctccccttcaccattgtagtgcgcgaggaggctgctctgttcaagaataagtcgcctgaagaagaggaagccgacgacgtcccgcgggcgctgtccgtggtgaccgcgcccgcgaagccggcggcacagccttcgcctgaatcccagagaccgacgacggcgacggcgaggatcctccaggcactgaggccgccgccgcgcggcgaggactacacgatcctgcaagccctggtgagcgtggacatggtgctgctgttcacggcgacggtgttcggcgtgggcgggacgctgacggcgatcgacaacatggggcagatcggcgagtcgctggggtacccgcagcgcagcgtcgccaccttcgtgtcgctcatcagcatctggaactacctggggcgcgtcgccgccgggttcgcgtcggaggcgctcctggcgcggcaccggctgccgcggccgctcatcctcgccgtggtgctcctgctcaccgctccggggcacctcctgatcgcgttcggcgtgccggggtcgctgtacgcggcgtcggtggtggtggggttctgcttcggcgccgcgcagccgctgatcctggcgagcgtgtcggagctgtttggcttcaagtactactcgacgctctacaacttctgcggcacggcgagccccgtcgggtcgtacatcctcaacgtccgcgtcgccggccggatgtacgaccgggaggcggcgcggcagggacatggggtggccgcggccgcgggaagaaggcgttgacttgcatcggcgtgaggtgctacagggagtcgttcttggtgatgacggcggtgacggtggcggcggcggcggtggcggcggtgctggcgtggaggacgcgggtgttctacgcgggagacatctacgccaagttcaaggacggaaaaacggagctcggagtggacagcaatggcagtggcactgccaaggaataatatactaggatactgtactcgtatttgtttgaggaaaccaaggaatatactgtacatattac

SEQ ID NO: 12265 - DNA, 1345 bp, Oryza sativa
  ref <308>: DATABASE ACCESSION NUMBER: AK109613
  ref <309>: DATABASE ENTRY DATE: 2002-08-28
atgatctcctccgtcggtgcaagtgcaacaatggcttcctcctccgctgctccgatcctgctgctggagctggccgccgcggtgctgctcgtgctccaacgagtggctgccgcggacgcggtggtcaccacattccccggggacgccgcggcgctcgcgtcgctgaaatcggccgtggacgccgccaccgtgccggcctactcctgcctcgcgtcgtgggacttcgcccgcgacccctgcgccgctttcccgtgcggcgtccgctgctacgcgccgcccaactcctcctcctaccaccgagtcaccggcgtgtcgctcgacccggcggggtactccggcacgctccccgccacggtcctcgcctcgctccctttcctcgcgttcctctccctcgccagcaaccgcttccacggcgcgctcccggcggggtccccgctgccgccgagcctccgcgtcctcgacctctccgggaacgccttctccggcgagataccggcgtcgctcttcaccccggcgtcgtctctcgaggagctctacctctcccgcaacgcgctcaccggcgccatcccgccgcaggtcgcgtcgctgggctccctgaaacggatggagctgcagcacaacggcctcaccgggaccctgccgcggatggacgcgatgcgctcgctcgcctacctcgacctgagcggcaacgcgctgtccggctcgctcctcgacgcgcccgggcggctgccgggctcgctcgtctccgtcgtggcgcgcggcaacggcttcgcggggccgctgcaggccgcggcgctggccgccctgcccgcgatgcgggtgctcgacctcacgggcaatgcggtgtccggcgcggtcccaggcgccgcgttcgcgcacccgtcgctgcagcaactgcggctggggtccaacaagctcggcgccgtcgaggaggcgcccgacggcggcgcgtcgagccagctcgtcgagctggacctcggcgggaacaggctgaccgggcggctgcctggatgcgtcgcggcgatgccgcggctcgcggtggtcgggcttgaccggaacatgttcgccggcggcataccggatcagtacgcggctcgggccgcggcggacgggcccacggacaagtgggtcccatttgtcaggctcatgctgcaggggaactttctctgtggggccctgccgagccagctgaggcagctgaaggaggacggcgcggtggtgagtttggcggacaattgcttgccaaagtgtccacaccagttctccttctgccgtggggccccgcagaaaagcaacgccacgtgtcccaagtgctttccgtgaaatattgtgttctttctttaat

SEQ ID NO: 12266 - DNA, 1304 bp, Oryza sativa
  ref <308>: DATABASE ACCESSION NUMBER: AK109614
  ref <309>: DATABASE ENTRY DATE: 2002-08-28
atctgtctctctctcgtcctctcctcatctgatgccgcgaggagggcggcgccgtgacggcggcaggcggcggcggtggcagcatggcggcggagaagcggcgcgtgggcggctggggagcagacgagggaagaggtggtgcgcgtcctcctcattgaacccgtcgtcgtcgtcttcagcagcgttgacagccgcggctgtgggaagcagatagggaagtgggagcggcgacggcggcgggagtggagctcggtggaggaggcacgatgatgacgacgaagggatttggggcgccgaagctgttgagatcggcgtcggcggcggattgtcgccgctccaccggcaatcgccccactccggctgccggctctgcccgccactgccgcgctccgtgccgccgacttcgcgcgccgccgctccgcctcgtcgtcacccaactccacccaccgccgctccgcctcgcggtcgcccactccactcgccgccgagcacgcgcgcccggggatggaggggaggaggtgccccatcgtcctcgttctcccctcgcagtgctcccgccgccgacgccctctccttctcccgcctcgccgctactgccgcccctgcgtcgccggccgccgactcctcctctcggtgcggcggaagggagaatccaacctcggcgcggcggcctccccttcagtgtcgcagcctccgccgtcgcggcgcccggggatggagaggagggtctcgacgccgaggtgccccatcgtcctcgctctccccatgcagtgctcccgccgccgatgccctctccttctcccgtctcgccactaccgccgcccctgcatcgccggccgccggctcctcctgtcggcgcggcggaagggagaatccaacctcggcgcggcggcctcccctccagcgtcgcagcctcagccgtcgccgccgcggtggcctcccctccggcgtcgtagcctccgccgtcgccgccgtgtcgcccaccgccgcttcctctcccgcctcgccccgggcgacctctccacgcccgccggccggcttgctacttgcagaggagacaagcgagagagagagaagggagggagaggaaaaggaagagagagggtgctgacgtggcatccttacatgtgggtctcacgctgagtcagccgccacgtcggacaaaaccaggctcaaaaccgccgagggacctagtttgcacggttttataagttgggagatacgttgtatctggttttgtggttggaggacaattttgtaattcgatgacaagttgagggaccttcggtgtactttttcctctc

SEQ ID NO: 12267 - DNA, 1754 bp, Oryza sativa
  ref <308>: DATABASE ACCESSION NUMBER: AK109615
  ref <309>: DATABASE ENTRY DATE: 2002-08-28
aataaaaatggatgagggagacagataggcaacccatcaaatgccatcgcgaagtttctcagttgtttttcagttgttggccacctaagcagatcaaggacgaccggcgacttgtcaatgcatacgtccaaggaattgacgacggatcatgagccgccggtggtggagctcaccacggacgcggagtacgcgcaggagcagccccggctcgtccggttctttggcacgaccatcgtgctgagcctggggctactgcacgccgcttgctccctgcactgggctcatcgtcctctccctcgcggcgtcggcacggccgcgttcggcgccactgcggtgctgtgcctcgcggtgggcgcggtgtcgctgctgctctcgtggagtgctgcggcgaggatgacggcgacgaaggcgctgcccacgcggcgtgtcgagcggcggctgctcaaccggctctgcgccgcggtccacgcgtcgtccgcgctgctcatgctcgcgccggtcggcctgctggtgctcgtcgccgacaaggcgtacgcgttcgccgtggtcgtgccgttggggccggtgggagcgagcctcttccccgtcgtgcgcaatggagcccgcttcggcttcgcctggggcgcggcgcagtacgaggctcacgagcatgacctccggcgctacttcggcctcgccgccggcgtcacagtccccacctacgtagcgctactttctcatgccgtctccgatcatttcaggccggccggctcggctcaacgccggcaccatgatctgggcggcgtggacgccgtcgaatgcctcctgctgtacgcgtctaccgctggccttgcgctgatgcttcttgcgacgtcgccgccggcgctgtgcttccgtcacacgagggcagttgtcgtgaaccatttcctcggcgtcctcgccgacgcgctgctggcgttggtcggcctcgccgcgctcgtggccacggctgagatcgcaggtggcttggcagcattggcaccgaccactaacgtcatagccgcatgtgccatatttgcgaaagagcacgaggacgagccggaccgtcgtgggcaagacgataccaaagatcacctttgttcatcgtcatcgtcgcgacagcccgtggcgcccctagtggtgaattcgctggcgttcggcacggtaatgctgtcctactcggcgcttgatggcggccgtgccttcagctggccggagaaggcctgcctcgtcgccgtcgcttccctgctcgtcggcaaccttagccagatggcgctgcagcgccgcgccgtccgcacggatagcgtggtcaccactgcactgtccctctttgacaaggttaataaggtgacgttgctgattgctgcattgggttgtatggctgtgttagctacgcacaaaattactgcatcccactaggtatagctagctaaccgacgatcgaggacccgactacgagacttactccttccgtcccaaaatataattaagtagtttcggttggatggaacacgtcctagctagtactacgaatctagatagacagcccatcgagattcctagtactagctaggaaatgtccaatccaaccaaaattctttatattttgtaacggagggagtatatgttgttgcatgcgatatatggtctagatgttatatccaggagaagttttttttatgatatttgaggaggtatcataaggtatgtgctaccatttgtagacaacaataagtgtagtagatcttactacctat

SEQ ID NO: 12268 - DNA, 1469 bp, Oryza sativa
  ref <308>: DATABASE ACCESSION NUMBER: AK109616
  ref <309>: DATABASE ENTRY DATE: 2002-08-28
gaaaagctagaacagctgctgctgcgagttgtagtagtagtagaagaagaaaaagcaagaaaaggttgttgcatagatcgatccatcgatgcgcacgatcgagtttattaattagctcaacgaaagaagaagcatcagcaagaagagccaagaactcgatcgatccaagaaggtaattgatcagctgattggttggtttggttgttgtggtggagatgtgggaagctgtaggcggcggcgacggcacggctctcctgccgtggcccggctcggccgcggccgcgccgctctacatgcccccggcagcagcggcagcggcgcccttcgccgccggcgagcagctgccggtggagcagcccttctacttcgacggaggcggaggcgtggcggggcataatcaccatcctcatcatcatcagtacgggatggaggcgccgccgccgatgacgatgatgcagatgggcggcgggggttcgtcgtcgtcgaggatggtggtgtccgggctgctcgggacgctgcaggcggagctcgggaggatgacggcgaaggagatcatggacgccaaggcgctggcggcgtcgcgcagccacagcgaggccgagcgccgccgccgccagcgcatcaacggccacctcgccaggctccgcagcctcctccccaacaccaccaagacggacaaggcgtcgctgctggcggaggtgatcgagcacgtcaaggagctgaagcggcagacgtcggcgatgatggaggacggcgccgcgggaggggaggcggcggcggcgccggtggtgctgctgccgacggaggacgacgagctggaggtggacgcggcggcggacgagggagggaggctcgtggcgagggcctcgctgtgctgcgaggaccgcgccgacctcatcccgggcatcgcccgcgcgctcgccgcgctccggctgcgcgcccgccgcgccgagatcgccacgctcggcggccgcgtccgcagcgtcctcctcatcgccgccgtcgaggaggaagatccagacgaggccgggaacgacgacgacggcgaacacggctacggcgttgccgcctcgcaccggaggcacgagctcgtcgcgtcgatccacgaggcgctgcgcggcgtcatgaaccgcaaagcggcgagcagcgacacctcctcttccggcgccggcggcggcggtgggagcatcaagaggcagcggatgatcagtgcacatgatcagcaaggttccttcaattctagtggctggtaaaaactcaagtcgatcatcgatccatccattaattcctgcagcctcatcagaagtagcatgaaatatccatgctcttgcttatgcaactcaacttatattagtatagttataaagctatatatagccgacttaaaaaaaacttagagtttggatcttctttttggtgttatggtgtgtgcatgagggaaatcaaaattaaaggaaggagaaaatttg

SEQ ID NO: 12269 - DNA, 2192 bp, Oryza sativa
  ref <308>: DATABASE ACCESSION NUMBER: AK109617
  ref <309>: DATABASE ENTRY DATE: 2002-08-28
ggcaccccgccgtagccacccaccaatacgccgcaatttggcccaggccacccaactccaaaatcgcgcatcgcatcgcgagtcgcgacgcgaaccgagcccacgaaatcacgcgacgtcgtcgtccgaatcgaatgccgcgaccccgccgctgttgctgctgatgctcgatcgcgcgacgggggggcggcgccgcgccgcgggcgaagggatggaccatcggcccgacctgtccctcgccctccacccgccgccgccgcccgagggctcgtccgccgccgccgccgaggaggtgggggaggaggaggccgaaggcggcgaggggcggttctccctcatgggccagccgctcttcctcaagcggccgcggccgcggcccccgcgcccgccccgcgcgcgcggggtgggggacgacgtcgacgtcgacgtcgacgacgactcatccccgtgctgctcctcctcctgcctctcgcccgcggcgaagcggcgggcggcggcgggaggactcgaggcgcgccgcgcggccgtgcgcgcgtggggatgccagccgctcacggaggcggacccggacgtgcacgagctgatggagcgggagcggcgccggcaggcgggcggggtcgagctcatcgcctccgagaactacgcctgccgcgcggtgctcgacgcgctcggcagccacctcaccaacaagtactccgagggcctccccggcgcgcgctactactgcggcaaccagcacatcgacgccatcgagcgcctctgctgcgaccgcgcgctcgccgccttcggcctcgacccgtcgcgctggggcgtcaacgtgcagccctactcctgcacctccgccaacttcgccgtctacacggggctcctcctccccaacgacaggatcatgggcctcgactcgccgtccggcggccacgtcagccacgggtactacacgcccagcggcaagaaggtctccggcgcctccatcttcttcgagaacctctcctacagggtgaacccgcacaccgggtacatcgattacgataaggtagaggagaaggccgtggatttccaccccaagattctcatctgcggcgcgagctcgtatccaagggattgggactatgcacggatgcggcttgttgctgataagtgcggcgcagtactcatgtgtgacatggcacaaatcagtggtcttgtggcagcgaaggaatgtcgaaatccctttgactactgcgatattgttacttcaaccacacacaagagcttgaggggtcctagaggtggtataatatttttcaggaaagggaaaaatctaaggaaacgggtcggatctttaactcaagtggttgaaaatgatcagtatgattttgaggaccgtataaattttgctgttttcccttcaatgcaaggtggaccccacaataaccatattgctgctctggctatagctctaaaacaagtagccatgccagaattcaaagcatacattcaacaagtcaagaaaaatgcccaagctttggcgatggccttgctcaggaggaaatgcagactggttactggtggcacagataatcatttgatgctctgggacctaagaacatttggcttgacagggaagaactttgagaaggtctgtgaggcatgtcatatctctcttaataaaacaccaatatatggagataatggttcgatttctcctggaggtgtgcggattggaactcctgccatgacaactagaggttgcttggagagtgactttgagataatggcagaattccttttgagggcagcacatatagcaagtattgttttgaaggagcatggaaggcttcagaaggattttctgaaaggtctggagaacaataatgacattattgaactccggaatcaggtggagacatttgccttacaatttgccatgccgggatttgatgtataatatatgagagccctatatatatttgcagccctaggatggttcagatatcatttgcaacttgacacatgtttgaacaagtgagtttatgtgtaaaatgccgagttatcatagcatcaagttaggaaagccattttttcgttggaagttgatctcaatctcctctctcgagcaattttgtacaggcatgttgcttatgttattgtatttatttattgctcttcattatatagattgctacgtgagataatgtttcgaagttgatgtc

SEQ ID NO: 12270 - DNA, 1804 bp, Oryza sativa
  ref <308>: DATABASE ACCESSION NUMBER: AK109618
  ref <309>: DATABASE ENTRY DATE: 2002-08-28
acacgcaccgcttcgccccgccgaagagacggacgcctccacacgtctcttcctcttccttgatactgagagagagagagagaggaggaggaggaggaccagccatccacccgcgcggccgcggcgaatccatccaatccgcgtcgatgcggcggcggcggcggtagcggggagggggtggaaatggtgggggatcaggaggggaggcggcagcggcggcgggggtggggggaggaggaggaggaccgcatctcggacctccccgacgcgctgcggctccagattctgagcctcctgccgctcaagtcggcaatccggacgggggccctctcgtcgcggtggcgggggttgtgggagcagcggtggcccgacccgtcgtcgctcgacgtgcggctgccatcggggggaggagccgcgtcggcgtcggtggcggcgctgcgggccgagcacctcgcaggcatcgaccggcgcgggaggcggcggatggacctcttctcgctcgccttccacgcggggcagctcgcgccccccgagctgaagcggttcatcgagtacgcggcggcgtgcgacgtggaggaggtgcggctgcggctcgacggcggcggcgggcgtggggcgagagggggcacgcggcggcccggcgcgctcgccgtgcacttccccatcgggagcaagctcctcgcgcggctgtcggtgcgggggctccacctcacggcgtccgccaacgcgatggtcgccacgctcgaggtgatccatttccactccgtctccctcaccgacgccgcgctgcggcgggtggtctccgcctgcccgcgcctccgcgagctcgagctccggtactgccgacacctccgccgtatcgatttcaccgtcggggcctccaatctcaagagcctcaccgtcgtcgactgctcccgcgccacggagctgcgcgtgccatcggcgcccctcctccggtcgttccggttcagcggcgcgttcctctgcagcaacattttcggtagcaccgcggattgtgtcgagcatctctacctctgctccggcgggccggagacaggtttgccgcgcaccaacttgccgtcggcagtcccccgcctgtcaaacctcaccgtactcaccctatgcagcattgctctccagtatgtctctgcttcagtagccacccccaacgtggagaagagcttgaacagcttgagagagctccagctgctcatgttcggaatggccaactccaacctcgcagatatctatagcttcctcaaggcctgccgttgtcctcagttggagaggctcttcgtgcagctcccaacaaacacttatgattcgttcacgacgaattatttggaggtagcagaggaagaaccgcctgaaggcggattagaaaaccttcggttggtcaagatgacaaacttcaagggttatcgcaatgaactacgactggtggatttcctgctgaggaaagctagccgtcttaacaaactgttcctgattgctcccaaggaggttcacccacaaggcctccgaaaggtccactcggaggcactgccccattttctcaagacagatgtattgcatcttgaaagagcttcagcaatcgcccagataatttttgatgagtctgttagtcctcagatactacccttgcattcggaggtctttgtcagagtttagctgaaataagcaattgcaccgtagtttaattgctgctccttaattattaccattatagcttttaggcaacagacatgaaaaagatctgcaagcatacaaagtttggtataatatatttgcaatttatgttttg

SEQ ID NO: 12271 - DNA, 2768 bp, Oryza sativa
  ref <308>: DATABASE ACCESSION NUMBER: AK109619
  ref <309>: DATABASE ENTRY DATE: 2002-08-28
tatattaacacgtacagcttagcttttatctgatcccgaactgaaatctttttccccgctggagttaattctttttctatgcatgatagattcctacgaggttgtacttatgggattcgcttcctcggaatgccatgggaaaggtcaacaagaaggagctgaagaaattattaggagcttagctgtggttccaggaaggcagacattgtaatggttagctaataaatatttttcgcattgataattttgctgaataaccaaaaccaaaaggaagtcacttctagcaaaacactagagatatattcatagatttggttttttattttccaaataagagattcatagatatagtgttttctaataaatggccaactgagttgccgatatttttccttggccaatgccactgcaatggacaaagatgatcaacgtgacgatattgcgtatggtccagagaatcaaccctgcaaactgctattttcatggggcaaccaaaccataggcttcatattagcataaccataggaaaggttccacattgtcacaagttcccagcaatccacatgcatgcttcagcacaaaactactaagctatagtcgtctctccctcaccttcgtcttcccactccacgttctgcccctcctcgccgtacgcccagccgcaccagaggaagtagacgaagttgacggcgccaaggccggcgagaagccagtagtagtagtcgtagcggccggcgttcaagtcctccgccagccagctcgtcctccctctccgcccgctcacctcgtggaccaacttgatgatcaagctccccaccaggctccccgcccccagggccatgtagagcagagccatgctgaagctggccatgctcttgggcagctcggtgtagaagaactcgatcaccccgatcacgccgaacgcctcggcgagccccgccagcgcgtactgcggcacgagccagaacgccgacatgccgccgccgcccagcgcctgcctgcgccgcgcggcctccaccacggcggccgcggccatcgccgcggtgccgaacaccaggcccccgccgatccgctgcttcatggtcagcccccgcgggttgcccgtcagccgccgcagcgccggcgcggtccaccggtcgtagcagcccgaccagagcgacatggtgagcatgttgaacacggcgaacgtgccactgggcacgcggaacccgccggcgccgacgcgccggtccatcgcgtcggcctgcggcaccgcgaagtactggttcatggcctgcgcgaggaagatggtggacgaccagatcggcatcacgcggatcgccgacttgagctgctccacctggtccaccgtgcacagccgccctctgtcgctgatgccgtccgcgccgccactaccagacttgtcctccttcgtgttgctgatcatgcacgccttgttcaagaacctgaacagatcgatcacaccacatgaacttcgaatcatgcatctttgaacagcaattcgcaccattgtcaagctgcattgctgatcgatcgtcgcttacctcagcctgtccgtcggaacggtgagcttgcagtccttgaggtgatggtacacgccgtcctcggtcttcgccggcagccacgccctacggttcctgaccgccgcggcgacggcggcgcctatcccggcgaacatccgcttggagcccctgtccttgatgtataggccggagccgaggaggaagctcgcagcggagagcagcatgaggcacgtcggcacggcgagccccaccttccacccgaggttgtcctgcacgtacacgaccaccgtgacggcgaccatgaacgccacgccgatggagccgtagtaggcgttgaagtacacctgcaggatcctggacctcctctccttggggtgcctggagaactggtcggccccgaacgccatcgagcacggccggacgccgccggcgccgacggacaggaacacgaagccggccagcagccaggccatgtgcctcgcctccggcggcgcgcacagctccggcgaggcactcatgtcgcacggtggcggcctcgctccgggtatcatggcgctcagccacaggaaaaccatcccctgaaacaagcaaagcaaagcacatcagctcggtgttcgatctcctccggtgtcaatggaaatctcatcttctttttgcactcacaacgaagcaggcgatggagccgatcgcgacgacgatgaagcggccgaggtacatgtcggcaatgacggcgccggggatgggcgcgaagtttgatactgcgccccacacgaagaggaggcttccggcgttggcatggctcaggtggtactgcatgttgagatgataaaagggagggctctgaaaccacccttggccttggccttgaagaacacttgtgcttcagcctcagcaacaagagagtgctccatggcgcagtagaaatgaaatgctaattgctacgcctacaggatttagcaaagagtggcaggatcttgtaccgcggcgcataacctcgttaaattatatcaaccggtagacggtagttaggtcataaggtggacaactactactagctcttaatctaggcaaagcagtagcaagtaggaatcctagtagggagggaaacgcctcttccggaacacagcatgtgaatatgcgtcactgtaatcttcagtttacctgttacttgactaagttggagcacttatgctgaaaataactaagatgatatgctttagctatttctgaaatgcagatgagttc

SEQ ID NO: 12272 - DNA, 1405 bp, Oryza sativa
  ref <308>: DATABASE ACCESSION NUMBER: AK109620
  ref <309>: DATABASE ENTRY DATE: 2002-08-28
gaggagaagaagaggccaagcaaagcaaatcagtcgcggccatagatagctatagctgctatcttaatctagctcgcctttaatttggcccccggcctctctctctctgcctgtgtcctaccagctgcacaaaaatctcccagaaaacaggcagaggggagagagacagatacgcatcaattaagctcattttcttcgatctgctggtgaaagaagaactgaagaagagaggtagctggactgaagaggccggcaatggcggcggcggaagtgcagtcggctgccgggtgggggaggcagctgcagcaggacggcggcgggtggaggaaagggccgtggacgagccaggaggacgcgctgctcgtcgagcatgtcaggcagcacggcgaaggccggtggaattctgtctccaagcttacaggtctgaagagaagcggcaagagctgcaggctacgatgggttaactacctgaggcctgatctgaagagaggcaagatcactccccaggaggagagcatcatcgtccagctccatgccttgtggggcaacaggtggtcgacgatcgcgcgtagcctcccgggcaggacggacaacgagatcaagaactactggaggacgcacttcaagaagggcaagccgtccaagaacatcgagcgcgccagggccaggttcctgaagcagcgccgcgagatgcagcagagccagcagctgcagcagccgacgctaatgccgacgccgacgccgcagagcaaggacatcatcgttgccgagaccggtgacgcgcgcaccgacgacgacgcgggcggcgccgcagcggctgtggcgccgtcgtcgtcgtcgtcgtctttgtcgatggcgggccgcgaggcggaggacttgatcatgcaccaggacgcgatggacgacctcatgatgtgccccgccatgtcctaccacctcatcctccacggcgccgccgtcgccggccatcagctgagcgacggcggcggcagctgctgcgcctctaccagcgaggactacggctccagcgaggacgacggcgccacctggggcagcctgtggaacctcgacggcgccgccggagcatgcacgctgtggtagatcaatttcccggtctgcatgacgccatgagagaagagtagtcgcgatctcgagtacgtgcatacagacgacatagctgcggcgtgctcgtgggataaagatgggacagcaaacttatcatccgtggatcgatcgtacgtccacttccacaaacgacggcctgagtcgatgacacgttaaagccatagtactattattggtcacacttctttaatcaggggagattaactaatgtgttcttttccccttgttgctagctagctagagctatagtataacaaaggagagagagagatttatatgc

SEQ ID NO: 12273 - DNA, 1590 bp, Oryza sativa
  ref <308>: DATABASE ACCESSION NUMBER: AK109621
  ref <309>: DATABASE ENTRY DATE: 2002-08-28
cgagggttcgagaggttttctcgcccccaattccgccgccgcctcccctaccggacgtcgatctgctcggccggcgtcgatccgcgtgcccagctaactccccggcgatcgcctgtccatggcggggacggagagaagtcgtcgccggcgagaggtcaagctcaggaaggcgtggaggaaggaggctgccacggcggggccgaccagcgtgaacgacgtccccgacgaggtcctcgagctcgtcctcctccgcctcggcgattccctcgccctcctccgcgccgcggccgcgtgcaagcggtggcgccgcctcgtcgcggacgccgggttcctcgcccggttccgctccctccacgagccccacgtcgttggtcactaccacgtcgtcgaccctaccttcgcgggggcgctgcgcggcggcaaccacgtcttcgtgccggagcgctcaccgtcaccggcggacgctctcgaccgccgccgcctctccctcgacttcctgccggagccggatggcgaccgcgcatggtggaagctcgccgacacccgcggcggcctcgtgctcctctacccgaagacgtggaatgcctccttccccgacatggtcgtctgcgagccgctcacgcggcggcaccagggcatcctccgcccacaagagatgaactctccctacaggatatgcttcggcgtcttcttgatcgatggcgccgccgccgatgagacgggcggctgcatcagcatgtcgaacttccgggtgctctccgctgtctacgaacccgaaacgccatactgcggatactggcacggtcatggcacgccgccccgcccgcgcgcctacgtcttctcctcgggcgtcgacggtggctggcgcgagagcgactccggcagcgacgtcgaacttccaagcctcgaattgataaacttcgtggggcgagcgggctgctctctgtactggggattggatggcaaggacgccatgctcgctctgcacaagaccacggcagagttctcgctggtcacgatcccggcgatcgtcggagagtcataccacccgtcaaccttccgtgtcatcggtggcggcgacgacggcacgatgcgcgtggtccgcttgatcggcgacgacctgaaaatcttcacgcagctcaaggggagcggcggcgagtgggtggtggagaagctcgtgaggctgccggtggcgacccgtgggttgccagggcacgacgtcgggttgttccaccactacgcaaggatcgtcacggcgaacgagaggtacatcctcgtgacgccacgggtggcgacgtggctgttctccgttgaggtcgagacgccggtggttgagcgcgagcatgtgaggaacaagtacgccggcgcggcctacccgtacgagctgccatggccaccggtcttgcaggcttgcattgctgggagacgccgcagcaggagatgatgctgatatctacatctatgcgcgcagaatcacagtttttcttcatctccggcaagggtaatatcttacatttgtgagttgtgaccaatttattaaagtgtctcacagctttattacatcaatagaaatcaggcgagcttagtgtc

SEQ ID NO: 12274 - DNA, 1391 bp, Oryza sativa
  ref <308>: DATABASE ACCESSION NUMBER: AK109622
  ref <309>: DATABASE ENTRY DATE: 2002-08-28
gagcatcggcagaggcacggcggaggccagcgaacgagcgagagtggaggcacggcggaggcgcggagaggccggtgagctcctcccaagtccaaatcgttcatcgccggcgagctccaccgcgtggaaagagaggaggcggggtggccgcggtcgtcggcgatgagttcgaaggcgagggcccagaggaggcgcggggaggccggcgagctcctcccaagtccaaatcagtcgtcggcgagctccaccgcgtggaatggaggaggtggggtggccacggtcgttggcgatgaactcgaaggcgggggtccagaggaggcgaggggagagctccttagggatggagcggacggcgacgaggagcagggcggcggagtggaggaagcggcaaacggcgcatgaggagtcctccagcgccgcgcgccatcttgtcgtcctcctccagctcggtcaacgcctccccgcgctcgccgccggcgtcggtgtcggcttggcggtggcggcagcacaagaacggccggcatatgggtgccgatgaccgtgcattgcgccgcctgtggaagggccgctgggtctccatcgccaccagggggagggacgccgccgccctccaccgcttcatcgccgccaccctcctccgctcgcttctcccccacccggatgttgcgccgccttcgtccgccatgccgaatgccgtttcgccgcagaccggggggacaagcgcccgtcttggagaacctcgtcgtcagagcctggtgcttgcgcccgttgccgaccagcatgccggccactggcctcgatgaccaggaggacgagcacccgccgcccggccgctccccgcgccgtcgcctgcccgctccgccggccggacggccgctccccacgccgttgccgatctgcttggaagggaggggatagaaagaagtgtgggaaaatagactaatgtttcaatgacatgtgggtcccacatgggtctcacgctgactcagccaccacttcggacaaaaccagggttaaaaccgccgagtgatctagtctacaatggttttgtaagttgatggatgccttgtgtgcggttttgcggttgggggacgattttgtaattagatgacaagttgagggaccttgggtgtactttctcctatgtggagctaggctgtgctgggccgaaaatcctttgtttgggctttattaggcttcggacacgatgaacgatcaacgtaggtggtctggtctggtctagccgtgtgccttttaacaggggataacgtccaattgtaggtcctttgtctaggagtcgagttttgaatcgtatccctcaattgtaaaaccagctataatgcgtagcccaactagcaaaacctatacaaatcaagtctcttgatcttttt

SEQ ID NO: 12275 - DNA, 1700 bp, Oryza sativa
  ref <308>: DATABASE ACCESSION NUMBER: AK109623
  ref <309>: DATABASE ENTRY DATE: 2002-08-28
gattctcccggatagctcgtcctagcctagcctcgccgccaccgcttcctcctccgtggcactggccggcgagctcccaagcagccgcccccctccttcccatcctctcctcaatccggccatcggcgcccttctcccacgccccctactccgggcgccgccctcccccaccgccggcgccgctctcctaatatggcggcatggaacacctccatcctcttgccgccgccgccgccgttgttgtcgcgtgctgccgtcgcgacgcccgcgctcaatccgtaccctctccgcctgcaccgccgccacccccaaaagcccctctgccttccatcggagtcgtaccctgcggataccgacgccgacgcctcgtcggcctccctcgactcgaggccccgccgcatcgccctcttcgtggagccctccccgttcgcatacgtctccggctacaagaaccgcttcctgaacttcatcaagtatcttcgggagatgggtgatgaggtcattgtgattaccacgcatgagggcgtacctcaagaattctacggagcaaagctaatcggatcatggagcttcccctgcccgtggtaccagaaggttccactttcactagccctaagtcctcggattatcggagaagttgctagatttaagcctgacatcattcacgcctcttcccctggaataatggtattcggtgccctaataattgcaaagttgctctgcgtccctctagtaatgtcgtaccacacccatgttccaatgtgagtttcctgagctaatactagaaggcaaagtttacgacaatcagtgcaatatcagcattgaagggtctctcccaagtcactgccatcagctgcttcatgatggcatacttgctgcttcctctcatgtgaaaattctgcataaggcttgaaaattttagccgtgctcttttttactcactaccaaagcatcaatttgaaaggtgaaaaggaaagaaaaaaacttcagttcagtacttgaataattcagaaatttattctttatcttcagtaacatcagtggaaacacgattctgggctcctaggaaaaaaaatccgttgatggctggtttaagtcctatgaaattacggctttatccacatagcaaactgattcttcataaccaatggcagttatataccgagatatacattcagctggctggtgaagcctatgtggttgattataagtaagcttccagccatgtcctatgcggatacacctttacattaatactagccaactgatgcatttctcactccccaaagaattcttgcaccgagctgcggatctcacactggtaccatcagttgctatcggcaaggatcttcaagctgcccgtgttacagcaggttgtcatggctatacatagttttgtttttttttacctttaccatcttattctgacatagtttcaccttcttttgctattaccaatttattatgatgggtcatatttccagccaataagatacgcctttggaacaagggtgttgattcagaaagcttccatccccgtttccgtaatgacgaaatgcgtgcaaggctaacgtatgtaatctcctctgtgctcagttgcctttttgcagtacagatgcaatggtgctaaattgctactggttgttgcctcattcattatgtagagaatattttgaaatgagcaattatattccctgtct

SEQ ID NO: 12276 - DNA, 1799 bp, Oryza sativa
  ref <308>: DATABASE ACCESSION NUMBER: AK109624
  ref <309>: DATABASE ENTRY DATE: 2002-08-28
atatactatactacatcagagtgaaatgtgatattcctatagaattattctacgtgttttctattcggtatttaagtaggatgctgtgatcaaaagggatacatgcatttgtctcataacctcgagttttatgtttatctaatttattacctacacatctattaatagaggtaggagatgtaaattattttcattatttttaaaaaatctgttcaaaaataatgtgtccacatgcataattagaattttttttacatattgttaactaactaattttaatcttgttacccacatacatattttttcctcccagggccttccggctagctccacaagatggtgggctagacgattttggtttgaagccttgccccttctaataatttgatattaggtcattccctaatattcgtgtttttaatacggtgttcttaaatgataattaaaggttacttataattagtgggtacaagttagtgtccagcactcaatgctagctgcgccggccatggctggctggttggccggcgacgtctttgataagtacatttggcggctcgcaacaaggggggttgactttgaaataatttccgcgattaattgaaagtttacatggacgacgttgactcggggcgcatgcagggcatggcgagacggtgacgtgctccaaggcggtcaactcggacctgttcgacgccgtcctgggcgggctgggccagttcggcgtgatcacgcgcgcgcgcgtcgccgtcgagccggcgccggcgcgggcgcggtgggtgcgcctcgtgtacgccgacttcgccgccttctccgccgaccaggagcgcctcgtcgcggcgcggcccgacgggtcgcacgggccatggagctacgtggagggcgcggtgtaccttgccggccgcggcctcgccgtggcgctcaagagctccggcgggttcttctccgacgccgacgccgcgcgcgtcgtcgcgctcgccgcggcgaggaacgccaccgccgtgtacagcatcgaggcgacgctcaactacgccgcgaacgcgacgccgtcgtccgtggacgcggcggtggcggcggcgctcggcgatctccacttcgaggaggggttctccttctcccgcgacgtcacctacgaggagttcctcgaccgggtgtacggcgaggaggaggccctcgagaaggccgggctatggcgcgtcccgcacccgtggctcaacctgttcgtcccgggctcccgcatcgccgacttcgaccgcggcgtcttcaagggcatcctccagacggccaccgacatcgccggacctctcatcatctaccccgtcaacaaatccaagtaaacacaacacattgacattatcgccgacattgtcacttttctcgaagatcatcatcgtcacgatgcactgtacaatatgtgggtgggtgtaggtgggatgcggcgatgtcggcggtgacgccggagggggaggaggaggtgttctacgtggtgtcgctgctgttctcggcggtggcgaacgacgtggcggcgctggaggcgcagaacaggaggatactgaggttctgcgacctcgccgggatcgggtacaaggcgtacctggcgcactacgacagccgcggcgactgggtgaggcattttggcgccaaatgggatcgcttcgtgcagaggaaggacaagtacgaccccaagaagctgctctcccctggccaggacatcttcaactgattgattaattaattaattaattgttgcctaattaattaattaattaattaattagttacagcggttaactttagtc

SEQ ID NO: 12277 - DNA, 1866 bp, Oryza sativa
  ref <308>: DATABASE ACCESSION NUMBER: AK109625
  ref <309>: DATABASE ENTRY DATE: 2002-08-28
gtgcaccgaagctgcaaaatctttcacggcggagacgaagtggagggttgattaaaatggacagtaagccgacgcggccgcaccgccggccgccgcctttgccgtccaagacgagcggcgtgtggcccgtcgcgctgctcgtcgtcctctgcttcgccgctctcccgctcttcctcgcgctgtcacgagcgcggccgaccttgtccgacgtgtcgcagatgggcgtcacggtgaccgtccacgacgaggatccagcagggacgccgccggaatcctccccggcgaaccgggacaggctcctcggcgggctgctctcgccggacatcggcgagagcgcgtgcctgagccggtacaagtcgtcgctccaccgcaagccgtcgccgcactcgccgtcgccgtacctcgtctcccggctgcgcaagtacgaggcgctccaccgcaagtgcgggcccggcacgctcttctacaagaagtccctgatgcagctcacctccgcctacagcatgggcctcgtcgagtgcacctacctcgtctggacgccgtgcggcggcagccacctcggcgaccgcatgctctccatggcgtccgccttcctctacgcgctcctcacccaccgcgtgttcgtggtgcacgtcaccgacgacatggccggactcttctgcgagcccttcccggccgcatcgtgggagctccccgcgggtttcctcgtccacaacctgacgcagctcggccgcggcagcgagcacagctacgcgaacctgctcggtgctaagaagatcaagaccgacgaccccgccggcgtgcggtccgagtcgctgccgtcgtacgcgtacgtccatctggagcacgactaccagcagtcggaccagctcttcttctgcgacgacgaccagaccgtgctggcgaaggtgaactggctgatactgcgctccaatctctacttcacgccggggctgttcctggtgccgcagttcgaggacgagctccggtggatgttcccggcgagggacacggtgttccaccatatcgggaggtacctgttccacccttccaacaaggtgtgggagctcatcacgaggtaccacacgtcgtacatggccaagtttgaagaaaatattggcattcagatcacgaccttcgccgggagcaaggtgtcgtcggaggagtacttcaagcagatcgtcgcttgcacgagtcaggagaagattctgccggagatcgacccaaacgcgacgtcgagcgctaacgaggcggcgctagccaccacggcgtcgaaggccgtgctcgtcagctcggcgcagccgtcggagtacgccgagaagctgaaggcgatgtactacgagcacgcgacggtgaccggcgagcctgtcagcgtgctgcagccggccggcgccggtaagcaggcacccaaccagaaggcgctggtggagatgttcctccagagctactgcgacgtgtcggtggtcagcgggcggtcgacggttgggtacgtcggccatggcctcgccggggtaaagccctggctgttgctaacgcccacgaatcggacagcgtcggctaacccgccctgcatccagacaacgtcgatggagccgtgcttccatgctccaccgagctatgactgcagggccaagaaggatggggaccttggtgccgttctaaggcatgtcaggcattgcgaggatgtcggtgatggtctaaaattgtatgactagttaattttgatgtacttaatcagatgggtggaaaagacaagcttcaatgatcaattgatcagttgaaagaagaaaaaactgtagaataattacaagatgtattgacttagatggaggcaaatgtaatatggccttccagttgaaagatgtc

SEQ ID NO: 12278 - DNA, 1319 bp, Oryza sativa
  ref <308>: DATABASE ACCESSION NUMBER: AK109626
  ref <309>: DATABASE ENTRY DATE: 2002-08-28
ccataatctttcctaattactattattagtgttaagtatattaattaatagagatagttaagtatattaactaatagtgttaacagaggtagttaataggggaggagtgctcgctagcagcgagcacgcgctagctaggagtccccagctgagagcacacgcagctaccaaaaccaagaatttttttcggttttagattttttttaaatatttacataaataatctatcggccaaaaaaattacaaaaataaaccctgtcgcccacctctggggcggcaagctaacgtggcaaacgggggaggaacaggcgttgatggagggagggttttttgcaggaaaacccttgccgccctctggtggggcagcaaggggcccgaatgcaaaaaagccagtcggggctggccattctgcaggcggtcccttgccgccctctagccgggtggcaggcctcgctgcctataaaaggcttgccgcccagcccccagccctcattcctcccccctcaaatccagtgaaaaaaaaaagaagagaggggaggagaagagaagaaggggcgaagccctgtcggattcagacgccgatttcagcgtgtagaatccgtcgtttcggaagtccgcggtcgcgaggaaaagagttcggaagatcaaagtgaagaagcaagagatggcacgtcaggatacacctcagttgttggacccggcgatagatcaccgacaccggtctcaccttactgcggtgcagggggctcagcttgggacgttccaggcactgcgcccaggacttcgctcgtgctgtcgacgacatcaaccgggtcgtcgttgacggttcaacgacaatccaacgtttaggcgcggggattccggtacccgtagtgcagttctggcagtacaccgggacttcgtcacaggcacccggcatgtcgagtcagggtccaccactggaccatgctaggaccttatcggaccgcttgctgccttccaccttgctcttcgacatcactgacttcgacttcgcttcaggctcgacagaggacgtcatcggcccctcacagctgggaggcgcaccgccggtgcatacgcaggaccaggcgcaggcctctcctccgccagacactcgtgctacccgtgctgtgccaccggatcgtttcacctactcccaggaccacgtgcgagcacaggcccggaggaccaagcgtggtcgcggcgcggggcagggccagtagagcagtcttctctttttttatttgcttcactttccagtactgtatacttgtgtaatgactacgttgttgttatatgtgcacgatacctttcggcgc

SEQ ID NO: 12279 - DNA, 1599 bp, Oryza sativa
  ref <308>: DATABASE ACCESSION NUMBER: AK109627
  ref <309>: DATABASE ENTRY DATE: 2002-08-28
atcgtcccagttagccatcgctgcaatggcactcgccgtcgtcgtcgtcgcgctcctcgtcgccttcctcacgccgctggccgtctacctggccggaagatcgacgaggacgaagccgccgccgcggcgcaacctgccgccgggatccctcggcctgccgctggtcggccagagcctgtccctgctgcgtgccatgcgtcgcaacaccgccgagcggtggctgcagggcaggatcgacaggtacgggcccgtgtcgaagctgtcgctgttcggcgcgccgacggtgctcctcgccggcccggcggcgaacaaggcggtgttcctcagcgaggcgctggcgcccaagcagccgcggagcctcgcggcgatcatcgggaggaggaacatgctggagctcgtcggcgacgaccaccgccgcgtgcgcggcgcgctggcgcagttcctgaggccggagatgctgcggcggtacgtgggcaggatcgacggcgaggtcaggcgccacctcgccgggcggtgggccgggcgccgcaccgtcgcggtgctgccgctgatgaagctgctgacgctcgacgtcatcgccaccctgctgttcgggctcgcgcgcggcgccgtccgggagcggctcgccgccgcgttcgccgacatgctggagggcctgtgggcggtgccgctcgacctgccgttcaccgcgttccgccggagcctcagggcgagcgcgagggctcgccggctgctcgcggcgacggtgagggagaagaaggccaacctggagcagggcgagtcgtctccatcggacgacctcatcagctacctcgtcagcctccgagacggcgacggcggcggcggccggccgctgctcaccgaggaggagatcatcgacaactccatcgtctgcctcaccgccggccacgacacctccgccatcctcttgaccttcatggtccgccacctcgccgacgaccctgccatcctcgccgccatggtccaagagcacgaggagatcgcgaggagcaagcgagacggcgaggcgctgacatgggaggacgtggcgaggatgaagctgacatggcgcgtcgcgcaggagacgctccgcatggtgcccccggtgttcggcagcttcaggagggccctcgaggacgtcgagctcgacggcggctacgtcatcccgaaagggtggcaggtgttctgggcgccgtgcgtgacgcacatggacccggccatctaccacgacccggacaagttcgacccgtcgcggttcgacgcccaggcggcggcgtcggcgccgccgccgtactcgttcgtggcgttcggcggcggccgaggatctgccccgggatggagctcgcgagggtggagacgctggtgacgatgcactacctggtgaggcacttcaggtggaggctctgctgcgggggggaggagaacaccttcgtcagggacccgctgccgtcgccggccaacgggctccccgtcgagctcgaccacattgctcctctccgctgcgacgagttcaactcctgaatgataaatatagtagtaattctctatcttgttagacttgctgttcatcaacaatttccaagaagggagaattttgat

SEQ ID NO: 12280 - DNA, 2185 bp, Oryza sativa
  ref <308>: DATABASE ACCESSION NUMBER: AK109628
  ref <309>: DATABASE ENTRY DATE: 2002-08-28
gtgcctccaacctcgcggcacacgtgacacagacgctcgccgccgacacggtgacgtcgccatggctgccgccgccgccgccgcctcactctccgtctccgacgccgccgctaagctgcccaaaccgggagggcaagtgcaacggcgacgcgacagggatcgtccacgcgtggatgctgccgcctgcacccgcgacagccgccgtcccacgcgcgagaggtgctcgacgacggtgtccctcgccgcgaccgcgaccgcgacaacggccacgcccgtgcgcgcgccggtccggacgcgggcgcccatggggcagcggaagggcgcggacatcgtcgtcgaggcgctggagtggtgcggcgtccgcgacgtgttcgagtacccgggcggcgcgtcaatggagatccaccaggcgctgacgcggtcgccggtgatccgcaaccacctgctccgccacgagcagggggaggccttcgcggcgtccgggtacgcgcgctcgtcggggcggccgggcgtctgcgtcgccacctccggcccgggcgccaccaacctcgtgtccgcgctcgccgacgcccacctcgactccgtcccgctcgtcgccatcacggggcaggccccgcgccgcatgatcggcaccgacgcgttccaggagacgcccatcgtcgagttcacccgctccatcaccaagcacaactacctaatcctcgacgtcgacgacatcccccgcgtcatcaacgaggccttcttcctcgcgtccacgggtcgccccggcccggtgctcgtcgacatccccaaggacatccagcagcagatggccgtgccgtcctgggacgcgccgatgcgcctcccggggtacatctcccggctgccgaagccgccggccgccaacctgctcgacgaagtcatccgcctcgtcggcgacgccgagaggcccgtcctctacgtcggcggcgggtgctccgcgtcgggctacgagctgcggcgcttcgtggagctgacgggcatcccggtgacgaccaccctcatgggcatcgggaacttccccagcgacgacccgctctcgctgcggatgctcgggatgcatggcactgtgtacgccaactacgccgtcgacaacgccgacctcctcctcgcgctcggcgtgcgcttcgacgaccgcgtcaccggcaaagtcgaggcgttcgcgagcagggccaagatcgtgcacgtcgacatcgacccgtcggagctcgggaagaacaagcagccgcacgtctccatctgcgccgacgtcaagctcgccctgcagggcatgaacgcgatgctggaagaacagagcgccgccgccgcgcgcaagaacctcgatttcagcgcgtggcgctcggagctggagaagaagaaggtcgagttcccactgggctacagaacgttcggcgaggagatcccgccgcagtacgccatccaggtgctcgacgaggtcaccaacggggaggccatcgtcgccacgggcgtcgggcagcaccagatgtgggcgacgcagcactacacctacaggaggcccaggcagtggctctcgtccgccgggctgggcgccatgggcttcggcctgcctgccgccgccggcgccgcggtggccaacccgggcgccaccgtggtcgacatcgacggcgacggcagcctcctgatgaacatccaggagctcgccatggtccgcgtcgaggacctgccggtgaaggtgatggtgctgaacaaccagcacctgggcatggtggtgcagtgggaggacaggttctacgacgccaacagggcgcacacctacctcggcaacccggcggcgaacggcggcggcgaggtgtacccggacttcgtgacgatcgccggaggcttcggcatcccggcggcccgcgtgacgaggaagggcgaggtccgcgccgccgtcgaggagatgatggcggcgccggggccgtacctgctggacgtcgtcgtgcctcaccaggagcacgtgctgccgatgatccccagcaatggcgctttcaaggacattatcgtcgacggtgatggccggagttcgtattagttctgaacttctaatatatgggactatccgtacatttatcgtctaaaaatgtgttatctataaatatagtaccatagtaatgtaattacattgtaactatatataattgttctataactttcgttagttttg

SEQ ID NO: 12281 - DNA, 1682 bp, Oryza sativa
  ref <308>: DATABASE ACCESSION NUMBER: AK109629
  ref <309>: DATABASE ENTRY DATE: 2002-08-28
attttactgagttcggttgctattgcactgggtaggagttcgtccacaccagcctgcggtgtcaggccgatgcagtgggtagctaggagctcgtccgcaccgtcgtcccgtaccgggagttgctggccaccaccgccgccgccgtgtcgcactgcgcgctagtcttattttttgaatgtgttaatttgatccataccactgcaattttacctattcagaaaaataccattataattcgcctattcgtaaccgtgtcattccaattttactaaattaaaactatgccactgacgtcaccttttctatccatcctctccatttccgtcttcttccttccttctccatcttcttcgtggccatcgcgccatggccgacacagctagaggcggcgtgaggtcggcgcaagggcggtaaccggcggtggcggcggagaaggaggagcaacaatgggggcggcgcgagggcggctgcggcggcggcaattggcggcggcggtgggagcaacgacggggcggccggagttcgccctcatgccgccgtgcgaccgtttgccccggtcgacctcgacccagatccggcggccgctgtcctcctacgcgacgccccggtctacctctctgtgcaccgacgacagtgatgtcggctgtggacgaggagcagcaatgggggcggggcggcgggattagcgatgggggcggcccctggttgacctcgactccgatccggctgtggacggggagcgactggggtgaccggagttcgttgccactgcctggcacagatctcggtccgtgccgggcgcagccttgccgtgcgccagcggcagtcggtcgcggccagctcctcctcctcggcgctcgcgccgccctgctccttctcctgcgctcggacgaggcggtcgaggtggccgtcggcctcgaggcagaccatgagggcgcggaggcggtcctggctctccatctcgcgctcgccgaagagcgtgacgggctcaccgaggcggcggaggcgcgcccgcacggcgaagtcgttggtaggcacggccatggcgaaggtgcggcggcgctggagcagctcctgcaccacgcgctcatggcgctcccgcgcagcacggtggtcatcggagacctcgtactcagcctcaccgccgccccctcctcctcccgccgcggaggtagaggcgacggcgacggcggctgccgaggcaggcgtaaggctcgcggaggagagactgggatgggggcgatgggcaggggcacggggaggggagccatggtaggcacggccatggtgaggctgacggcgggcgcgccatgcctgcaccagcgtggcggcggcgcgggccttgttccgcgcagcgagcgggtggacgggcgacgcctccgccgccaggtaggccaagaacgccggcgccgagtagatccccgccgccgccagcgagcgccgcgtgccatacgtccggctcctggcgctaaccttgccgaagtgaacaacagtgaaagaagacggaaaaggcaggggggaggatggaaacgcgacggcagtggcatatcaccaattttgaaaaattctagtggcatggttatcaatacacaaattataatagcatttttctaaataggcaaaattgcagtggcatggatcaaattaaccctttttaataagacgaacggtcaaacatgttt

SEQ ID NO: 12282 - DNA, 1370 bp, Oryza sativa
  ref <308>: DATABASE ACCESSION NUMBER: AK109630
  ref <309>: DATABASE ENTRY DATE: 2002-08-28
gcggcgcgtgcgcggtggcgccggcggcggtgcactgccggacgtgcgacggcgacggcggcggaggtgggtatctgtgcgcggggtgcgacgcggagcatgggagggcggggcacgagagggtgtgggtgtgcgaggtgtgcgagctcgcgccggcggcggtcacctgcaaggccgacgcggcggcgctgtgcgccgcctgcgactccgacatccacgacgccaacccgctggcccgccgccacgagcgcgtccccgtgcatccgatcgggtcatccgccgccccgccgccggacgcgctcctgctcggcggggagaacgacgccgctgccgccgtcgacggcggcggcggcggcaaggaggtgaagctggacttcctgttcgccgacttcatggacccgtacctcggcggctcccccgagctcgcgcgcttccctcacgccgacagcgtggtgcccaaccacaacggatcggccggtcccgcgatggagctgggcttcgccggtggcggcggcgccgccgtcaaaccgtcgtacagctcctacacggcggcttccctcggcaacagcggctcgtcgtcggaggtcgggctggtgccggacgccatctgcggcggcggcggcggcggaatcatcgagctcgacttcgcgcagtccaaggcggcctacctgccatacgcctcgacccctagccatagcatgtcctcgtcgatggatatgggcgtggcggcgccggagatgagcgactgcgcggcggcggcggccgggagggcgtacgcggcggaggggagagcggcgcggctgatgcgataccgggagaagcgcaagaaccggcggttcgagaagacgatccggtacgcgtcgcgcaaggcctacgccgagacgcgcccccgcgtcaagggccgcttcgccaagcgcgccgacgaccacgacgccgccgcgccgccgccgcagatcatgctcgacttcgccggctacggcgtcgtgcctaccttctagtgttctagctcatcgatctgaacgttttttgagctggcaaattgatcaagctggcgttgcatacgtacaacgtagtacttcaattcaccatgcataggattagccaaagttctagttgatcacaattcacaaacttgaaagttttttttacctagcctgattgagttttaggctagtttctgcaatcgtgtttgctagaacggctataactagttgtagttaatctggattttctgtatgtatggtgttttgtagtaccgatctgatgatgatgatgaagaaaaatatttgggcaaaatcgatcgatctcatccagtttctaattaacatgcatgcgatcgatcgattgcgcgcgagatctggattgagatt

SEQ ID NO: 12283 - DNA, 1495 bp, Oryza sativa
  ref <308>: DATABASE ACCESSION NUMBER: AK109631
  ref <309>: DATABASE ENTRY DATE: 2002-08-28
tatacggcccacttgattttgatactagaatgaaaatagcccttggtgcagcaaggggtctggcctacctgcatgaggatgccaatccccatgttatacaccgtgatttcaaggccagcaacgttcttttggaaaatgatttcactcccaaggttgcggatttcgggttggcaaaggaagcctcagaaggaatggaccatatttctactcaggtcatggggacttttgggtacgttgccccggagtatgcgatgaccgggcatctcctggtgaaaagcgacgtgtacagctacggtgtcgtgctgctggagctcctctcggggaggaagccggtggacatgacgcagccgccggggtcggagaacctcgtcacctgggcgcgccccctcctcaccgaccgggacggcctccagcagctggtcgacccgtcgatgccggcggcgagctacggcttcgagaagctggccaaggcggcggccatcgcgtccatgtgcgtgcacgtcgaggcgtcgcaccggccgttcatgggcgaggtcgtgcaggccctgaagctcatctacaacggcaacaacgacgacacctgcaccagcggctcgttcggcggcggcggcggcgaggagtacgaggacgaggaggcgtcgtcgccgtggaacaaccgctcgtggagccacgacttcgccgcgacgccgccgccggcgtcgcgcaggctggcgttcccgcgggctccggcccgcccgacgacgatggactacagctcggacccggccgacggggcggcggggacgtcgtcggcgtcggcgcggcggcagcggtcgacgtcgagcctggtgctggacaagatcgagtcgctggcggcgtacgactggtccggcccgctgagggccagcagggggaggaacttctacaggctgaggggaagcatgagcgagcatggcggccatccttccgaagattgctccatggagggctactggatgtagtagctaaagctgagtgatgatgatgatgatcagatgttgtctgcagaattgcagattgccttccatttcttgtcatgttcttcagttaactgtatagttttctgctcatttgatgatgataggattttgatatgattgatgccatgctctgaacaacaatcaccacaccacccctggtctggccctcattttttccatgtagtggatgaacgcactaatcatcatatcattatggcattttgcaacattcattgcactagaatttagcattagtctaggcagtatcaaacaagacattagagcatgttgccatgtacatgaacaaatggatagcacaacaaaaaaaagtgccttaactactcaactagctagtttgttttcgtctcaatccatctgttcggcagcggaagattgagatgaaaacacactgatttttggtcgttcgttttatttaaatcatttttatgattaatatttttgttgttattaaatgataaaatatgaataatattttt

SEQ ID NO: 12284 - DNA, 1526 bp, Oryza sativa
  ref <308>: DATABASE ACCESSION NUMBER: AK109632
  ref <309>: DATABASE ENTRY DATE: 2002-08-28
aactcgaccagttggatcgacatgtcgtcgtcgtcgtcagatgtcatatctggtggtaacatcgccgtagccatcggtacgcgccatcgatcatttgatcgattccctagctctagctcctttttgatcgatctgatcgattcatatagctagctagctagatagtttgattattatttgcgttttgcagtgtccgtgatcacaggcggcatagtagtcatcgttgttgccattctcatctacaagtgctgcaagctgcgcatgtggcgcaagtacggcctctcgccgccggaattaccggcatcgcagccgcccaggcccaggagcgacgacgaccgtgctgtggccgcgctgaccacgacgacggttgacgtcatcaaggagcggcctgtgaggttcagctcgccgcagttgcgggaaatgactggcgactacgcggagaggcttggcgccgggggtttcggggtggtgtacaaagggcagatccccggcggtctggcagtggccgtgaaggtccttggtagcgacatggggaggcgcgcagaggagcagttcatggcggagatcggcaccatcggtaggacgtcgcatgtcaacctcgtcatgctctacggcttctgcttcgacgccgacctcaaggcgcttgtgtacgagtgcatgcccaagggctcgctggagcgctacctgttcttcctcgacgaacaggagcagggcctcggcttccacaagctgttccgcatcgccgttgggactgccaaggcgatccggtacctccacgacgagtgcgcgcggcggatcatccactacgacatcaagcccggcaatgtactcctggacgaggagttggagcccaaggtgggggacttcgggctggcgaggctgtgcgacagggagaagacgcacctgacgatgacgggcggcgggaggggcaccccgggctacgcggcgccggagctgtggaagccggtgccggtgacgcacaagtgcgacgtgtacagctacggcatgttgctgttcgagatcctgggctacatgcatggtatggagagccaggagcagtggtatccccggtgggtgtggcagcgcctggagcatggcgagacggaggcggtggtggcgcgggcgcgggcgcagggaggcgccgccgccgccgacaaggcggagcggatgtgcacggtggccctctggtgcgtgcagtacaggccggaggaccgaccgtccatggccagcgtggttcagatgctagaggcccatgaccacgtcgcagcgcccaccgtcagcccctttgctcatctcgacccccaagtcatcatcaccacttcctctttctcctcgctgttacacacggatgacaccactggaggcaccacctccactcacatctcacatcacatcacttaattacttcttccaaaaattctttgctaactactccctcaattccattttaagtgcaatattagatttcatgcacaactttaattattcgtcttatttaaaaaaaatatgattagtatttttataac

SEQ ID NO: 12285 - DNA, 1501 bp, Oryza sativa
  ref <308>: DATABASE ACCESSION NUMBER: AK109633
  ref <309>: DATABASE ENTRY DATE: 2002-08-28
attggcagttgccacaaggatatcgtcgcttccgcttctctccctctctcgccccgctctacctccatcctcttcctcctcgcattccttgccaacctcgccgccccggcctccgacgatcgccggccgccgcctccacagtttccatcgaacgccaggggggggctaaattaaagaaggatacaaaatggggaggagatggcacgccctcgccgccgtcggcgtggccgcctgcgcggccgccgcagtcgccgccggcgacagggggttcacgttcgccgacgcggtggcggcgccggaggaggtgggctacatgaggaaagtcgtcaactttctgtggagcggcgaggcctcttatcaccacgtgtggccgccgatggaatttggttggaaaattgttttgggaatattaattggattctttggagcagcgtttggaagtgtaacctccattccggatcccgacccgctttccggacccggaatcccacccaccgcccactcctcgccggcgagcgccgccgccggtgacgccgccatgaagagggcgcgaagctccgaggtcttcctgggcggccgcgggcgcgcgcgccgccgcgtggcgcctctgctcgccgcggtggccttcgtgtacctcctgttcgtgtcattcaagctctccggcctcgccggcatcgccgacccggcggctgtcacccgcccggcgagcggcggcgcgggagaggtggtgatgccgcggcggctcgaggatccggcgccccgcgcgcggggtgatggggatggtgtcgccgtcgcggggtacggtcgcatcactggagagatccttcggcggcggtgggaagctggagggagggggcggaggcggtggggacgaggcgggaacttctccgagctcgagaggatggccgacgaggcgtgggagctgggcggcaaggcgtgggaggaggcgtgcgcgttcacgggcgacgtggactccatcctcttcctcctcgcattccttgccaacctcgccgccccggcctccgacgatcgccggccgccgcctccacagtttccatcgaacgccaggggggggcgagaccaagtgccccgcgtcgatcaacatcggcggcggcgacggcgagacggtggcgttcctcccctgcgggctcgccgtgggttccgcggtgacggtggtggggacggcgcgggcggcgcgggcggagtacgtggaggcgctggagcggcgcggggaagggaacgggacggtgatggtggcgcagttcgccgtcgagctccgcggcctccgcgccgtcgagggggaggagccgcccaggatcctccacctcaacccgcggctgcgcggcgactggagccaccgccccgtgctggagatgaacacctgcttccgcatgcagtggggaaaggcgcaccgctgcgatggcaacccctccaaggatgacgaccaggtggatggattaattaaatgtgagaaatggaatcggagagacagtgttgattc

SEQ ID NO: 12286 - DNA, 1956 bp, Oryza sativa
  ref <308>: DATABASE ACCESSION NUMBER: AK109634
  ref <309>: DATABASE ENTRY DATE: 2002-08-28
caaatgcatcgtcacatctattttacgggagtaccctcagcaggctctatggatgatggctgcagtgtcaaagtcaacagttgctgcaagacgagatgctgctgctgaaatattacaatcagcaaagaagggcagtcggcgtggtagtgacagcaatgcattattcatgcagtttccttctttgatagatcatctgatcaagctgtgctttcatccggggcagccaaaggcaagggcaataaatatctcaacagagttcagttccttgaaaagaatgatgccgttaggaatcatcttacccatccagcaggctctaactgtgactctaccatcatatgatacaaatatgacagatcaatcaacttttcgtcccttttcagtttccgagcaccctactatagccggaatagctgatgatgcagagatccttaactctcttcagaaaccaaagaaggttgttttcattggaagtgatggaatttctcgaccatttctgtgcaaaccaaaggatgatcttaggaaagattcgcgcatgatggagttcaatgcaatgatcaaccgccttctctccaaagtccctgagagccgcaggagaaagctttatattagaacctttgcagtggttccgcttacagaagattgtggaatggtagagtgggtgcccaatactcgtggtcttcggcaaattcttcaggatatctacataacttgtggcaaattcgataggatgaaaacaaacccacaaatcaagaagatatatgatcaattgcagggtaaaatgcctgaggagatgctgaaggctaaaatccttccaatgttccccccagttttccacaaatggttcttgactacattttctgagccagctgcatggatccgtgccagggcagcttatgcgcatacaaccgcagtttggtcaatggttgggcatattgttgggcttggtgacagacatggtgaaaacatccttctcgattcaactactggggactgtattcatgtggatttcagctgcttgtttgacaagggcttgctgctcgagaagcctgaggtggtgccattcaggtttacacaaaacatggttgatggcttgggcatcactggttatgagggcgtgtttgtgaaggtctgtgaaattactctatcggttctgagaactcacaaggaggcactcatgactgttcttgagacctttatccatgatccgctagtagagtggaccaaatctcataaatccagtggagtggaagtccgaaacccacatgcacagagggccatcagtaacatcacagaaaggctccagggagttgtggtaggcgttaacgccgctccttctctgccactttctgtggaaggccaagcacgccgcctgattgctgaagcagtctcccacagcaacctcggcaagatgtacgtctggtggatggcttggttctaagttctaacaggcacaggagatcccagtagctaagcaaagatggagaagtgagaggctgggggagggggtgtgcggcaaagtttgacccacaggtgtgtctgaatcgaaaacggctttgagggcagcagagaccgtgtcaggttcccctgctcatctatacattggcatgcaagtctgcagcccttggcccacgtgtccctctctcctctctctcatcacttcacttgggtgtatgtacatctgtgattctgtgcttctgactccttgatcttggtcctccacctcagcacatggacctcaagtttaggctgcatttgagagtgaagctcttgtctttgtcacagcttctggttgcagtttctttcaaaatctccacgattacttcagataatttagaatttttcttagatttaagtatttgcagttatacaatctagaaaatgaccaaaacatcagaggttagaaaacctaaccttttcatattattgtcatctgattatatttactggctgcttctt

SEQ ID NO: 12287 - DNA, 2261 bp, Oryza sativa
  ref <308>: DATABASE ACCESSION NUMBER: AK109635
  ref <309>: DATABASE ENTRY DATE: 2002-08-28
tatttgatttatcttaaatccctttaattttaaaatttcttattttatttaaaaccatttttaaattaaattatctttaaatatctttatatatcctttctttctttatttaattaccttttctttatttcctttaaatatcctttctttaaatatctttaaatatcctttctttagtttggatcttttcaccttttaacagtagtataattagcttgtatgaataaacctgtgtaaataatcgaaagctgttctgtacatcaatctgtgcgtgattgaaatcctggacgatcacgagtggatttttggggcatcaagcctaaattgggtgtccccacagtcgtccagtccgattttcgtcccttgactgcaaaaccgggtacgacacatccctcaacttacgaaaaccgggcaaacgaggtccttcggcggttttggctgatgtggcgcctatgtggcttttttgactaggtcttcaccccgcgtggcattgacgtggcgcttacgtggcaattatatcccagcaaaataataaaaaacgtggccccacatgtcagctgcacacaaaaaataattttaaaatggtggggcccatgtgggccccacatgtcagcctcacttctctttccttccctctccattctctcttctcttccctttcccctctctctctccttctgggcagcggacggtgtgtgtgggcggcggagcaggcgagctccggcggctgcggcgagcgtggtcggtgctaccccccgaccggagcgccgtggacagcgcggcgtaggcgcgcgggtgaccgaagaagcgcgtgcgccgggcagtcggagtcggcgagcgccgcgacgtcggaatcggccggcggcgggaggatgttggagagcgcgaggatgtgggacctcgccgtctcccaccaggacggggtagggtcagatgcggacactgccgacgagttcgagggggcgaggctgccccggtggcgagttgggggtgccagcggagaagacagagacgggggcgacggcatcctccgcttgcgccctggggccccgcgcgccgccgacaccctcctcgatgccgccgccgctagagctagcgccgtgtagacccgagcgccgccgccgccctgctcccgcgtcggcgctgctagtcacggccgcttgcgtccttgcgtcctcggaggcgaaggtttgcacgggcgcgtccacgtgcctcccccccactgccaccgcggcccaaggccatgctgcccgtcgtcttcgtcaacggcgaccaaaccgtcgaccttgcaaccgtcaccgtcccacctccttctcctctcgcctgccggcttcgctcgtcgccggtggggcgcatctctgtgacgggcgccgactcccgcgcccacaccttctccttgtcctcctccgcccactcgatccagttgcctccgtcctccatcaccgccgccgccgacgcccccatcctccgtgcggcgggggccagcgcgggtcagggggaccgcgcggcgccggcgatgtcctcctcatcgtcgttccctccggcatcgtcctcccccttggcatcgccctccgctctcggcttcgtggtggcgccgtcaccgccgccaggctggttccggcggatcgcggaacggccgcctccactctcctgccatgctgaccgaggtgtcagcgaggatcagccgccgcccgacccacttcgcccctcggatccgccccgccgttgcccgctccggctgccgctccacctcgccgtcgcccgcttcggccgccgcccatgccgctccaccggcttggagagcgagataagaaggagggagaggatagagagggatagagaaaagagagaatgatgtgtgggtcttcatgggcccaccattttttattatttgtgtctgtgactgacatgtgggtcccacgggttttttttagggtgtgtttggttggagggatatccctagatgggagatggcgatccagtttttgagtgtgtttgattggtgggcgaaggtggataggacggcctggagagggaatattccacgaagatgctggatgagtgtatgcgaccaaattggccggatgaggatattcacctttgctaattttgatcattagttcttgattagcaataattaaattatattattgttaatcagtaattagcttgtcaaaattagatataattactctattttattgttaattagtataaattatggctatattaatgataattaacatatttcattattaatt

SEQ ID NO: 12288 - DNA, 1800 bp, Oryza sativa
  ref <308>: DATABASE ACCESSION NUMBER: AK109636
  ref <309>: DATABASE ENTRY DATE: 2002-08-28
aggatagcgcgcgagttggagagacaacgagatgccagaatggcggcagccgcgaaggaggagatggagggagtactaagggcgatggatcgtcttcccggtaggatatccgatctgctccggtcggagcgtgggcacgccggcctctccgtcctcgcccgccgtggcttcgtcttcacggagacggagctgagcagccttgttgcagcactgcggcagctgctggcatcggccgagcgaattggtccggggcatgtcgactcccagaccgtgaaccactgcgcctacttgatagatctggctagatggatcgatgacctcatcgatggctacgcaccagataaggccgagacagagctccgggagctgaaccttgcctggatcgagcagcttctgcttgtgaccgacgcgccgccggcagcgcccgacgtcgtcgtcgacgttggccctcccagtattcttgtcggcatcgacgtcccaaggaagaagctggccagatggctcacggcctccgacgatggggaggcgcagctgaaggtgctctctgttgtcggaccagctgggatgggcaagacgacactggccatggatgtcttccgccagatcgaagggcagttccagtgccgcgcggtggccaggctctccgcaaggccgcctcacaacgacaagctcctccggcacatcatgtcgcagatcaccgggtcgcaggcggacgcggccaccttggacggcgatgactgcgcgctggcttacgacatcaaacaatacctgcaaactaagaggtactgtagctcgatcccttctatttaagcaacacactgtcttccttttaatactagttttaattttaatactagtccctgtttagattccaactttttttctttaaatttttaactttttcgtcacatcgaactttttctgcatacataaactttaactttttcgtcacatcgttttaattttttcaaacttttaattttagcgtgaaactaaacacagcataagtcctgtcggttacatgtattatttctgcaataaaccaaactgaacaaagttgaagcagaagcagggctagccctgactttttggtggcccagtgcgaaaaaaaaaataaaagccccgattcaccataaaaatacaagataatatttaaaaacttattgtcattaacgaatttcacactaattactaaaaaaaatatctctagattatttaaaccaatttcttctaatagttctagattcaatcagtgatgatagtgtcaataacaatcttatttaccagcatcttctcaatgcacaaagtagcctatcaggcttggtaccgtagtatacatattttagaggtccctaatttttggaggcccagtgcggtcgcacttcccgcactgccccagggctggccctgagcagaagaagagcgtatatcagtattacaaaacacatgtgttatagtcggttatcagtgcgctacacattaaggccccttttcattaggaggaaacacatatagaaattttgaaggatttcaatcccatagaaaaaattcctataaacataaattcctatggaaatggacaatcctataaagattttggagaaaacttatcaagagctcaaagctcttggaaaatttcctttgagtctatctctgtcatctgattcctatgttttttcctacggttcgatcaaatggtcattcttgtattttacaattctctgttttacacttttattcctgttagaatcatgtgttttttctattcctttattttagttaagaaattagtgcaaatat

SEQ ID NO: 12289 - DNA, 1320 bp, Oryza sativa
  ref <308>: DATABASE ACCESSION NUMBER: AK109637
  ref <309>: DATABASE ENTRY DATE: 2002-08-28
gcgtgatcacgactcacaaatccacaccgaaaaagcgagagaagaaaacgagagtgttcgtcaagctcgcgaatgggagggaagatgggcaaggacgtggccgccggcggcgagagcaaccgccgcccgccgccgccgccgcctatgccgctgggcctgaggctccagctgatcgggctctcggcggcgatcgacgcggtggagcggcgcgacgggacggtcaaccgcgcgctctactccgtcctcgtcgaacacctgatgagcgtccgcgccgacccgtccccggacgccgccaccggcgccgtccgctccttcgacttcaccatcgacgccgcgcgcggcctctgggcgcgcgtgttcgcgcccgcggcggcggcgcaggcggcggcgccgatgccggtgatggtgtactaccacggcggcgggttcgcgctgttctcgccggcggtggcgccgttcgacggcgtgtgccgcaggctgtgcggcgacgttggcgtcgtcgtcgtctccgtcaactaccgcctcgcgcccgagcaccgctaccccgccgcctacgacgacggcgtggacgcgctccgcttcctcgacgggaacggcatcccgggcctcgacggcgacgtcgtccccgtcgacctcgccagctgcttcctcgccggggagagcgccggcggcaacatcgtgcaccaagtggccaaccgctgggcggccacgtggcagcccacggccaagaacctccgcctcgctgggatgatccccgtgcagccgtacttcggcggcgaggagaggacgccctccgagctggcgctcgacggcgtggcgccggtggtgaacctccggcggtcggacttctcgtggaaggcgttcctgccggtgggcgccgaccgcgaccacccggcggcgcacgtcaccgacgagaacgccgagctggcggaggcgttcccgccggcgatggtggtgatcggagggttcgacccgctgcaggactggcagcggcggtacgtcgacgtgctgcggcggaaggggaaggcggtggaggtggcggagttccccgacgccttccatggcttctacggcttcccggagctcgccgacgccggcaaggtcttgcaggacatcaaggtgttcgtccagagcaacagggcggcgcgcgccaccgcctgaattgagattcgagagtttgatctgcttcgtaccgtacacgcgtcgtacacttcatatacttgagattttgaattgggatttctgtgattcaaggtgaaagtttaaggccgcagttaaaagtttcgtatgattttatgttgaaaactgtataatttgagt

SEQ ID NO: 12290 - DNA, 1969 bp, Oryza sativa
  ref <308>: DATABASE ACCESSION NUMBER: AK109638
  ref <309>: DATABASE ENTRY DATE: 2002-08-28
cttttgcacgactgtcatatgaagcttagaggtaggagaagacatggcgatggcgaaggaacttactgttgcgtagggccggtgagacgtgcagatgatggtgattggagacgatgaaaggggaggagctccgagcgggtagaattgctcggggtcttcttgctgggtggtgtggttggacggagaagagatggcaagtatttatagggggatgagatgggtgagggtgagggggaggtcaattggttttctttaatgcagcattaagagtatagcagtactactactacttcatgtactagaggctaaggaaggacgcattttattaccaaggtattcatggctggagagtggcatggtaggggttgaataatctgtgttgggtgggagagaagtgcgaggtgagaggctttatggttggtcatatacacaaggcaaagaaatgtttttttttcatttatctgaaagaagaaaatttccagtgatgaatcttctctttttttttcttacttcggcggtagttttctttagccacatgctagatgactgtggcaatctcccaacagtgagcctggttgaaaattgtaacccatgataggcatgtctagtttaattgtgccaaaagtttgctagtgacttaattacctccagtagattttacaactttgtagtggccatgtaagcaagttagctggacttattgggtaattatgacaattatttattatttttaggtgtggagttgaaagttgaaactcatcaactatttgtcctttttgattgcttctaaagattatagaaatttgactgacctccaattcatttcactacttcaatgtggccttgaatggaatttattgggcacaccatctcaaatgcccagcattgctgtcaaaaaaaaaggagagaagagagaacttgaatgttgagccatggttatgttaatcgaataaataggtttcttgaatagatatgctgctagtgcaccttatgcaattaggtctttaaatggtgcaacgcaacacctatgttcttgcacgcaccgatgcgttgcttctggtgcgcatcttgatacaatgacgacgagataagtaatacattaatgccactttgtttgatgcacataagagcagcactttgaaatctcagctccgttggggtttttcttgtttccagcttgcagtgtttaaatgccgagagcagatattaaattcgttagttgacttgttagtgttatggagatgttgcatcctgattgtgtgacttaatcaccttacaattaagaaaagggttaaactttgtaaagtcatactagtatcaacccactaatgtaatccccgagattgcttacatatcccaccttgattaatgatgatgacatacaactcacttaaagttgttttggtttgtgtgttgcattgggtttggtcaatgctgctactcatcaaggttaagagatagccacctgtagagaaaataatttgcctcagttaggactaattctagcattaatgctcccgttttgggcaaatagaagcagtaatggatggttttgggatccagagccaacgctatcggcctcgggatcaaaggtttgagttcagtttacctgattttataatatttcaccaccattcatcatgattcatcgatgatgcgtctaaaattgcaggtaaagtctcggagttgaaggcaactatgaaggcaaggttgacccaaatgcgagctcataactgtgccactaggttattgcttagtacaggatatggtatataaatgtatctttgcacgtatatattgccattagtcggtgtatgggggccaaacccatgtgctcttctttaattccatggtggcatctaaggagcttaattagagattatgagtgaaaaataatctccactgagttttctcgcgccttcttgttgtggttgcaaaggcaatgagctccaatgcaaaatagttggat

SEQ ID NO: 12291 - DNA, 1683 bp, Oryza sativa
  ref <308>: DATABASE ACCESSION NUMBER: AK109639
  ref <309>: DATABASE ENTRY DATE: 2002-08-28
ggaattccaggggcgacgacatggccgccgtgcaggggcaggggcaggggaagctcctgtacattgtggtggtcgacgacgatggcgccaccttccgctacacgcgctccctcctccacagcactctgcagctgatgggatgcaagccgcgccatgccttcgagatcagcggcagggtgttcgacgagatccgaggtcacatgggcggtgacatggccatgggcggcggcggtggcgtgcagcgctacgagctggccgccgacgcggaagccgccagccccaggcagttccagttcgagctctacaagcgccgcaccacccttctcatccctcgcccgctcttcctccgcctcgtctgccacgccctcgccctctacaagtatgtcgcccccgaccagcgctctgatctccaccgagcctgcaggatccgggaaaggaaggaatcagtcaccattcttctctgcggaaccagcggctgcggcaagtctactctttccaccttgctggggagcagattaggaatcactactgtagtctccaccgattccattcgccacatgatgcggagctttgttgaagagaaacaaaatccccttctctgggcatctacctatcatgcaggcgaatgcctcgacccagtagcggtcgctgatgctaaagctaggcgcaaagccaaaaaacgctcaggcatctcaacgacctcaaccattgattttgataaaaccaggcctctcaatgacaaacctgacggcaaaccaattgggaagaagcagatggccatagaaggctacaaagcacaaagtgagatggtcattgatagtttggatcggttgattactgcctgggaggatcgcaaggaatcagttgttgttgagggtgttcacctaagccttaattttgtgatggggctaatgaggaaacatccttctataataccttttatgatctacatatccgatgagggcaagcacaccgagaggtttgccgtacgtgcaaagtacatgacacttgacccaacaaaaaataagtacgtcaaatacatcagcaacattagaactatccaagagtacctctgcagccgagccgacaagtacctagttcccaaggtgaacaacactaatgttgatcggagtgtggcttctatccatgccactgtctttagctgcctccgtaggagagctgctggtgatcagttatatgaccctgctacaaacacagtggcagttgtaaacgaggaatacaaaaaccaatgtgtggccaactccatgagttccaaggggatgttcaaattgattcaaaggttaggatcctcaagaaagctcatggccattgtcaatgtggatggatctgtttcaaaggcttggccggttgagtccagcagcggggatggaaaaggcggttcggaaaatggcagtaagaaatatgtaggcgatccaatatacgggcctctaaatattggaagggcagagtcagtcaatctccagtttggcgctttcggaataagtgcctggcctactgatgcaggctgtacaagtcaagctggaagtgtcaacgagtcatgggacaatgctaatgaaggcactggaagccatgttccttcttcttctggttctcctaagaagttggatggacattgtaaagagattaaagaatcagcagcggcatctggaagtgatgatgacg

SEQ ID NO: 12292 - DNA, 1418 bp, Oryza sativa
  ref <308>: DATABASE ACCESSION NUMBER: AK109640
  ref <309>: DATABASE ENTRY DATE: 2002-08-28
aaaatgacttaattgcccttaggcctcctagcactctcctctctccctcagatgcagcagcagcaaagaagcgggaggggagtcgccggcgatgccgctgcggtcggcgaggcgaagggtgacaacggcggccgtggtgctgagccaccacatctctcgcatcctcgccgcgtcggccttgtgccgccgccaccggtggccggcgttagtgcgcggctgtgccaccacagacgacgacggggcgctgcgacgacggcggcggcggcatcgctgctcgatgaagatgtcggcaacaacgctgcgacgacgacgacgacaacgaccgggccgaggcgacggcggcgccggtcggccctacgcggcggaaggaggccggggcgtcgaggaggatgggggaaggactacgcccgcgtcgccgccgtctccggcaacgcacagcagcacggcagcgtctactggaagcacgtcgcggcggcggtgctcgcctccctcgacctggccaggacctagcgccatagctcaccgccacactcgccacgacggagtcgccagtgtggatggacaacagcacggcggcacagtgctgggaggtggaggatgtcgctcgtgagctcgttcatggcgtcgctgctggttggcggctacgcctacatcgacaagaccgacggcgcttggatgaacttgaagacggacagggcgctgcgacaacgacgagcgccgattggaggggtggccggtggggttgccggcggccctgggcgagtcggaggcggcgccggagtcgaatccggcgacggaggcgggggcgaccgcggagggaggcgcggtggcggcgtcttggacggggacggcgacgacccgtgcccgcgggccacctccgccgacgcgtcggagccctcggaggccgatcccgccgctaccgacgcgtcggagccctcggaggccgatcccgccgctaccgacgcgtcggagccctcggaggccgatcccgccccgcgggccacctccgccgacgcgtcggagccctcggaggccgatcccgccgctaccgacgcgtcggagccctcggaggccgatcccgccgctaccgacgcgtcggagccctcggaggccgatcccgccccgcgggccacctccgccgacgcgtcggagccctcggaggccgatcccgccgctaccgccgcgtcggcctcctcggcggggcgcttcgatgccatgcggtgcagggaggggagggggagcaggtcgccgccgtcgtcgaacctgcacccagccgccgcgcagcaccagtcgccggccacgccgcgccaccgcctgtctgccacgcgccgcgccgctaagcgccgccttggctgtccgccgacgccgcttagcccactcgccgtcggcgccgcctggctacctctctctctctggtg

SEQ ID NO: 12293 - DNA, 1446 bp, Oryza sativa
  ref <308>: DATABASE ACCESSION NUMBER: AK109641
  ref <309>: DATABASE ENTRY DATE: 2002-08-28
ctctcctcttcttttctcgcttcctccctttcccactcccctctccctccttttccggaagaaaggcgcggactcctctcctcctcctcctcctcgccgtcgccggcgaggcgacgagggcgggagctccagcctagcgaagcaaagctgcagctgcctcaggccgcgcgacctatggcggcgcgtggtgcttgcgatcctcctggtcctggcgcctccctgcgccgcctcgtcctgctgctcgctctgtcggtgtcggcgctcgccgcggcggacgcatccggggtgttcgaagtgcagcgcaagttcacgcgccacggggacagcggggagggacacctctcggcgctccgggagcacgacggacgccgccacggccgcctcctcgccgccatcgacctccccctcggcggcagcggcctcgccaccgagaccgggctctacttcacgcggattgggatcggcacgccggcgaagcgctactacgtgcaggtggacaccggcagcgacatcctctgggtcaactgcgtctcctgcgacggctgcccgcgcaagagcaacctcgggattgagctgacgatgtacgacccgagggggtcgcagagcggggagctggtgacctgcgaccagcagttctgcgtcgccaactacggcggcgtgctgccgtcgtgcacctccacgtcgccgtgcgagtacagcatctcgtacggggacgggagctccacggccgggttcttcgtcaccgacttcctgcagtacaaccaggtctccggcgatggccagaccacgccggccaatgccagcgtctcattcgggtgtggtgctaagctgggtggggatttggggtcgtcaaacctggcactcgatgggattcttggatttggtcagtcgaactcgtcgatgctgtcacagctcgccgccgcgggaaaagttcggaagatgtttgcgcattgcttggacactgtaaatggtggggggattttcgctatcgggaacgtggtgcagccgaaagtgaagacaacaccgttggtgcccgacatgtacgccattatactctgccaattatagttatgtgcttgttttttttttctcttttttttctctgcttctgtatgtcccttgtttactttgtttggatcgttcttcgttgcttgctaaatagagcctcttttttttttaccaatgcgtttaatttgattcgttatatagtcttgcatatgagtatatgactgtctccctgctatgggtctatgaggcttaactggcataagaagtccgtagtttctggctgatgcttcattttacaccaggaaggtgatttcatcaacttttgtgaatgatatgggccaagagtgtgatcggtagttgctttcctacttacgatattctgttcaagatttggattttgccaaatgaattaggatatagtattttaactagttgagt

SEQ ID NO: 12294 - DNA, 1695 bp, Oryza sativa
  ref <308>: DATABASE ACCESSION NUMBER: AK109642
  ref <309>: DATABASE ENTRY DATE: 2002-08-28
caatggagtcctcgccggcggcgacggtgaccccggctgccgcagcaatgtcggaggcgccggcggtggcggcgccgaggccgagggaccctgggttgttcggaagcttcgacctccccgccgcctgggggtgccgcaggcccatggctttctgcagggaccttgacgccgccgccttggtcggctccgaacccaacgccgccgccgccgccgctgctgctggagacgccgtggagcccaagcgtaacgcctcccgatcgccgcccaaaggaggcgacgctcctgtggcggcggcggcggcgcaggaagctccgcggaagcagtggaacctgcggtatcggaagggcgggcgggacggcggcgaggacgcgctgcagaacaagaagctctggaacatggaagccgccggcggcggcggcggcggcggcgccagggcgagccgcgggttctcggtggagctgacgcgccaggagatcgacgccgacttcttcgcgatcaccggccggaaggcgccgcgcaagccggcgaagcggcccaggagcgtccagcgacaagtcgactcgatttgccctgggaactcgctctgggaggtgagccgcgatcgctacaaggtgaacgagaaggggggattctgagttgctccaagaaggaggagatggattttccgagaagcaagatcaaccattggcttatcgtagttatagacagagagagattcagactgtcagtcagaattgtttcagtgcatccatgcttatgctgttgatgatgaatcttgtgtagttttttacctgactgttggggttttgcttctcgctttcgtgaagcctctgcaaactcttctttcttttatgcctagttcggaaacagttaacagaaagaatttcaaactcttgatttctggatgtgagacatggatacatgataggttcttcgttaattctgggtggtatgaaatctttggcattggcttcaatccggtaattctgtgttgcatctcgaattgcagttgcagttcctagtagcttaggagtagaacttaaccaggtttatttatcagttctctagtttttgccagaaacacatatcgatttcttccatgtcggtcttccctgtcttttcaggtattgtacatgtctttcttgatttttttttatggattggcttcctgctttttatcagtattggttacttgaccattcacttcagactgaactatgtttttgaagaaagcagaggattcatgctcagaaactgaagcagaatcacttgaaatgaatgttggattcatgcgaactcaggaccatttgactgttcaaacagtactccagattcatgctgagacttcagaggaaacatttacccaatcaggaaaaaaaacgctgaggtttcagaatgtgtaaacagttccaaggagaggggaaatgacatgagtaagtccaaacctcatgatttgccaatcattattctggtgtactcgaatgttttgctacctttggtattgattgctgaaagtgaccccttaaactatgacattacagatcctgggttttacaacccttttcctttgtcaactcttttctgtagttcacttttatcatttgtgcttgatgtcatagtagcacattgatcttgtttggatgagctcaactgaaaaggagtcaacgtgtcccttggacatttattttttgttgc

SEQ ID NO: 12295 - DNA, 1938 bp, Oryza sativa
  ref <308>: DATABASE ACCESSION NUMBER: AK109643
  ref <309>: DATABASE ENTRY DATE: 2002-08-28
aaatgcaaggaccacggaggcgaacaccacctgctcctgccgccaaacaaccagccatgctcatgctcggaccattccccgcccaccatcgctgcacactttttctcctcctcactgtcacactcctcccctcgctcgccgccgccgccgcggcgcaccaccaccacgtccacgccgcgggcgacggcgtcgtcatcagccaggccgactaccagggcctacaggccatcaagcacgacctctccgacccctacgccttcctccgctcctggaacgacaccggcctcggcgcctgctccggcgcatgggtcggcatcaagtgcgtccagggcaaggtcgtcgccatcaccctcccatggcgcggcctcgccggcaccctctccgagcgcatcggccagctcacccagctccgccgcctcagcctccacgacaacgccatctccggccccatcccaacctccctcggcttcctccccgacctccgcggcgtctacctcttcaacaaccgcttctccggcgccgtcccggcctccattggcaactgcgtcgcgctccaggcgttcgacgccagcaacaacctcctcaccggcgccattccgtcctcactcgccaactccaccaagctcatgcgcctcaacctcagccacaacaccatctccggcgacatcccacccgagctcgccgcctcgccctcgctcgtcttcctctccctctcgcacaacaagctgtccggccacatcccagacaccttcgccggctccaaggcgccctcctcctcctcgctcaaggaatccattaccgggacctacaacctcgccgtcctcgagctctcgcacaactcgctcgatggcccgataccggagtcgctctccgggctccagaagctgcaggtggtggacctcgctggcaacaggctcaacggcaccatccccaacaagctcggctcgctcgccgacctcaagacgctcgacctctccggcaacgccctcaccggcgagatcccggccagcctgtccaacctcactactagcctccaagcattcaacgtctccaacaacaacctctccggcgcagtgccagcctcgctcgcgcagaaattcgggccttccgccttcgccggcaacatccagctctgcggctactctgcttccgtgccctgccctacgtcgccgtctccatcaccatctgcgccggcatcacccgcgcagtcacgggaggcgacggggcgccaccggaagttcacgaccaaggagctcgcgctaatcatcgccggaatcgtggtcggcatcctgctcttcctggcgctctgctgcatgctgctctgtttcttgacgaagaagaggtccggaagcggcgggaagcagacgacgagcagcaaggcagccggtggtggcgccggagccgcggcggggggcgggcgaggggagaagccggggtcgggggcggcggaggtggagtccgggggagaggtgggagggaagctggtgcacttcgacgggccgatggcgttcacggcggacgacctgctgtgtgcgacggcggagataatggggaagagcacgtacgggacggtgtacaaggcgacgctggaggacggcagccttgtggcggtgaagcggctgagggagaagatcaccaagggacacaaggatttcgagtccgaggcggcggtgctgggcaagatccgccaccccaacctgctgccgctcagggcctactacctcggacccaagggcgagaagctcctcgtcctcgacttcatgcccaacggcagcctctcccagttcctccacggtcaatactctgtcaatgctactcttcttatcttatgcatttgatcttcatcctattaattaggaagacaatgcaattgataaactgtatgcattcttcagcttttacttctgctttcaactgaaactactctgaacatttgag

SEQ ID NO: 12296 - DNA, 1507 bp, Oryza sativa
  ref <308>: DATABASE ACCESSION NUMBER: AK109644
  ref <309>: DATABASE ENTRY DATE: 2002-08-28
ggctgcctgtttatgtgctcgaaacgccaaaatcctgcatcatcttccacggctctccaaccccaaaaaattcagtctcattcctttccttcccgtggtccatcttgccagccgtggaagcatcagcaatgagctcgcattcccatgcatggtctggtcgctgagatgaagatgaagacggcaccacattttgccgggaagccgaccggctgacaacgccgtgcagccactgcaattcgctactacggaattcagtctgaaactctgaacaaatttcagagagagagaggcaattcgctactctgaaactctgaacaaaatttcagagggagagagaggggatgcgattgcaagtttgcaatgcaagggttgtaacaatcacattacaaatcagaggcaacagattacaagatcactactagatcagcactccatcagctaaggtcttttttctctctcgcgaggttaatcacagggatcaaaattagtgacacaaatctacacactcctaacacacaaagatctcgtcctcttttttccttcttttttgggggtggttgttgttgtttggaccatccagcctccttgataattgtcgtcattggcattcaattcactggatcaaggaatggcagcggcggcggtggtggtggtggtggttgaggcagatgaagacgaacaaggtattcgatcgaggaccagcacggcgtccctcatggcgggcctcttgccgggcgccatggcgcagcaggcgaaggcgagcttgaagcaggcgagcagggcgtcctccctgccgtcggcctcgccgcggagcgtcgggtcggccatgcggagcagccggctccgctcctcgacgacgaacccggcgtgccactggcagagctccacctccgagtagaccctcccggagaggagctccaggagcaccatgccgaaggagtagacgtcccacttggtgttcggcctgaggttcttgaggcactccggcgcctggtacggcggcggcgcggccgcggctgcggccgacgtcgccgcagacgacgacccgcatgggctggcgccggcgccgggcatctgggacaggtcgggcaggctgctcgtcgagtgcatcgagcgcttgctcccgaacagcctcgccgacgcgcccgtgctccggtgcacggcctcgccggagagcagccggtccaggccgaagtcgccgatccacggctccatgtcggcgccgagcaggatgttgctcggcttcacgttgccgtgcacccccttcttctcgtggatgaacgccagcccgcgcgccacgccgcgcgcgatccgcagccgcgcctccaagctcagctgcagcggcgacgacgccccgaaccgccctgcaaatcgcccatcatctttccattaaaatttctaatctctacacctcagtttttgcttagtttgcaagtgaatttagtgcttataaagttggtctactgttcctgcataatcaatgccaaattacgagctatctatcatt

SEQ ID NO: 12297 - DNA, 1384 bp, Oryza sativa
  ref <308>: DATABASE ACCESSION NUMBER: AK109645
  ref <309>: DATABASE ENTRY DATE: 2002-08-28
acctctctctcgattcaccacggcggcgacggcaatggcggcggtggagcaggatcaggaggaggaggtgatcatcgtcggggcggggccgtcggggctcgcggcggcggcgtgcctgtcggtgcgcggcgtgacgggctgcctcgtcctggagcgcgacgactgcgtggcgtcgctgtggcgccaccgcacctacgaccgcgtccgcctccacctcgccaagcgctactgcgcgctcccgcacgcgccgcacggcgaggcgtcgccgacctacctcccccgcgacgacttcctccgctacctcgacgcctacgcctcccgcttcggcgtccgcgcccgcctccgccgcgaggtccgctcggcgcgctacgacgccgcccgcgcccggtggctcgtcgacgccgtcgacctcgccacgggacgcgcggagcggtacgcggcgaggcacctggtcgccgccgcgggcgagaacgacgagagggtggtgcccgaggtgcccgggatggagacgttccccgggaaggtggtgcacgccgccgactaccggagcgcggaggggttcaaggggaagtccgtgctcgtcgtcggcggcggcaactccggcatggagatcgcctacgacctcgccgtcggcggcgccgccacctccatcgtcatccgcagcgagctgcacctggtgagcaaggagatatggaacttggcgatgacgctgtacaggtacctgccggtgtgggtgatcgacaaggtggtgctgctcatgtgcgccgccgtgttcggcgacaccgcccgctacggcctccggcggccggccgtcgggcccttcaccatgaaggccaccaccacgatgtacccggtcgtggacgtcggcaccttcgccaagatcaggtccggcgagatccgcgtcctcccggccgccatcaagggcgtccgcggccgcgacgtcgagttcgccgacggccagcgccacgccttcgacgccgtcgtcttcgccaccggctaccggagcaccaccaagcactggctcaagagtgatgacgggctgatcggcgacgacgggatggcggggcggagctacccggatcactggaagggggagaacgggctgtactgcgccgggatggtgaggaggggaatctacggcagctacgaggacgcggagcacatcgccgacgacatcagcaagcaactccggagcagcagcaagcctacccacaacaatggctcggcctagaaagaaattaaatcaagctgatgaggctctcccccttggaccttgtcttggttattatattaggtgtagcttttatactatgattttgtttctgagtttgtggatgtggatgaaataaacaaaataaaacttgcccttgggtggtctttgatt

SEQ ID NO: 12298 - DNA, 970 bp, Oryza sativa
  ref <308>: DATABASE ACCESSION NUMBER: AK109646
  ref <309>: DATABASE ENTRY DATE: 2002-08-28
agaagcagaagcagagccgaaccgagctagacgacgaaagaggagagggagaccacgagatcatcgacaatggcgctgctccggcaatggcgccgcggcctcgccctcgccgctctgctcgcgctccacctcgccctcgccgcggcacagtcgcctgcggccgcgccggcgcagcccaccccaaccccagtgcccacggcgccggccaagtcaccgcccgcgccggccacgcctgctcccaccgccactcccactcctcccgttgcaccggccaaggcgccgccggtcgcgcccgccgtcgcgcctgtcacgccgccgccaccgacaccgaagaaagcaccaccaccgccggtgacgcccccgccggtgacacctcccccggtgacacccccgccggtgtcgcccccgcccgccaccccgcctccggctctcccgccatcgacgcccccgccggtggctgcaccggccgaggcgcccgcggcgttgcccccggcgacgacaccaccgccagtggccgaagcgcccgcggagctgcccccggcggaggctccgaccaagagcaagaacaagcacaggaagaagaacaagcgcggcaagaaggcctccgcgcccgcgccggagccgttgagcccaccggcgccggccgcgctgtcgcccgccgacaaccaggccgacgtgtccggcccagcaccatcagcattcgatctcaatggaagcaacaggcagtacggacaatgggggtttgtccttcagactgtcatggctgcactgctactatcattagcatggtgattaaagcccagaccagacagatccatccatccatccatgtgtctgcctcgccattaatttgattatttctgcccttgatcttgttgtgtatgagcactagatttgtcataggaatcatcttcttgctggcttgtaataattttttggcatgcatttttatatattttttcttgacttg

SEQ ID NO: 12299 - DNA, 1559 bp, Oryza sativa
  ref <308>: DATABASE ACCESSION NUMBER: AK109647
  ref <309>: DATABASE ENTRY DATE: 2002-08-28
actgccgcccgcaagctcacgcagctccagcactggcctcgtgttcgatcgatggacatggcggcctgcgtcgacgacgtcggcaagccgcgggcgtcgaggaaggtgtgcgtgatcgccgccgccgccgccgcgaagccggtgagggtgcacagcagcatgtacgcctcgctccggctgctcggcccccgcgaggtcatgggattctccgacttccagttcgtgccggccaggaagagccgctgcggcggcggcgacaaccccggcggccgcgacccgcgccgcttcccggggcaccgcgaggtgtacctctacctcagggacttttaccgcgcggcggggctcaccgactccgtcaggtttaacaccagggtggtgcgcgtcgccgtggcgccgccgccatgccgaggtggccccggcgacgcgctgagatgggtggtgagatccatggacgccggcctctggaagcgatgcaccgatgaccagatggcggaggcgcactgcgtcgaggaggtgttcgacgccgtcgtcgtggccaccggccactactcgcaaccaaagctgcctagcatccaaggaatgggggattggaaacggaggcagatgcacagccactggtaccgggtcccggactccttccgcgacgaggtggtggtgctggtgggctgcggcgacagcggcatggacatcgcgctggacctcctcgccgtcgcgagggaggtgcacctctccgccaagtctgtggaggcggccgcgacgccggcgatgtccaagatgctggcgaggcacgccaacctccacctgcacccgcagatcgagcgcctgtgcgacgacggccgcgtggtgttcgccgacggcggcgggggcgtcgtcgccgccgacaccgtcatgtactgcaccgggtaccgctactcgttcccgttcctggacaccgaggggaaggtcgccgtcgacgacgacgacaaccgcatcgggcctctgttcgagcacacgttcccgccgtcgctcgcgccgtcgctgtcgttcgtcggcatcccgaggaaggtgatggtgccgtggttcttcgaggcgcaggggaggtggatcgccggcgtgctgtccggccggcgggcgctgccgtccgaggaggagatgacgcggtccgtggaggagttctaccgcgccagggagctcgccggcgtgcccaaggcgcacacccacgacgtcgagcctcacaaaatgtatgagcttggggagaagtactgcgatttcccgcgcacggaggagtggaagagggagctgatggcgatcatcagccggaacacgagcgacgacatggagacgttccgcgaccgcgacgacgacagcgacaacgtccgcaggtgcctgcaggagtggtacgccctggctgagcaccaggctcaagacgaagaagacccagctgccgctgctgcacaagcacccgtgcacagctcgctctgaagcctgtacagctgtgtgttctgtgctctgcacaatcataattttcttctacagagcatgaaaatttctgaaataaaacagagcatgcagaaatttcg

SEQ ID NO: 12300 - DNA, 838 bp, Oryza sativa
  ref <308>: DATABASE ACCESSION NUMBER: AK109648
  ref <309>: DATABASE ENTRY DATE: 2002-08-28
tattttacttattccgtgagtcggaagcggggcctggcccctccttttggctctaaggcccgagtccctcgggccgatccgggcggaagacattgtcaggtggggagtttggctggggcggcacatctgttaaaagataacgcaggtgtcctaagatgagctcaacgagaacagaaatctcgtgtggaacaaaagggtaaaagctcgtttgattctgatttccagtacgaatacgaaccgtgaaagcgtggcctatcgatcctttagaccttcggagtttgaagctagaggtgtcagaaaagttaccacagggataactggcttgtggcagccaagcgttcatagcgacgttgctttttgatcacgagaaacaagaaagcgagaagccgtcagggagctcgccgtcgctgcgtggggctcgccggagtagggggcgctcggggagcctcccgagatccgccgctcggcgccgccgccgtcctccgggcggagctcccgaagctcgcccccctcgcgcgccggtggcgttggcggggcccgcggccgggcagctccggtgctgcgcctccaccgtcgacgacggcgtcgtcgccgcagccgtcttccgccgcgccgctggacgccgccggatctgccgctcgtcgccgcgtgggcccctccacccggttggaggaggacggagagaccgacgaggaagaaggaaggtcgcgatgcgctgccgcgggggccacatgtcattggtggggcctacctcctcagatgcgctttggtgctgtgcaaatgtaaccactagatatttttttacactttggtctctataaaactttattttgtaaat

SEQ ID NO: 12301 - DNA, 972 bp, Oryza sativa
  ref <308>: DATABASE ACCESSION NUMBER: AK109649
  ref <309>: DATABASE ENTRY DATE: 2002-08-28
tggccggaattcgataccacccgccaggccgccacgccctcccctcctcctcctcgccatggcggattgccgcagcctcatcgagttcctccgcgccttcgagcaccgccaccgccaccacgccgccgccgcctccacggactccgccgcctgcggcaccgcgcccgcccgcccccgccgcgggtcgtcgccgcggagggggaggcggaggctgttcacgtccctctgcgaccactccgcgatggcggcggtcgacgcggtggcgctgctggccgtcgtctccgcgctcgcgttcctcgtcacgccctacgtcaggatggtggcggccgaggtcgggggcctggtgtccgacctcgacgcggcgggggtggcgtcgtcgtactacgcgccgttcgccgcggcgggcgccggggcggcgatcgcggccgtggcgggtgtggtggcgtgggacgccgtggggcaccgggcgcggaggtgcgggaagccccggtgccgcgggctgcgcaaggcggtggagttcgacatccagctcgagacggaggagtgcgtccgcggccagcagcagcgcctgctcccgctccccgggggacgcgccgcgcttctcgcggccgccggggcgcgccccgtccagctcggcgacgcgcaccgcgagctcgaggcggagctcaggaagatggcgccgcccaacggccgcaccgtgctcatcttccgctcgccgtgcgggtgccccaaggggaggatggaggtctggggcgccaagaaggtgcgccggatcaagaagtaggcagccgcttactcccatggccatgaactgtttggctattgctgttactgcttcatcataagaacttgctgttacatacatagcaatactatcacagtgctctgctcttgtagctagtataattgagcataaggagagaaataaaagtggtagatacatgtcttatgaacttattatgatcggtcgcc

SEQ ID NO: 12302 - DNA, 879 bp, Oryza sativa
  ref <308>: DATABASE ACCESSION NUMBER: AK109650
  ref <309>: DATABASE ENTRY DATE: 2002-08-28
tttttttttttctctcctctctctctgccgaacccagccggcgcgtcccctcctctactccgccgccggcgcccctctttctctcccaggcggcggcggcggatggagcggcggacacaggcggcggcgaatggagcggcggacacggggggcggcggcggacgacgcggcggcccaggcggttgacggagaggcggcggggcgatcccagcgccggacggagcgccggcgtatccagtgatggcgccgggcggagcggcgatgggacggccagatccagccggatctggcgtcggcgtcttcctcacggcgtcttcctcgcggacgacgagcggcggcgtggtcgtcctcgcggaggtcgctgccgaccggagccccgtcgccgtcctcgtcttccggccgccgcacttcctcccctccttttccagccgccacgcctccctcctccggccgtcgcgcgtcccctcctcctccggccgccatgctcgccggatctggccgcggacggcgacggcgggctcgtcggctgtgcacggcgacggcgggctaggcggctcgtcagcaaggaggcgccgccaggcgggctaagcagcgacgacgatgccgggcggcgctgccgctcctctctccctgtctgctggatttggatcctctaccttcacggcttgaaggcacgagcgtgcagtcggcacctcatccaccgttcaaataatccaatggctcacgtcgcctgtgcacgtctgaatggatatctgtctgtcaaagtccacgaagcactactgctatatttcagtccgaataccaatgatgtttgcattataaattttgtaatttttcttatcaatcctatgctctaatcataatttttcttttgctttt

SEQ ID NO: 12303 - DNA, 1114 bp, Oryza sativa
  ref <308>: DATABASE ACCESSION NUMBER: AK109651
  ref <309>: DATABASE ENTRY DATE: 2002-08-28
gcttatcccccgcccctctccaccccgctccgcggccatggcgatggcggcgcgaaccctcgccctcgcattccccctccccctctgcgccgtctcctccccgcgccgcgccaccccactcgccttgccccgccgcggggcggcacgaccgctggcctcgctagcccagtgccccgcgcgtggccactccccctcgccgcggcgagcagcggggcgggcccttgcgccgtgcgcggccatgcgtggcagcggcggcggtggcggtggcggagagtttgcctcggacgatggcggcggggcgcgcgcgctgcttcgggcgacgctgtggggcgccgaggccgcctacatcctctggctcttcctcctaccatacgctccgggtgacccggtgtggggtatctcgcaagcaacgatcagtgacctcattggcttgtcgctcaatttcttcttaatcctgccattgctcaattctgctggagttcacctgctcgaatccccggtgttgcacccagtggctgaaggattgttcaattttgtgatcgcttggacactgctctttgcgccgcttctcttcacggattctaggagggatcggttcaagggatcactcgacctactgtggggttttcagatgttcctcacaaacactttcctgataccttacatggcaatccgactcaatgatcctgacaaggacaagtctccaccacaaacatcaaaattgggttcagttatggtaagaggtgctccaattgtcggcctaactggtggcttggtctgtattttgtcgattgcttgggcactctctggtcgcgcggatgctagttttgggggcattgctgaacgctggcagtatgtccaaagttatgtcttttcagagcggcttgcttatgcatttctttgggacatactgctgtattccatattccagccatggttgatcgcggacaatattcagaacgtgaaggcaagtgctactgagtttgtgaattcagtaaggtttcttcctgttattggtcttgttgcctacctgttctgcttagaggacagagatgattagctgctgacatgtcataatttctgtggccaagtatggagagatttatgttaaatg

SEQ ID NO: 12304 - DNA, 1397 bp, Oryza sativa
  ref <308>: DATABASE ACCESSION NUMBER: AK109652
  ref <309>: DATABASE ENTRY DATE: 2002-08-28
atccactcgccgcacaccaccaccctcacccctccccccatccgcgtgatctcccgagcagctagagcgcgcgcccgcggcgcctgtactgcgagaccgcttcgctcgcttccggtcggtgaagaggcggtcggtcgcagctgaagtagttgttgcagagatgatgatgatgagcggtcgcccccaccaccaccaccacctcctccccggcgccctcctacagccgcccggcgccgcacgacgcggcgccgtaccaggcgctctacggcgggccctacgccgcggccaccgcgcgcacccccgccgccgcggcgtaccacgcgcaggtgagcccgttccacctccagctcgacaccacccacccgcacccgccgccgtcctactactccatggaccacaaggagtacgcgtacgggcacgccaccaaggaggtgcacggcgagcacgccttcttctccgatggcaccgagagggagcaccaccacgccgccgccgggcacggccagtggcagttcaagcagctcggcatggagcccaagcagagcaccacgcctctcttcccgggcgccggctacggccacaccgcggcgtcgccgtacgccattgatctttcaaaagaggacgacgatgagaaagagaggcggcaacagcagcagcagcagcagcagcagcactgcttcctcctgggcgccgacctccgtctggagaagccggcgggccacgaccacgcggcggcggcgcagaaacctctccgccacttcttcgacgagtggccgcatgagaagaacagcaagggctcctggatggggctcgaaggcgagacgcagctgtccatgtccatccccatggccgccaacgacctcccgatcaccaccacctcccgctaccacaatgatgattaatctcttgaagaagccaagaagtgatcaacacgcggaagaaatcaacagcttctttcacggcgtgcgagctgcatgctgatgctccaggatcgatcgatcgatcattgcatctccaaactaatcacgcttcgatctttcaggacttcatcaatgacaggccgaaacctcctacgagttctctgatggtattcttatttttttcccacttcttttcgttgagctttttgtaatgttgcttcgagtgttactcctacattttctccgaaatggcctcagaatgatgcggtcgggctgattaattaggttagactcttcctgaaccaactaggaatagattttctgcctggttcctgtcagtccttgtaatatctgcagcagcttgtgagacaagcgtgttcgcttttgtgaacgccctttttcttctttccgattcctctgcctgtgatagtactcgctccgaaaaaaaaaaaaaagcaaaccgtggattcttgggtc

SEQ ID NO: 12305 - DNA, 823 bp, Oryza sativa
  ref <308>: DATABASE ACCESSION NUMBER: AK109653
  ref <309>: DATABASE ENTRY DATE: 2002-08-28
aaatctcttctcgatctgccagcggctggtggcaggcggtcgtccccagtgacgacgacgacctctcgagcgcggcgcggggctcaggaggcggcgcgtggcaggctcgagaggcggcacgtgtggggggggcggtggcggccagagtggatatggggacgaccaccctccccccgagcggatccaaggtcggccgccctcctcccacgcggatccggcgccgcgccctcccccgcggcgacgacgacgacgacggcggcgagctcgggcacggcggatccggctcgggcgcagcgatgacgacctcccccgcggtgacgacgacctcgggcacgacgaaggcggcgggcggcggcggcgagctcgggcgtagcgacaacgacgacgacggtaggcggcggggacggcagcggtctcaagcagctgtggctggagtggatctgggcggggtggttgtaccagcggctagcgacggcgatggcgacgacgggagcggtggcggcggctgcgacgaactcgggcggcggcggcgctagttttactttgtttttttttaattttatttttttcacaattttttctcttttcatgcggtcgacttaagcgtccgcatgcgaaaatcagattttcgcatgcggttacgctggccgcatgcaaagatcgccatatttacagacgatttcgcgcatgcggctggcccaaccgcatgcgaaaatcgttatggcccgtttgcgaaactgaatctgtagtagtggcatatctactattataaaaattagagatgtttccgccaaaaaaaaaaaaaaacaaaaaaaaaaaaaac

SEQ ID NO: 12306 - DNA, 486 bp, Oryza sativa
  ref <308>: DATABASE ACCESSION NUMBER: AK109654
  ref <309>: DATABASE ENTRY DATE: 2002-08-28
atcgttccatccccttcctctctctctactccctagctctcataaacgacaacctcagatcggatttggcattatgccacagagtcttctcctctcccctctccccttcccctctcctcctcctcctcctcctcctcctctaccagagcgtgcccgggcggcggctggcggcgggccgcgggcggcagggagcgcggcgatggcgggagctggcggccggtggcgccctctcctctgccggaggggggaggcggcagcggcagcacaattttctttttttttcccgaatttttgatacatttggatctaagaacttgtgattcattggatctgtgatgtatttctttaagaatttgagttgtagttttttgagaatttgtgatgtgaatgattcattgatttgaggatgatactttgattttgggatatttgggatatttggggagatttgggaaggagcaacttttggaaagaaacaatgaaaat

SEQ ID NO: 12307 - DNA, 928 bp, Oryza sativa
  ref <308>: DATABASE ACCESSION NUMBER: AK109655
  ref <309>: DATABASE ENTRY DATE: 2002-08-28
aatggaggtgacgttggagacggtggcggggcggcggttcacggtggagatctggttcttctcgacggtgcggcggatcaaggagtacgtgctgcggcaggagggcatccccgtggagtcgcagcgcctcttcttcgccggcgccgagctggacgacgacggcgacacggagcgctactccatcctccagggctccaccgtgctcctcctcctccccgaggacggcgccgctccgccgtcatccggtggcggaggcggcggcggcggagggacgaaggcgatggtgcgggtggtcgtgaacgcgcccgccgcgctcgcggggaagggcggcgcggtgaccgtggaggtcgacgcggcggcgtgcaccgtggcggggctgaaggagcgggtgcaggaggggaccgacggcgcgctgccggcggcgagggtggcgctgatgttcgggaaggtggagatggaggacggcagggcggtggcggagtacgtgccgccgggcgcggcggcggacgggacggcgacggtggtggtgtccgcggtcgtgcgtcctccgccgccgccgacgcctacgccgcagccgccgcagcagccgcgggtgacggtgaacgtgaagtggggagcgaaggcggcggcggtggaggtgagcgacatgctggcggtgaaggacctgcgcgcggagctcggcggcgcggcggcgcacctgccgctgcccaaggacggcggctacttcttcatctacaagcagaacgtgatggaggaggaccgcacgctgcggtggcacgacgtcaagaacggcgacaccatcgagatcttcaacggcagggtcaccggcggcgcctgatcacgaacccaatcaatccaatggatttccatccttgtaaaattcctttttcgtgtaaacaaattcggtaaaatctcgttgggacgcgtt

SEQ ID NO: 12308 - DNA, 789 bp, Oryza sativa
  ref <308>: DATABASE ACCESSION NUMBER: AK109656
  ref <309>: DATABASE ENTRY DATE: 2002-08-28
atcctctcctctcctctcagcctctcgctctttcctcctctcctctctctctcaccgacggctaggacgggagcggcgcggcaacggcgggcttggcaccggcggtggcggcctcccttccccgacctcccatccgacgcagcaccggcgggctcggtaccggcgacggcctcccttccctgacctcccatgggcagtggcgacctcccttccccgacggcggtgggcacggtgacgacgacggccgcggttggccggcacggcggctaatccggcggtactatcctcgggagggccggattctccaccctacggaggagctcggcgtgtggcgggcacagcgacggccgccggtggcagatctggacgacgggcgcgcagcgggcacgacgacggccggcggcggcgatcctcccccctcccctcaacgccgcggcggcaggggcggctcggccgcctcgggcagcgctgccccgcgccgattcggtgccatcgacgacggcgggcggcaggggcgacagatccggcgacggcgtgcggtggggacacagcttccggcggcgggctagggtttggggttttttagattttttttgtttgccgaatttattttcacatgcgtccggtataagcgaccgcatgtaaaaatgggattgcccattttcgcttgcggttgcgccgggcgcatgcaaaaagagcgatttttgcagacgatctcgcccgcatggaaagacccttgtagcctgcatgaaaaaacactttttcagtagtgtgtgatggaatttttag

SEQ ID NO: 12309 - DNA, 1206 bp, Oryza sativa
  ref <308>: DATABASE ACCESSION NUMBER: AK109657
  ref <309>: DATABASE ENTRY DATE: 2002-08-28
aaaaacccacgaacccctcgtctctctcactcccctccccaaccagatcaaacgctagggtttcctcgacttcgacttcgtcttcctcctcgagcagagcagcagcagagatgaagctcgcggggctcaagtcggtggacggggcccacgaggagtccatctgggcggcggcgtgggtgcccgcggcggaccaccgccccgcggcgctgctcctgacgggcgccctcgacgagaccgtccgcctctgggcccccgacgacctcgcctccgccgccgcctccccctcgcggggccacgcgctcggggtggtgtcgctcgccgcccaccccgcgggcgccgtcgccgccgccgtctccctcgacagctacgtccgcgtcttcgatgtggactcgggctcctccgtcgccacgctcgaggcccctccctccgaggtctggggcatccagttccaccccaagggtagtgctctggctgcagctggtggtggcagtggatcagtgaagctctgggacacagagaagtggaagccaattaccagccttgctgttccgcgtccagagggagctcgccctgataaaacaggaagcggcaagtttgtcctttcagttgcatggagtcctgatggcaagctcttagcttgtggttccatggatggcaccatcgctgtgtatgacgcagttcgcatgaagttcctccaccaccctgagggccatcacatgccagtgagatcaatggtgttctctccagtggacccgcacgtgctcttcactgcctccgacgattgccacatccacatatacgacgccaaggagaagagcctcattggggccatgtcagggcatgcgagctgggtgctgagcatcgacgtgagcccagacggcatggcggtagcgacaggctccagtgaccgcacggtccggctttgggacatcaacacgagggcgtcggtgcagacgatgagcaaccacaatgatcaggtctgggctgtcgccttccgaccaccgggtgggacaggagtccgcgcaggccggcttgccagcgtgtcagatgacaagagcatcaccctgtacgattactcatagttttaacactgcaacctgcaacttcattgtagtcagctgtttccaacttgcattggaaaaaaaaacctgttgtacaatcctaattaagctcatgagttgcaagtagagtgcgtttatttccagt

SEQ ID NO: 12310 - DNA, 1480 bp, Oryza sativa
  ref <308>: DATABASE ACCESSION NUMBER: AK109658
  ref <309>: DATABASE ENTRY DATE: 2002-08-28
atgcccactcacaacccaccgcacgcagcagcagctgcccgcctgagctgagctcccaatccggcaatccgccatgcccgccgccgagagctgccactcccgcagcctctcgtggctcgtcaagtcctgcatccccgccgaccccgcccgccacatcgccgtccccgttctttgccccaccccgcaaccgccgcctccctcgtcgccgccggcacccccaatctccaccctccccgacgacctcctcctcgagtgcctcgcccgcgtcccccgcgcctccctccctccgctccccgccgtctcccgccgcttcgccacgctcctcgcctccgacgccttcctccacctccgccgcgcccacgcccacctccgcccctccctcctcgccctctccgtctccgacaacggttgcgtcccgcaggcgctgctccggtttgaatcctccgcgcccgtgctcgaggtcgccccgctgccgttgcccccgaccctgctgcattgcggcggctctgtgttcgcgcatgcccgcgcggtcgtgctgggacgggatgtcttcctcatcggccgcggggcgacgctgcgcgtcgacgcgctcaccggcgccgcccgcgcgtgcgcacccacgctcttcccgcggaagaagttcgccgcggccgccgtgggtgatcggatctacgtcgccggcggatccgcgcgcaccgcggcggtcgaggagtacgacccggaggtcgacgcgtggcgcgtggtcggcgaggccccgcggcggaggtacgggtgcgccggcgcgagtgcgggaggcgtgttctacgtcgccgggggcgtcgcggtgtccggcgagggcgcgcgggcgctcgaggcgcacgtgtgcgccgggtcggtggacgcgctgcacgtcgcgtccggcacctgggcgcgcccccgtgcgctccccggcggcggctgtgtcgtgggggcgtgcggcgtcggtgaccacctgtacgtagtagccagccacgcggtggagctctccttctggaggtggtccggcgccaccggccgtggcggtgacggcagaggctggggcgggtgggtggcgctcgaggcgccgccgatgccgagggggtcggtggggctcggcatggcggtgcgcgtggcgatggctggcctaggaaccaacagggtggcggccgtggtgagcgccgcggccgtgaggggtcacaatgccggcggcggcgcgttggaagggatggtgctggtttacgacatcgccggcggcaagtggagccgcgcgccggacctgccgcccgggttccgccgcgccgcgtgcgccggcgtcgagtgctgagaatgttggtagatgtggtccccgtagttcagtgagattcgtactatttggtggatggacagcttggtgcaatgtcaagtaacatggcgccatcgtgggattgtttgttgaacagcaacttgattggttgccacaaaatttctccagttgttatttagt

SEQ ID NO: 12311 - DNA, 1135 bp, Oryza sativa
  ref <308>: DATABASE ACCESSION NUMBER: AK109659
  ref <309>: DATABASE ENTRY DATE: 2002-08-28
aggccacgaactccatagattttttttttttgtttctctttgcttcgatcgcttcgttctccatggcgagcggcggcggcggcggcggcgaggcggtggaggagggtacgacgacgcgggtgggcgacctgccggaggcgtgcctggcggacgtgatcgcgctcacctcgccgcgggacgcctgcaggctggccgccgtgtcgccgtcgttccgcgccgcggcggagtcggacgccgtctgggaccgcttcctcccgccggactaccgcgccatcgcgcccctgccgccgccgccggctacggcggcggcgagcggcggcaagaggatgaagaagggcgtctacctcgggctctgcgacaagcccgtccccgtcgacgacggcagcatgatggtgtggctggagaaggagagcggggccaagtgcttcgcgctgccggcgaggaagctgagcttgccatgggaggacggcgagttcagctggagatggacacctcaccctctctccaggtttgaggaggtggcgcagctggtggactgcacgtgcctggacatctacgggcggctgccggcggcggcgctgacaccggcgacgccgtacgcggcgtacctggtgttcggcaccgcggcggcggcggaggggcaccgcgggctgagcttcccggaccaggagacgacggtgtccgcggcggggcgcgtcgtggcgcgccacgccgtgtgcctccgccccgacgacgccgaggcgcgcaagttcaggggcgtcggcctcgccgacgccggcgtcccggtcaggcgccccgcgcggcgcggcgacgggtggtcggagatggagctcggccgggtggccgccgacgaggtcgccggcgccggcggcgaggacgtggtggcgagcttcgaggtgctcgggtggtatcccaagcgcggcctcgtcgtcgagtgcatggagtttaggcccgtagtctgaagttggtaaaatgaacggtcgtgatcgcgcggattcgcgggttgtatgacgtatcggacggtccagatgttgggcacgtggagccatcagttcatctcgttgatgagctgctaaagtatggattgcacttgttctgatatatataaacgaaatacaaccattattagtttatt

SEQ ID NO: 12312 - DNA, 924 bp, Oryza sativa
  ref <308>: DATABASE ACCESSION NUMBER: AK109660
  ref <309>: DATABASE ENTRY DATE: 2002-08-28
gcagcttttggcaatggagcccgcatttcccaacggaggtgcggctgctccaccaccgcccatggcggcggagcagctgccgccggcggcggcggtggtccgggagcaggaccgcctgatgccgatcgcgaacgtgatccgcatcatgcggcgcgtgctcccgccgcacgccaagatctccgacgacgccaaggaggtgatccaggagtgcgtgtcggagttcatcagcttcgtcaccggcgaggccaacgaccggtgccaccgcgagcaccgcaagacggtcaccgccgaggacctcgtctgggccatggaccgcctcggcttcgacgactacgtcccgccgctcaccgcctacctccgccgcatgcgcgagtacgagggcggcggatcaggtggtggtggtggtggtggccgtggcgccgccgccgcccccgccgtcgtgccgccgccgccgccgccgcctcccgaggacgcgttccgctacgtgcaggtccatcatcccgtgtacgcggcgccaggtgagccggtgcaggggtacggttaccccgtggccatgtcgtctgctctgccggcgccgcacgtgcacgtcggcgtccgcggcggcgggcagcacgaggtgttcggtggcgggccggcgcccctggctgtctactacggaggagcgccgtacggcgaggccagcagccgcggcggctgctctgccgccgacgaggggagctcgtcgtcgagcgcctcgccggcgccggtcggccccaactatgagtaaaaacaaaagaagaagaaaatcaaactcttccccggctgacaggtgatcgagctcgtcgtctacaaattatcaatcgtctgtcgatcgattagcatgtaatctaataaaaaaacttaagctagcttaagacttaattagacatgttctgttcatctttc

SEQ ID NO: 12313 - DNA, 1051 bp, Oryza sativa
  ref <308>: DATABASE ACCESSION NUMBER: AK109661
  ref <309>: DATABASE ENTRY DATE: 2002-08-28
aatcaacctcctcttccttcctaagctacgccaaagcccactccccgcaaccacccccacacccccaccaccggcgaccaccgcccccaccaacctcgccctcgccctcccatggcgaaggcgcagcctccgcctgcgcgggagcccctgctcccctcctccgcctccccgccaccctatctggacgcccgcgccggcgccgacgccaacgcggactcgtacgtcctcctcgtccccgtgcggctccgccggctgcggcgcgggtgccgctgccgctgcctcggcccgctcctctccacgctcgcgctgctctccctcgccgggttcctcctctggcccgccgacccggacgtcagcgtggcgcgcctccgcctcgcgcacgtctccgtctccgcgcgccccaccgtccgcgtcaccatctccgccgcgctcaaggtccgcgtccggaacccggacctcttcgcgctcgactacggccgcctcgacgtcgacatcggctaccgcggcgcgccgctcgggcgcgtcacctccggcggcgggcgcgtccgcgcgcgcgccgtctcctacatcgacgccaacctcagcctcgacggcataagcgtcgtggaggacgcgatctacctcctcgaggacctcgcgcggggatccgtgcccttcgacaccgtcgctgaggtcgagggccacgttcacttgttcttcctcagcatccctgtcaaggggagaatatcttgtgtggtgcatattaacccgcacaatcaaactatagtacaccaagactgctatccggattgagttgctaatggcgttctagcaatcgtcgcgtgtgaagaggtcattttaaacttcccttggagtgctttcagctgttgtataaatatgatccatttggttatgtaccatggttgtgcacttgaggcaaaacattctttatcttgcactacgctggtagacgggtcgattgtaaatttcttagcaggcctaaataccatggttttaagtcatgtctatacgatcaatcagttacccaaagagaaaaaaattccacattggc

SEQ ID NO: 12314 - DNA, 1397 bp, Oryza sativa
  ref <308>: DATABASE ACCESSION NUMBER: AK109662
  ref <309>: DATABASE ENTRY DATE: 2002-08-28
acaccacactgcagactgcaccaccacacgccgcgccgccgaggagaagggtgtgcgtgtgactgatcgacgacggaggagcgcgtgtacgttgccgaggcgacgaagggtgcagtgatcgtatttgttggtagtgtactagtgtgcatgcgcatggcgctggtgcgggagcgcgcgatggtgtacggtggagggtgcgacgccgaggcgttcggcggcgggttcgagtcgtcccagatggggtacggccacgacgcgctgctcgacatcgacgcggcggcgctgttcggggggtacgaggcggccgccagcgccgggtgcgccctcgtgcaggacggcgccgcggggtgggcgggcgcgggcgcgtcgtcctcggtgctggcgttcgaccgcgccgctcaggcggaggaggccgagtgcgacgcgtggatcgaagccatggaccagagctacggcgccggcggcgaggcggcgccgtaccggtcgacgacggccgtcgccttcgacgcggccaccggctgcttcagcctgacggagagagccaccggcggcggcggcggcgcgggtgggcggcagttcgggctgctgttcccgagcacgtcgggcggcggcgtctcccccgaacgcgccgcgccggcgccggcgccccgcggctcgcagaagcgggcccacgcggagtcgtcgcaggccatgagccctagcaagaagcagtgcggcgccggcaggaaggcgggcaaggccaagtcggcgccgaccaccccaaccaaggacccgcaaagcctcgcggccaagaatcggcgcgagaggatcagcgagcggctgcggatcctgcaggagctcgtgcccaacggcaccaaggtcgacctcgtcaccatgctcgagaaggccatcagctacgtcaagttcctccagcttcaagtcaaggttcttgcgacggacgagttctggccggcgcagggagggaaggcgccggagatatcccaggtgaaggaggcgctcgacgccatcttgtcgtcgtcgtcgccgctgatgggacaactcatgaactgaactactactgtagaagaagaaactacgatagaaattattaatcaataacgaaccacctcgttcgaagataaataatcaagggaggcatatgcatacgtacgcaggcacaaaacttttgttttttttctctcgccactgatcattagcgctatcaatgtacctttttttaggggagttaattagcgtgacacacgtacagggaggtttaacattttgctaaaccttgtggtcatgttcttgtgtactgcgactaaatacaacccccttttctctcttcatgatatggatcgttccatcatgtaagttttagtcagatcagaacatgtaacagtggttagtcaggtgtc

SEQ ID NO: 12315 - DNA, 1055 bp, Oryza sativa
  ref <308>: DATABASE ACCESSION NUMBER: AK109663
  ref <309>: DATABASE ENTRY DATE: 2002-08-28
actcccacgcggcacgcaccccgctgcaccctgcaccacgctccactccacccccacccccaccccaccccacgccgcgccgcgccatgcgccgcctccgcctcgccgccgccgccgccgcgccacacggcgtcctcctcctcctcctcatcctcctgccgctcgtggccgcggccgggccggcggcggccaaggcgcccgcggccccgccggctccgcccaacgtgacgacggcgatggcgaagggcgggtgcaaggccttcgccgacctgatcgcggcgtcgcccgacgcgtcctccacgtaccagtccgccgccggcggcggcatcaccgtgttctgccccaccgacgacgccgtcagggcgttcctgcccaggtacaagaacctcaccgccgacggcaaggccgagttgctcctgttccacgccgtgcccgtgtactactcccgcggcagcctcaagtccaacaatggcgtcatgaacaccctcgccaccgacggcgccgccaagaactacaacttcacggtgcagaacgagggcgacgccgtcaccatcaagaccgccgcctccggggacgccgcgcgggtcaagtccacggtggtggacgccgaccccgtcgccatcttcaccgtcgacgcggtgatcgagccggtggagctgttcaagccggcgccgtcgccgacgcccgcgccgtcgcccgctccggcggcggacgctcccaaggccagtaagcccgcgcaccacccggcgcccgtcgtggcggacgctcccggccccgccgccaccgactcgcctccggcggaccagaagaaggaggccaagaagagcgcggcggccggcgcgccgccgtgcgtccggtggttcgccgcggcgttggccgccgtcgccatggcctccacattggcctagggcaattgttcttttttttttgtgttcttggttgatgatccattggcgtgatcgtggtgtgatggcgtgttgatgtgcttgcgagatttgtgcttactttcgtggaagaactagtggagtgcttaaatattttgttagtgctttcct

SEQ ID NO: 12316 - DNA, 1298 bp, Oryza sativa
  ref <308>: DATABASE ACCESSION NUMBER: AK109664
  ref <309>: DATABASE ENTRY DATE: 2002-08-28
aattgcccccgattccctcttctcagtcgcagaacggtacccctcgtacgaaaacgaggctcagtcggttaggaatttctgtaaccggtttcacctctgggcaagggccatggccacttcttctcggaggatgcgcgccgtgcagtacgacaagtacggcggtggagctcaagcactcaagcatgtggaggtaccgatcccgacgccgaagaaaggcgaggtgctgatcaagatggaggccggcagcatcaaccaggtcgactggaagttccagaaaggtgtcgctcgcccgttcatgcccaacaagttccccttcatcccagtttatgatcttgccggagaggtcgtggagctgggccgcggcgtgagcagcttcaaggtcggcgacaaggtcatcgccatcaatttccctggcggcggcgggctcgccgagtacgcggtggcgcaggcgtcgcggacggcgccgcggccgccggaggtgtctgcggccgtgggcgcgtgcctgccgatcgccgccgtcacggcgctcgtggcgctgaggaccgccggtgtcagcttagacgccggcgacggcggcggcggcggcgccaagaagaacgtgctggtcaccgcggcgtccggcggcgtcggccacttcgcggtgcagctggcgagcgccgccgggcaccgcgtcacggcgacctgcggcgcgcgcaacgccggcctcgtcggcggcctcggcgccgacaaggtgctcgactacgccaccccggagggcgcggcgctgcggagcccctcggggcggaggtacgacgccgtggtgcactgcgcggcggtggcggggctcccgtggtccgcgttcgcgccggtgctcgccgacgccggcgtggtcgtcgacctcacgccgggcgccgcggccttcgccacggcgctgcggcagagggtgaccttctccaggaagaggctggtgccgctgttcgtgtcgccgacgaaggaggacatggagctcgtcgccggcatggtggcggaagggaagctcagggcggtgatcgagtcgaggcacccgctgagcagggcggaggagggctgggccaggagcatggcggggcacgccaccggcaagatcatcgtcgagatgggagacgaacagtgagtgtgagctcgacggatttgtggcctggaagaacagaataagatacgattttgtagcgtgcaactgtgcatgtatagatgtactgcttgagtcttttattgactctcatcgtttgtttgtttgttagcttataagccacaatcatcaaaatttaagttttcaaact

SEQ ID NO: 12317 - DNA, 1452 bp, Oryza sativa
  ref <308>: DATABASE ACCESSION NUMBER: AK109665
  ref <309>: DATABASE ENTRY DATE: 2002-08-28
gatgatacctctcaaatcttcatcccctcggccagcaggagtggccaacacgcaggagcgcctcgtcggcggcggcggcggcggagtatggcggcgcggccgatcgccaaggcggcccacgagcttccgtcgctgtaccgtttggccctgaaaaccccagagatcttggtgggggcggggaaatccgggcaggcggacaacgaggccctcgacctgttcgacggaatgcccccgaagaaccaggtcgcctggaataaggcgctgggcatgctcgtcggcgcagggcgcatagagcgggcgctctcgtttttccacgagatgcccgggaagaacgccgcctcgtacgccaccatgatcgggggcctctcccgcgccggggcggcctccgtggcgcgccgcctcttcgacgacctgccgctgggaaagcacaacgtgttcacctggacggccatggtgtcctgccatgtccggaacggggagccccgcgaggcggtccagctgttcgcggcgctctacggcgagctctacgaacgcggggtgctgcccaacgcgcacacgctcagctcgttgctcaaggcctgcgtggctctccagtcgctcgccatggcaacgcagctccatgccctggcactcaagctcctggaggaggaggtggggaagccggaggcgggaagagctctgaacacttaccaggatgcagctgggtcgtctgaaactctgaattcatcagaaagttcagctttcgcagggcatggttaacgcgagctacaacttgaggttggattcgcgatgctgatccaataaggaaaaggtgatttgaaggaaaaaaatagtcccatgctgatacaacaagggaacaagagagattgatttgaatgaaaaagcaacaagagagatgatttgaaggaaaaagtagtcggtgaatgttccatggtgaggtgaattcagaacgagaatggcattgaagcatcagcccctcatcagatgggaatggaatacgtggtccttagaagcctgaaggatggatgggagacacatgcagtggaagaatctgtaagcaatgacattccttcccttcctgtggcatagaacgtagatttatttataccttcaaaatcaaatgttaggcagacatcctgtggcagatcctagatttatctataccttcaaaatcaaatgctaggcagacagatgaagagtaatttttaggcgtcaagatgtacacgtgtggcatgtctccaaaatgcaacctatcgagtgcattttactgtcaaatagtgactagttcaaattcttatacccaatgttggaatccaacaagaacagagagtacaatgactgcagcatgtgctaattagttgtaatgtaatgctaaaacaccaccaccaacttgtcatattaaagccatgtccataaattagcacagctcatacgacatgtctttccaactac

SEQ ID NO: 12318 - DNA, 1340 bp, Oryza sativa
  ref <308>: DATABASE ACCESSION NUMBER: AK109666
  ref <309>: DATABASE ENTRY DATE: 2002-08-28
gacgagcgaacggcatgacaacgccttcctaccgcgctcgtgctgcttgccctcgggagcagcagcatacggctcgtgcgacggcgaccacgcagggctcggcgacgacgaccgcgacggcggggggctcggcgacggcgacggcggatccagtggtggggagggcggcggcggtggatccggcgatggggaggactgcggcggcggattcggcgacggggaggagcggcggcggcatgcgaggaggaggtcaaagggcggcggcggatccggcgatggggactgtggcggcttgcgaggaggagctcgcgggggaggagcggcggcggcgtgcgaggaggaggtctaggggcggcggcggatctggcgatggggcggcggcggattcggcgatggggagaagctgcggcggcttgcgacgaggagctcgcggggaaggagcggcggcggcgtgcgaggaggaagtcgagggacggcggcggatccggcgatgggaaggagcggcggcgacttttcctcttgctcttgctcgctgccggcttttcctcttgctcgccgccggcttttcctcttgctcttgctcgccgtcggctcatcctcttgctcttcctccggcgatggggaggactgtggtggcagatccggcgatcggttgacggtgattgcaaacggcgtccatcccttccctctctcatcccttcaaccaaacaaaaaattgggatcgtcccatcttacaaaccaaacatgtgagtggaatcatcccaacccaaaaatcagggatggttctatcccatcccacttagtcccgaaaccaaacactacctacaagtacaagaagctgggctgctgcatgcaccacacatgtcaacctgctgcgttttcttagaattgagatggccttatttcatcctttccgactgaaccgatccagatgatcatcaagtgggactgacatttcaagttccaaaatctccgtattgtgtcaccgtagtaggatctaaaattaaatagtacttatcccataaatcacattctatttaaatatctatgtacaataactttcttagtagtaagtaactactacaaagttgtatggtagtagcaggtactccctatatcgtttgacttttattcctaattaagtttaactaagtttatagtaaaatatattagtattttcaacacaaaacaaacatattatcaaaatatattcaatgttagattttaactagtttagtattttagatgttgctaaattttttcaataagtttggtcaaacttaattagaaaaaaagtcaaacaacttataatataaaacggatggagtacttaagtttgt

SEQ ID NO: 12319 - DNA, 1619 bp, Oryza sativa
  ref <308>: DATABASE ACCESSION NUMBER: AK109667
  ref <309>: DATABASE ENTRY DATE: 2002-08-28
atccactcgatgacgtgtcactctgccatggcggctctcaccgttgggcacgcggcgatcgtccatgccaccacgcgtctcgaggacgcccggtccaccggccgtcggcggcggcggcgggggatgatcacggtgcgcgcggcggcggcggcgacgagcgggtgggagccgggcagctggagggcgcggccggcgaggcaaatcccggagtacccggacgcggcggcgctggagggcgcggagcgcgagctggcgtcgttcccgccgctggtgttcgccggggaggcgcggaagctggaggagcggctcggggacgccgccatggggcgggccttcctcctgcagggcggcgactgcgccgagagcttcaaagagttcgccgccaacaacatccgcgacacctttcgcctcatgctccagatggccgtcgtcctcacctttggcggccagatgcccaccatcaaggttggaaggatggctggccaatttgcaaagccaagatcaaacccaactgagactatagatggagtgacacttccttcctatcgaggtgatattattaacagcgatggttttgatgagaagtcgcgtgcaccagatcctgaaaggttaattagagcctacagccagtccgcgagcaccctgaatcttctgagaggatttgctcatggagggtatgcagatctgcagagagtcacccagtggaatcttgacttcttgagggacagcacgcaaggggacaggtatatggagctgtccgagagggttcacgatgccatcggatttatggttgctgctggtctgactcctcagcatcccatcatgacgacggctgaattctggacatctcatgagtgccttcatttgccatatgagcaagcattgactagggtggactccatttctgggctttactacgattgctctgctcatatgctttgggttggggagaggactcgacaactggatggtgctcatgttgaattccttcgtggtatttccaaccctctaggtgtaaaggtgagtgacaagctcgaaccttcagagcttgttaaattgtgtgagattttgaatcctcacaacaagcccggaagactgacaatcatcacaagaatgggtgctgagaacacgcgcgttaagctcccacatatgatcagagcagtccgccaagctgggttgattgtcacttgggtcagtgatcccatgcatgggaacaccatcagcgcaccatgtggtctcaagacaagatcattcgacgcgatcaggtgcgagctgagggctttcttcgatgtccatgagcaagagggaagctaccctggagggattcacctggagatgacagggcagaacgttacagagtgcattggtggatccaagacggtgacccttgatgatctcagctctcgctaccgcacgcactgcgaccccaggctgaatgcatcgcagtcgcttgaactggctttcgccattgctgacaggctaaggaagaaacgagacagggcttggaataggttggtgtacagggcggtagcttaagatatctagctcggaattttggccctacaagaagagatagtatctagcttggagtagttcattctttttttttccctttgaat

SEQ ID NO: 12320 - DNA, 1616 bp, Oryza sativa
  ref <308>: DATABASE ACCESSION NUMBER: AK109668
  ref <309>: DATABASE ENTRY DATE: 2002-08-28
attattacatttaggtccctacataagtttggtaattacaaatagcccctttagggaggagaccttggccgtggaggtttccataaaagccctccaaatagttccggctttgcacggacacgtccctccctctcccccagcctccgccgccgctcgccggccggaggaaccctctgatgccgctgccgccggtgtcgtgaggtggtaggatatgggcggggtgacgtcctcggtggccgcgaagttcgcgtttttcccgcccgacccgccggcgtacggcgtggccgacgaggaggagccgccaccgccggggtcggctgctccggcggcggcggcgacggcgaggagggtgtctctgacgggggtcccgtggagggaaggtgtggaggcgaggcgggtgcggacgcggcggggcacggagatcatcgccgtgtacgtgcggtgccccaaggcgaggctcaccgtgctctactcccacggcaacgccgccgacatcgggaagatgtacgagctcttcgtcgagttcagcgcccgcctccatgtaaacctcatggggtatgattattctggttatggacggtcatcaggcaaggcaagtgaagctaataccttcgctgacatagaggctgcatacaaatgccttgtggaggtatatggcaccagggaagaagacattatcctgtacggtcagtctgtcggtagcggtccgactgtcgatttagctgctcagttacatcgtataagagcagtagttctgcacagccccatattgtctggcctgcgtgtcatgtattctgtgaagaaaacatactggtttgacatatacaagaacattgagaaaatgccccttgttaaatctcccgttttggtaattcatggcacaaatgatgatattgtcgattgttcccatgggaagcagctatgggagctgtgccaaaataagtaggaacctctatggatcgagggaggagaccactgtaacctgcagaccttcccagtgtacataaggcatctgaagaagttcatatcgacgatcgaaaatatgcctttggagaaagaatcatcatcaaccgagaatgagaagctgctagccgaaaccgaaacggcttccgatggttctgctctctctgacgctccatggacgacctcacagaggctagagccaccgaggaagagcacgaggcatgagctgccgcctcgattgagcaatgatcgtgtcgataaacgaaggcgaagcacgggccgcagagagaagccaagatccatcgtggagaagaaagaaaaatcaaggagaagtgttgacacatttgacaggacgagggatgaacacgatcagccagataaaccaagaaaaagcatcgacaggctcggagagatgatcagatcgatggggctctgcaatgttgattgcttcaaagagcctcctcgaagcatcgagactagccgagatcggtgatcgattcagagagtggcgttgtggctgtagctagtcttctctcccatgttagatgtcaacattggtctgtgtggtgtgtgctccggatgatgatcaaaatcataaaccatctatgaacagtaaagagaaatatagcacgtcatttttttgtttttttttt

SEQ ID NO: 12321 - DNA, 1379 bp, Oryza sativa
  ref <308>: DATABASE ACCESSION NUMBER: AK109669
  ref <309>: DATABASE ENTRY DATE: 2002-08-28
aacgcagagcgcgactcgccgtccgtcagcggtggtcgcggcggccggctacaagatgatggcgtgcagggccctcgcgctcctcccgctcccggcgccctcccgtctcccccgcccgcgcgccgcctcgctcgcgcggctcgacgccgcccgccgccgcgcctctgcctccttattggtccggtgctgcgccaaccccgccggtcccggaggccaggaggatccgccgcaggacgccgtgctcaaggccatctcccgtgagtaaacctttccttcccgttccccggaacccccttcctcgcctcgccgtgccagtggtagttctgctcttccctcttttttgactagcgattgtttggggactgtcgctggtgatttcagtggccaggtgatgatttttttttttttgagattgggattggggttttaggtgtgtctggatttgcagctctgctcgccgccgattgcttacagcaatgtgagtggaaagataacatagggggcaatggtgctgaactcctgataggatggacttccttagatattcttcttgtcccttggtcaaacccctaccagcagactgatttggagtaaattaccgacaaatggtggtaggggaatcttcgatctggttgcctcatcgttattttcattttaaaggagaagttacattcagtgtcaagttggtcactctttggacatacggttattgcgaatttgtaggtctcaatctttggttatatgcatacttaatgggctaatatggtgagaatatactatgttcagttctcttcctattgtttgtttgtgttaagttttccataggttataacatagtggtggtctcttgtggttttaacttttcatttcctaaaatagaggtagcgaactctaaaggacgggttgcacagacaacaaatgttgtcatgggtggtactgtgacagatgatgcaactgatgaatggcttgttctggataagcaggtatcctatcctctctattgggtgtttcattattacttctgtttgttctttctttcacaacaggcaagtgaatgtgcattttaaaaaaaattaatggaagcgcttgtttcatggagtcattttgctccattttcatgtaaatattccatctgaagttggaaaggtaggaatttatgtgtccctctagatttcaacttagattttttgcatcactgttcttacactagattgtatactgggaagctacataaggcaacagcagacaatgtcattaacatctgcagtcactagtcggtaatcatggctaaggcccagttcttttctccaactccaaacttcaactttctcatttttcgttagcaagtttttcaaactattaaatgatacgttttctgc

SEQ ID NO: 12322 - DNA, 1664 bp, Oryza sativa
  ref <308>: DATABASE ACCESSION NUMBER: AK109670
  ref <309>: DATABASE ENTRY DATE: 2002-08-28
atcaaaacccttgtaggtttccttggcgtcctgcgtcctcctctgcacccgatctcctcgaccaagacggagatggcgaccaccgccctccccctcctccacctcctccctcggatcgtatgcgccgccttcttcgcctgcctccccggcctcgtcgccggcatacggaaggacattggtcttgcagcacccatcatgtgcaggagcactgtgcaagggcggcacctgatatcagatgataatggttatgtatgttcttccttatctatcgatccatggtctcggtgttgcccaagaacagggtcacgtttttcctgtcagtgagtttcttatcttttgttgctcacttcactttcagctctgcaccgcaataaatgggtacagttataaatttaacaatcttcatggcaccaaccaggggttgcaaactcgatttacagtgctgtgattcttatgaatattgtgtttcttgctgcttaaatccttcaagaaccaaggaaacagatgtgctgaagttgaaggtagctagaccagttacttctggaacttacagaaatgtcttcgatttctgcatgggaagatgccgccatagttctgcaagtgtggtactgttcttttttttttttgcagtgttctattgtaacggttcataatattctatgaaatggttttccacttttacctgccatatatgaaataaggaaccaaggttcagggtgcagttacatcctggtggtgcttgtcatgctagcatgttataaatcaacaattcacaaaatctatgtgctagaatgttctgataaacagcattttcttcaatcaaagttttgtttaatcaaccaggtacatgaaaatgcgtatgcaagtgacttccatcattgcttcttgctgcagcagaattcttcaggatcagctgattctggttctggaccaaggctggatggcattaacatcagcataggaaggaggggcgaatcttgtagttctgtgtgcagagcaaaaggacaatcatgtgttccaagcaggctttctgttctgaacaaatgtgagattttgcagaaatatatgagatgcaaaagtggttgtttcagcaatcttggaccagatcaacctgctcaagttgtagatgaggctccaagcaatttgaatccaggagcatgcttgtacatgcagatggatgagcggctcacatgtgatggttcacatcaacatacccgaaggctgtgtccttgtgcgtgaaatgtaaaaaagttgttgctgtcataactcataagaggaaacaagtggagatgatcagcttaaaactgatggctctccttgatgagcaaagcaaactttgtccctgttgtttgtcccaacaagaaatcgccattttgcaaactgtgcaacggttgatgcaaaagaagggaatatggatacctgtgaatcatcctatggtatttgctaggatgttacacatcgaaaggaaatgcatgcatttcaagtgccattggcccattgccctacaatctatatacatgcaagagtgcaggatgcaaatgcattgcatccatgcatcccttagaatattctatttttttctctcttctttacatgcatcattcatgtgcagagcaaacatctcaaacaattatattcataatatattgtgcagtttcccacgc

SEQ ID NO: 12323 - DNA, 1093 bp, Oryza sativa
  ref <308>: DATABASE ACCESSION NUMBER: AK109671
  ref <309>: DATABASE ENTRY DATE: 2002-08-28
ctcttttttctccccccacaaaacccggagaagcgaaatcaaccaccagatacgacgagcgcctcgacagcgatccgccgccgccgccgccgccgcgtcgggtgtgtggtagggtttggggcgatggggcccccctccgcctcctcctcgccggcggcggcgccgcggcggtcggcgccgacgatgaggctgcggagggaggcgctggagtcggtgctggaggaactccggcgggcgctggacgagcttcgcgagtgcggggagctcggcgtgcctctccctgaccccgagggagccgttaacgacggcggcggcggcgaggagcagccggataacgaggaagaaggcggcggcggcggcagcagcggcggtggtaacgatgatgattcggcggcgtcgctggcgggtggctccgacggtgagacggacaagctatgtgatcttcttaaatctacattcgaatcacccaatttttttcaaaaggttgatgaaattcagaagtcactgtatcaaaatgatgcagttgaacaagatccatcatgggatatagtaaaggcagtagatttgtgggaagacgatgacttaggtgatggatatgttcttgttaagaacgatgatgcaactgaggggatggctttctttattgccacatacatatcgtcgcttaaaacagccaatgaatgttctcctgatcaaattagaaaagccctcaagaagacattttcatctcgaaagagaaaaggtaaacttcggaaggcatggaatgggacaaaagttatttataatgtagattcatggagtgccacagctattggaatctaccataatcaagcaattcttaaggtagcaactacagccttccggacgtcctgcagtgtgatatccaaatttctgtgagctgctgctgttactggcatgcttcccatcatcattaggtaaattggctaacacggccagaaagacctgcaatactcatgtaaaatagtgtctattcgttggtttgccattgtaagctttgactttctacaacctaactgtaaatatgacattcgtttgaaactttgaataaacatttcaataaatttagtgctgg

SEQ ID NO: 12324 - DNA, 1650 bp, Oryza sativa
  ref <308>: DATABASE ACCESSION NUMBER: AK109672
  ref <309>: DATABASE ENTRY DATE: 2002-08-28
gactcctcctgctctgtttgttcgagtaattaattaagctccgaccacgaagcttctggcgattgtcggcgtcaagaacagcttgacgagcaggcagcaagaggattcgttcttcttctgtggtggatcttgattgggctccctgttttagtgttctgttcttcgcaagaaaggggccattctcttttggtttctacatgcagatgagtagcatggcatgccattcccttccagagagtggaagcaacttgtcagctgctgatgaactctttcagaaccaaaggtcagagcagggaatttactggacactctgggactccaggctatctgatgatctgaacacaacgaccgtatattcagacaatcatggcagcaacggtggcggcacgcaatctttcgacacctctgaacattgcagtacagtgccttcagattcagatgagcaacctggatatccatcacagtttgagcctctgcacatggagcaaacaaacgacatgttcttgagccagttttcagatgaggaggtgaggaggatggatgctccgttccaggcgctggacatgttcccggactccatgcacaggctcatgtcctacgaacacatactgaacggagctctggtgtccgattccaagaatcaggaggtgaacatggatcaagacgacatggacacctgcggtttccctctctacttcagccatggcctgcaagatgatggcggcttgccttcttttgccaaggggatggttgctgcagacacctcctccatggacaaggctggagcgagcgcgacggagagaggcgatccggggagttcgccgccgggattcgaagaagctgtgctcgaggagctcgaggaggtgatggtgcagatggcgaggacgacgcggatatgcctccgcgacgccttctaccggctggccgagggctcgaggtcgccgcgctccgccgccgccgccgcagacggcgccaccgtcgccgaggccaccagtgcgtcgacgacgcggccgcgccgtcgccgcgacgcgatcgacaggacggtggtgagcctcaccttcaggccgccgccgtgctcgccggaagcagaggcggcgatgatgcggcccacgcgtgcctgaggaggccgagctcgccgtcgccggatcaccggaggacaggaggagattcgcttggtttttctttccagtgcgatcttgctcgccgcattgcaagctcactggcttgcctgacgaaggatacactgtgtatgtgacctgcagctttgccatgagagctttctatgttccaagcatgtggaatttgatgcttggtttttgtaacatcccggcctagggcttaataggattaatagaatactcatatcaacaagttgcaacttcttttccggaagccaatcttcaaagaactctaggtaacctggagcaatttgggatgggtgaccgaccgggaaattcctcccgggtgcacacgagtgaggacaaagtgtgcagaaaagatatgtgccccctctgtgagggcagtctatgacctatgaaagctatcagatgtaaacgggtccggcctgggggaaggcgggatgttacagttttgatgttgcttttagtacatttttgtaatggattgacaaattttgacgtttgtgggggc

SEQ ID NO: 12325 - DNA, 1972 bp, Oryza sativa
  ref <308>: DATABASE ACCESSION NUMBER: AK109673
  ref <309>: DATABASE ENTRY DATE: 2002-08-28
aacaacaatgcatcgttcgttcgttgcaaacagcagctagtacgtgttcgatcgttgcatgcacgacgcaaacatggccatgtcgtcgcgaagcttaggcgccctagccgccttcgtcttcctctgctcagctgcctccatgtcgtcctccatggccgccacggacagcttcctccaatgcctctcggcgagcatacccagccagctcctgtacacgcagagctcgccgtcgtacacgtcggtgctggacgccggcatccggaaccctaagttcctgacgaacaccacgcggccggtctggatcatcacgccgacgaacgcctcccacgtccaggccgccgtgctctgcggccgccggaacggcgtccgcctccgcatccgcagcggcgggcacgactacgagggcctctcgtacaggtcggagcggccggagacgttcgccgtgctcgacctcgtcaacatccgcgccgtccgcgtcgacgcggcgtccgccaccgcgtgggtggactccggcgcgacgctcggggagatgtactacgccatcgggaaggccggcggccggatcgcgttcccggccggcctgtgtccgaccgtcggcgtcggcggccacttcagcggcggcggcttcggcatgctgctccgcaagtacggcctcgccgccgacaacgtcgtcgacgccgtcctcgtggacgccaagggcaggctcctcgacaagaactccatgggcagcgacgtcttctgggcgctccgcggcggcgccggcgagagcttcgggatcgtgctctcctggaaggtgaagctcgtggccgtgccgccgaccgtcacggtgttcaacgtcccggtgaccgtgagccagggcgccatcgacgtcgtcacgaggtggcaggccgtcgcgccgtcgctccccgacgacctgttcatccgcgtgctcgtccagggccagagggccagcttccagtccctctacctcggcacctgcgacgcgctgctgccggtgatgcgcagccgcttcccggagctcggcatgaaccggtcggactgcagggagatgacttggatccagtccgtcccctacatctacctcggcagcagcgccaccgtggaggacatcctgaaccggaccatcgccatggacacctccaacaaggccacctccgactacgtccggcaagccatcggcagggacacgtggagcgccatcttcgggtggctcgcgcggcccaacgccgggctgatgatcctggacccgtacggcgggcagatcggcagcgtggcggaggcggcgacgccgttcccgcaccgcggcggcgtgctctacaacatccagtacatgaacttctggagcgcggcgggcggaggcggcggcggcgcggcgcagagggcgtggatcagggacttctacgcgttcatggcgccgttcgtgagcaaggacccgagggaggcgtacgccaactacagggacctggacctcggcgagaacgtggtcggcgccggcggcgtcagcagctacgacgccggcaaggtgtggggggagaagtacttcagggggaactaccagcggctcgccatggccaaggcgcagatcgacgccgacgactacttcaggaacgagcagagcatcccgccacttgtcgccggaaaatgacgagccaattcaaatgtagcatggcctactccctccgtcacataaaaaataatctagtgccggatataattaggaagtatcagatttaatactaaattagttttttatgagatggagggagtagtgcatggcagacagtcaaactaatagctgtaaaaatctttggtcatgtgtaaagatgcgtggtgtatagggtagctacgccgtctatatgtttgaaaattcatcactgtacttatcttttttttcttccaattgtattttgtggtgcggatcgatgtactatctttcacataagctgagcttattgcgtgctccattcgttgt

SEQ ID NO: 12326 - DNA, 1626 bp, Oryza sativa
  ref <308>: DATABASE ACCESSION NUMBER: AK109674
  ref <309>: DATABASE ENTRY DATE: 2002-08-28
atctctctcccctctccgacaacgctcgtggccgccatcgactagccagccaccgcggacgcgcaacggccttctttgtttgcgcccacttctagcaaggccgccaccgccaaccaaagcagccgacgacgaccaccgcgcggcgagggatcggcgcgtaagctcggcggcggggcgatccgtacgcgaaagggagcgccgtaacccttcccctaccctctgcctcccctcacacgctggcggcggaggcgacgaacactgcgcgatgagaggcgcgtgcgcagccagctgctactgccacgggagccacaacgcgcggcactggaggacgacaaggtaccactggcggagcgcttgccgacacgcgcagatggggctcctcagggtaggagcgggtcgccggagacggagtggcgcaaggggcagagcccaaggtggtcggactgtggctgcgagtcgtgccgcacatggcagcgccatgacaacggccggctgcacttcgtcgtcaaccaaccgcagccgccaaacggtctcaactctcaagtctcaaccgcttccgttatttctgttacaataattcgtctgcctccacctccctcggtcgtcgattccaaccggggtcgccgtcgtcggttcgctccgcccgccgacgatccgacaaacacgtcgccggcgaacggtgtcttggaggagagtccatggagcgcgtgcggggcaagagaagggcgcgaggagtcttccgcctgccgtgtgctacggcccctcctctccgccgtgtcccgctgcaccgaccctcctcctcgccaaccgccggcgcggccgccgcgccagtagtccttccttgccggtcgtgctccttaagaggactagaggagagggtgatcctccggccaccggggcactgtcttcgccccagacatccgaccccggcgcggttgctctgtcttcatcctctcccacgttgcagccgctccactccgcctgctcggcctgattccgctccctctccgccgtcgcccttcctgccgtggaagccttcattggtggagtcccgcgattggacgcagcgcttcttccagggccttggtgtcggcgcacccctcccggctcccgtggagctccatggcacctactctgccctcgtccgcggcgtcctctcctcctccaccgtctccgcctctgcctccccgtgcatctcctgcacgctcagacgctctccatctccctcgccgccgtcgtgagtcccatctcctcttgctcctcttccttgctcatggtggcgtggtggccgtccgagtcggcatgtgaaccgagtcaacgctccacgtcggacgccacgtcagcaatactgctcacaatactgccttaggacctactttgaactgggtctgtaagttcggggacccgtcgtacccggttttgtgtcggagggatgaaaatcagacagcgtgacaaatagagggacccagagtgaacttatccgaagaaaaaagaccaatcttaagcatacaattgtactcccttcgtcccataatagatgacgtttttgactttttatttgcaacgtttgaccattcgttttatttgaaaaattagtgcaaatataaaaaaagataagtcatatgt

SEQ ID NO: 12327 - DNA, 1667 bp, Oryza sativa
  ref <308>: DATABASE ACCESSION NUMBER: AK109675
  ref <309>: DATABASE ENTRY DATE: 2002-08-28
atgcatgcacgcgctttttgtttatggctaccatttccaacgttgtcacgaacacttattgtgcttctcccactccactgctccgccggcgagccaccgccatggcgcttcgtgtacagctcgtcctcgccgtcgccgtggttgtgccggcgttgggggtggcggcgggtggtgctaccttgggggtgaactatggccaggtcgccgataacttgccgccgccgcaggcggcggccatgctcctccgctcgctgaacgccaccaaggtgaagctctacgacgccgacgcgcgcgttctcagcgcgttcgctggctccggcgccaacttcaccgtcggcctcccggaccgcctcgtcccgcgcctcgccgccgacccgtccgccgccgcggcgtgggtgcgcgccaacatcctgccccacatcccggcgacgtccatcaccgccgtcaccgtcggcaacgaggtgctcaccggcaacgacagcgccatgctccggtcgctcctcccggcgatgcagtcgctccacgccgcgctcgccgcttgcaacctcacctcgcgggtggtcgtcaccacggcgcactccctcgccgtgctctcctcctcgttcccgccgtcctccgccgcgttccggcgcgagctcctcccgtacatggcgcccctcctcgcgttcctcgccaagaccggctcgccgttcctcatcaacgcctacccgtacttcgcctacaagggcgacccggagcacgtggacctcaactacgtgctgttcgaggccaatgccggcgtcggcgacccggcgacggggctgcgctacgacaacatgctgcacgcgcaggtggacgcggtgcgcgccgcgatctgcagggcaaactacggcaaggcagtggagatccgggtgtcggagaccgggtggccgtcgcggggcgacgacgacgaggccggggcgacgccggagaacgcggcgaggtacaacggcaacctgatgcggctggtggcgcaggggaaggggacgccggcggcgcccggcgaggcgctgcaggtgtacgtgttcgcgctgttcaacgaggacatgaagcccggcccagcgtcggagcggcattacggcctgttcaagcccgacggcacgccggcgtacgacgtcggcgtgaaggctccgacgattggcggcagctggaaggggagagccaatggcactagcggcggcggcgccggcgggctggtcgtggcggaagggcccggaggggcagacggtgcagggcagggcactggattctacaccgtgtcagcagcagcacacaaggtaattgattgattgattaattaattaattataattacattttgcaaccgcataattacttcattgtttggttacttttttttttgttattagtgtggttcttgattgaatgaattgtgattgagtttggtacaaggaaagtatagtttaagtatgcagtgttgtgtcggttcagacgttcagttgatgctgcgctagctagttgctttgcagtgcttctgttgctaatcaattaaatcatcaatatagtctaattagtatgtgtaacaagtttggtatgcacgtacaaaaccaagttttaaaattgcaaagaggggaaaatgctgctgtgctagctcccagatcatactcctactttgctattccataccc

SEQ ID NO: 12328 - DNA, 2038 bp, Oryza sativa
  ref <308>: DATABASE ACCESSION NUMBER: AK109676
  ref <309>: DATABASE ENTRY DATE: 2002-08-28
aactcaccaggcgcaccgcaccatttctaaatcacatagtgctaaacccgccccctcttaattatatctccacttagcaaggtgtgtggttgcgagcttaaaacgcacccacgcagggccatggcgaccgatggcggcgtgttgcagctgcacccctacgccatggccgcggctgccgtggcattggcttcggcgtacatggtgtggttctgggcgctgtcgcggcggctgtccgggccacggatgtggccgctcgtcggcagcctacccagcgtcgtgctgaaccgggcgcgggtgcacgactggatcgccgacaacctgcgcgccacgggtgacgccgcgacgtaccagacgtgcatcctgcctctgccattcctggcgcggcggcaggggctggtgacggtgacgtgcaacccgcggaaccttgagcacatcctgcgcgcgcgcttcgacaactaccccaagggccccatgtggcaggcatcgttccacgacctcctcggccagggcatcttcaactccgacggcgagacgtggctgatccagcgaaagacggcagccctcgagttcaccacccggacgttgcgccaggccatggcacgctgggccaaccgctccatcaagtaccgcctgtggcgtatcctcgacgaccactgcaacgcggccgcaagcgtggacctccaggacctcctcctgcgcctcaccttcgataacatctgcggcctcaccttcggcaaggacccagagacgctgtcccccggcttgccggagaaccccttcgccaacgcttttgacgaggccaccgaggcgacgatgcagaggttcctgttcccgagcttgttgtggcgcatcaagaaggcgttcggtgtcggcagcgagcggagcctccgcgacagcctcgccgtggtggaccgtcacatgacggagaccatcgcggcacgcaaggcgacgccgtcggacgacctgctgtcccggttcatgaagaagcgcgacagcaagggcaaagcgttcccggaggacgtgctccagtggatcgcgctcaacttcgtgctcgccgggcgcgacacgtcgtccgtcgcgctcagctggttcttctggactctcatgcagaggcgggacgtggagcgcaaggtggtcctcgagatcgcctccgttctcagggagacgcgcggggacgacacggcgaggtggacggaggagcctctaaacttcgacgagctggagcgactggtgtacctcaaggcggcattgacggagacgctgcggctgtacccgtctgtgccgcaggattccaagtacgtcgtggcggacgacgtgctgcccgacggcacagtggtgccggccggctcggcgatcacctactccatctactcagtgggaagaatggagagcatatgggggaaggactgcgcagagttccggccggagcggtggctatcggccgacggcagccgcttcgagcctgtcaaggacgcgtaccgcttcgtggcgttcaacggcgggccgcgaacgtgcctcggcaaggacctggcctacctgcagatgaaatccatcgcgtccgccgtgctgctgcgcaactcggtggagctcgtgccggggcacaaggtggagcagaagatgtcgctgacgcttttcatgaagaatggactgcgagtgcacgtcaagccgagggacattgccagctacgtcgagccgtcggagccggcgccgccgcagggctccctcgtgataccgactaccaccgcagccgctgcgtagcccagcgtacgcgcccacatgaattgcgtctgattcctgctgcctggtgaggttgtcctgcttgtgccaaaatgattgtctttttccttttcacaattctcctgcactagagatcgaatttccttgcgtacaattaggattgttcgtgcctggggtcatattggttgtatggataccgacgtgtgtgatagtgtgatcagggtgagggtggtgtacttttgttgggatctattatattattaaaacaactttgtggggactagaaattcccacattaatc

SEQ ID NO: 12329 - DNA, 1594 bp, Oryza sativa
  ref <308>: DATABASE ACCESSION NUMBER: AK109677
  ref <309>: DATABASE ENTRY DATE: 2002-08-28
gcaacaaatatatgcagcatttgtctcttgtgccttacatgatatatgcatgttttttagtttatgcgccatgcatgatgcatttctgcagcttcaccagattgaagtgttgctaccattgaaaaaccctttttttttcttccatgtgcttcgcttgacatttttttttcttcttcttcctggaaaggaaaaggttagatggctcaaacggcttcatgtactgggtcgccttctgccgcgccgccacctgtgggtatcttgtccgcggaggcggcggcggcggcggacgacgcggcggccaccttgccgtcgccgtccaccttcttctgcgtggtatactcgccgtagaggtaggaggagaagccccagacgcagagcacggtggccacggccttgtcggcgccgaacgggtcgcggaagacgaccacgccgccgatgacgttggcggtgagcacggcggtcatgcacacgccgctgtgcagcgacgacgtgaggtacaccatcccggcggtgcccattaagcaggcctgccacgtcgccaccagcgcggcgagcaccgcccggtacgccgccggggagaggtcccaccgcgcgagctcctccttccacccgcccgccgcggcgagccccgccaccgccagcgcggtcgccgccgcctgcatgatcacctgcacctccaccgccatgcggaacccgccggacacggccttgcggtacaccagctccatcaccggcaggtacgcggcgaagagccccgcggcgccgagcgtcacggcgaagccgacgaagtacctcgcgcggctcccgcccccgggctgctcgcccgagtcggacgaccggagcgcgatcagcacggaactgagcgtgaggagcacgacggcattgaggttggagaagttgagcgggtggcgcacgatgatggcggcgagcaccagcgtgaaggcgagctgcgtggacagcagcagcgacgaggtggacaccggcaggtacgacgagctgtacgagaagagcaggttgttcacgcccatgagcacgccgatgaccacgcacgccgcgagcagccgccgcgtgaaccacgcgaacggccgcggctgcgacggcgaccggccggcgtagaccggcacgagcaggaacgggaacccgaccgactgcaccagcgtggccacccaccggttgtgcccgccgtgcgcgaagtagtaccgtgacaggaggctggacgccaccgagccgccgagcagtgcggcgtagttggcgaacagcagcagccgccgcctccgcctcgccgcgcgcgcgccattggcggcgacgctcgacggcggcatgtcgagcagttgctccggcgcggaggaggtggtggtgatggacattggcgtggcgagacgagtcgatcgagcactcgcgtttggattggatgggttgggacttggggtgaggagggaagaggggggggcgttggtggggtatttaagataagtgggggatttgagagagattaactaacaaagagattacaaatctttttttaagccggataggttggctatgttgttaattagttcaggatttgttattcttataaacacattcacattcg

SEQ ID NO: 12330 - DNA, 1347 bp, Oryza sativa
  ref <308>: DATABASE ACCESSION NUMBER: AK109678
  ref <309>: DATABASE ENTRY DATE: 2002-08-28
gtgtgcacgcacagtgcaccgcgtgtccgcgccatgaagcagcggcatgccaccgccaccgcctcggcgctcttcgcgctgctcccgctgtcgctgctgctcttccggctgctcgtcctcctcgtgcggctccgcctcgccgccttccgcgacgccgcgctgtccctccacttcctcgcccgcctccgcatccgccccgtccacctccgcctcccgggcaccgacgccaccacggtccgcgtctggtgccccgcggcgccgtccgccaagccgccgctgctcctcctccacggcttcggcggtgactccaagtggacgtgggcgcgcaacctcccggcgctgtcgcgccacttccacgtctacgcgcccgacctcctcttcttcggcgcgcactcccgatccgcctcgccgctccgcaccgtcgcgttccaggcccggtgcgccgccgaggccatgcggctcctcggcgtcgaccgctacgacgtggtcgggatcagctacggcgggttcgtggcgtaccggctggccgccgtggagggcagggaccgggtgccgagggtggtggtgatgaccagcggcgtggcggcgacgccgggggagatgagggagatggcggcgcgggaggagagggccgtcgaggagtcgctgctcccggagaccgccgacgggctgcgccgcctcgtccgccggtccatgcaccgcccgccgccatggatgcccgacttcgtgctcgacgatttcatcaagttgatgtgcgtggttcagaggaaggagagggccgagctgctacacgagcttctcaagaacggagctggcatcgatcccctccccgttctcactcagaaaacgttgattctgtggggtgacaaggaccaggtgttcccgttggatctcggccacagactgcaaaggcatctgggagacgtgtcacggctagagatcatcaaggacgcagggcacgcgttgcagttggagggagccgaccaagtgaaccgcttcatcaagtctttcctcctggactcgtgaaatgggccggaagttgggagtggcccagtactagagccctgctaagaagtactagaagcaggagctctcggaaaggcccaaaccaatccaactgtaacccggatttgccctctatcctcagatgccgatagtgtaatgaccctatttgggatgtaaaaaatatataccgtgaactattgattaattgtcaaatatgaaatctcccaataaaaaaatgtgatgctcacggactctgttttttcctcttgactatggaactgcaggcagatggcagtaccactaaagtggctaatttattgttgtgatcattctgagatcgtc

SEQ ID NO: 12331 - DNA, 1950 bp, Oryza sativa
  ref <308>: DATABASE ACCESSION NUMBER: AK109679
  ref <309>: DATABASE ENTRY DATE: 2002-08-28
tgcagcaaatggtgggacgaactcacattcacatcggagtatcggacgaccgctctacctctacccatcgcgaaggaggagatcaagctcagtctcgagtatggccacgacttccgatatcgccggtcgctccttccgctgcagctgcacgcagcgcgccgccgtccgcgccaccatttccaacgcctcgagctgcctcgccgttggctccgccggccgcctgtccagcaacctccccagctcgccgtcttcaatgattggaagcgaaaaggctaccaagttggtgacctcgccctcctccttccgatcgatgaaaattggcctcttgcccgtgagcatctccagcatcacgacgccgaagctgttcacgtcgctgctccgcgtctgattcattgtgctgtagaactccgggtcgatgtatccggccgtgccgtgcacgacggtgctcggacgctccatgccgttgatcaccgccgcgccgaagtccgtcaaatgcggcacccagctcgagtcgacgaggatgttggacagcttgatgtccccgtggatgatcggcgtcgtggtggcgccgtggtgcaggtactggatgccccgcgacacgccgagcagcatcttgatgcgcatcttccacgacgccatcaccggcgacgacgacgacgacgacgacaggtggccatgcagctgatcggcgagtgagccattctccatgtaatcgtagacgagaaggagctctccagcctgcctctccgccgccgccttctttttcttccggaaggatagcagcagcgtgctctccctcttcttctcccttaccacgcagaagccaaggaggcggacgatgtggtcatggcggagacgggagagaatggcgagccccctcatgagagattcctcccggccatggtccggcgatgtctttaccaaggatttgattgccacctcccgcccgtcgcgaagccttcccttgtacacgctgccggagctgcctctgccgatctcgttggcaaagttgttggtcgccgccacgagctccttcacggtgaactcctctcctccatctccttgagaaatccgtgcaaactcctacacagatgatgctcgttctcacttaggaattactagtaatcaattaatctcaacgcaatcgatgtaaaaaaaaaaaaaacagcttgtagtaccagcgcatctggtgactgcagggagcctgcagatgaaggagaagatgctgcggtcgtatcatttgaaacaagaatgttgtagatttgatccgactgtgagctgcctgcagatgaagaagatgatgctgcggccgtatcgtttggagcaagaattctgtagatctgatcgaggcgacgggtgatgtcgatgtgggcgatgaaagggaagacaatgaggtaggagtcgatcttgctctgcacgtccctgaacctgtcagccaggcgccccgccatgacgaaccgatatgccgcgctccggccttggcaggaggccacgagctcgtgagcctcccggagcgtgtcgccgagctccgccagcggccgccggacctccggccgccgcatcacctccgggtcctgcaggtggggcagcaggtcggcgatcatgacgacgcggcgggcgagctggtcgcactccctcttgttctgccgagccgtcgctgccgcttggatgatgctggagatgagcccgccgacgtccgcgccgaccagctgcgccaccgtcgccgcctgccccaacccaccccacacagccatggattacgttagaggtcgaaactcgataaatcaaaggggagatggagaggtttaatcatctctctgtcaagtcttttggcttaaatcttctttatgatcgagtggtttgcttatttgaccaaccatattattatatgatggaatcatggattgatggaagtaccttcggcgaaataaagcatgtctttttaagttg

SEQ ID NO: 12332 - DNA, 1441 bp, Oryza sativa
  ref <308>: DATABASE ACCESSION NUMBER: AK109680
  ref <309>: DATABASE ENTRY DATE: 2002-08-28
acacctaattgctatcgattagaattctagaccatgattagctctggttttctttgcttttggggttaggacccgcatgcttgtgtattgagaaaattctgtaggataagcgtggaatagtccatcctataaattacaaaatgcaaacccatgtctcaaagagctgtaggataagcgtgaaatagtccatcctataaactacaaaatgcaaaacccatgtctcgaagagccctgctccggccggcatcgcgggcaagcgagccccacgttgaggcgtggttgggcttgagcgagcttcccgtgcgcgcggctcgcgcacaggcctggatccctgtgttctggctcagctcagcacccacgcgcgtgcgcgcgacggatggcgtttggcaccggcatcgccgcaccgcgcgttaaaaaacgacccgctcctccgctctcgctcgctcagccccaactcggccactcctttttttttttttggaaacctgccactccttggagttcctagaagatggcactgtttggaggcaccaaaaggcatcgtcaagctgtcaggcctgcttatatatgcactgctagtacggagtactataaactagtactcgtaataccgaacgtttggataaagtacagctcatcttcacaaagatgttggagttcggatcgaatgcccgagctgcacaatgcgctgcatagatcggagaccgaccgatgactagatgagcacctgttgtgccaacggataacatggttatgtgtctgttgtatgtgctccccgcccaatcacacctgctgctgacgtggaagggaatcgtactcatttggagtcaaaaccgttgtttacctccaccgatcgaagaatctgaggtggagtggcagcctggcttgctcaatcgaccaatgggactgtatacacgcttgaatgcttgatcctttgagagtcaatgattgttcccggtcgcttggattggatcattccaatttaaacaagttatgttccctggttcttgggcgagctcgagaggtgtctccaccgaagtagaaatcgcgtttactttcctacgcgatcagctcacggctcatcagtgatcgcaatacatgcatgatgcacacgtcccattgggctgagatcgcattttaattaggccccctttaaactgtgaccgatagtataggtcgcatggcaaaccgtttgaaagggcatgtacctattaaaggctaagttcctattaaaaaaagctacatatatccaaatggatatagaggccgggtaaaaaaatattcttctaaaaaaaagattcaaaacaaattttccaagagattaaaactcttgcttactttcctataaaatatctatagaattatccattccataggatttttaaaggaaatgatatgattcaatcatttgttttaaagggttttgtagaatttttcctat

SEQ ID NO: 12333 - DNA, 1785 bp, Oryza sativa
  ref <308>: DATABASE ACCESSION NUMBER: AK109681
  ref <309>: DATABASE ENTRY DATE: 2002-08-28
aattggtgctcactgatcagatatggaggagttcgacggcgccatagctcgccggcgagccatggcgcgccgcggcagcggcggcggcaacggtgacggcgacggcatcacggtgcacgtggagcagatggcgcgcgggctgatgcagaggcaggaggcggcggcgtcggacgagcagcaccggatcatggcgagcagccaccgggtgtcccgcgtcccggcgcacctccgcgacgccaacgccgacgcctacacgccgcggttcgtcgccgtcggcccgctccaccgcggcgacgcgcggcggctcggcgccggcgagcgcctcaagatggcgtacctccacagcctcatctcccgcggccactccgaccaggcgcggcagctcgccgtcatcgaggagtacatccgcgccgtcgcggcgagggagagggaggcgcgcgcgttctacagcgaggacgtcgacatgtacgccgaggagttcatcatgatgctggtgctcgacggctgcttcatcatcgagcacctcgtcaacgtcgccatcgggagggatgagccgtcgctgcacgccacgccgttcgcccccgtgcagctctccgtcgacctcatcctcgccgagaaccagatcccgttcttcgtcctcgtcgacctggtcaggatcaccgacctgccggagttcgcgagcaccggccacccgccgccggtgctgatcgtgaagctggttctctactacctcgccggcgagaagggccgcgacatggtgggcgacgcgctgccgcccgcggagggcgtgtcccacatcctccacctgctccacgcgatgatcgtcgcggcgcggaccaagtgggagccgccgccgcgcatccaggacggcgcggtgctcgggacggcgcaggacggagcgcggctgctgcggcggctcccgctgctgctgctggtgccgctgctgtaccccatcctgccggaggagagcaagtggcgggcgagctacgggcgggaggacgtgccgtcggcgagcgacctgaagcggatgtgggtgcggttcaagaagccgcgcggcggcggcgcggcggcggtgacaggcatcgcgtcggtgatggggccggtgccgctggcggtgaagctggcgcacgaggacaagctgcggctgccgcagctgcgggtggagctccggacggcgccgctgctgctgaacctgatggcgttcgagcagtcggcggcgaaggcggaggcgcgcgacgtgtcggcgtacgtgtcgttcatggcgaagatggtgcagtcggcggaggacgccggggcgctggcggcggcggaggtggtggcggtggtgcacgggaacggcggcggcgagggcaaggaggaggtggtgaggctgttccggcaggtcggggcggcgagcggcgaggtggagctggagcggagctacctgggagggatggtggtggagctccgggagaggagccggcacccgctgttcatgatgtgggcggacgtgaagcgcaactacttcacggtgccatgggcggtggtcgccgagttcgtcgccttcgtcaccttcgtctccaccattgtccagatgtactcctccttcaagcagaaaggaggatgatctcgtccagaccgaccgccatggaattaatccatcgatactcccaccgtcccataaaaaaccgaatctaggaccagatatgatatattctagtacgataaatctagatatatgtatgtactgatttgtagtactaggatgtatcacatctagttttttatgggacggatagagtacgc

SEQ ID NO: 12334 - DNA, 1649 bp, Oryza sativa
  ref <308>: DATABASE ACCESSION NUMBER: AK109682
  ref <309>: DATABASE ENTRY DATE: 2002-08-28
ttttttctccacggccccaccaccaccctcagtagtaaccgtgcggcgcgttcctccctctaccacgccacctccttcctctgcacgcgagaaaatctgcaggagttcgccgcacggcaacagctcgggatcccatcgccgccactaacctccgatccctcgcgcgcggcgaggaggccgacgaggcggcggcggcggcggcgacccgccggtccggcaacggagggggctcctcgcgccgcgatccccgatcgagccgagtttatcctggtggttggcgtcgtcttttggtagatctctctggtgatattgcctgctgaggagagtggtgggtagctttggtgatagctggccagtacatcaatgtgggcgtttcttggagcagctactcgactccatggatgccgtgaagacagaggggaggaaggccgcaggtaccgtcgactgcgccttgcggcagccgctggtgccaccggagaagaacattgctgctccggcaggtcggaggagggaggtggcctccaggttcaagtccggcggcacgccggcgccacaggctgctgcttcctcggtgaggcgatgcacgtctccaagtctgagcagggcttcagcagctgaaggcacagcatcgacaaacagagcacagtcagctgagaggaggaggtcttccacgccttcttccagctcgacgccgtccggtggtggtggcggcgctgcgtcgaggcccaggacgccggtgcgtgttgcggcagccaccgaggtacatggcatctctcgtcgtgcagccagtacaaagccccctgatggcttgtgggcatcagctcgtagcgtgcctccattgcttcagaaggagtccatggcaatggcaacctctgccaagaagagacacaagcttgctgatggctcatcttctgaccagaccaaggtgcaggcaagaaacgtgaccgagactgagaggaaaagaagtcctcttagagggaggaacattggcaaccaatgtgagaatgctcggccatcagagactccaaacaagagggtcgttgagcaacaccgatggccggcggcaatgatgggtggccgtggctctgccgtcttaacttcgagaagcaatggtgttgccaacacgcctatcaggtcagtcactccatcaaaccctacaagggggctttcaccaaggaggatttgtccagctgaagtcaaagccaatggtctgaatcagccattgaacggattggcaaagagattggctacacatgagagcagaagagaggataagacagaatctggtagtgatgtttcttcacagacatcagaaaactctaaagctgctactcgcccgagcaggactctgtcttcacctgttctacatcgctcgtcgtcaccaaacaaggtcttgtcagctgcatcccctgcttctacagcctttcaaagtcctttgaggacaaggccttcggcaccttgccgatcacgatgttgttcaacaagtcaatcaggcgttgcacctcttgtgtttaactatatagttgatgcgaggaaagggaagaagagtgcaagccagtttgagaatattcaccaattacgtctgctgtataatagatgcctgcagtggcagtttgtaaatgctcgttcagaagatacactaaccttcc

SEQ ID NO: 12335 - DNA, 1872 bp, Oryza sativa
  ref <308>: DATABASE ACCESSION NUMBER: AK109683
  ref <309>: DATABASE ENTRY DATE: 2002-08-28
gcgcgccatccactcgctcgccgcggcgccggcggcgccggcgccggcgacggagacggcgacgcgaccactccggcgaaggaccagcgccgcccgcgcctcgcgggagtcctcgcggcagccgcaagcgcttccggacctcccctctcgccgggcggcgctactagcgctcgtcctggccggctcgacgccccgcccgcccaccgccgccgccgccttctccctcggcatccctgggccgaaggagttgctgcgggagcagaagaagaagtcggcgcgcttcctactcgcgcccatcgccgcctcccgcgaaatcctcctcaaggcccagagccttctcgcttcggcgaatgtgggtgctgacgacgtcgaggaggtggggcggatgctcgccgcggcggggcgagactgtgtgccgcggcagaggaactcactcgtctcgctgcagtcgcggagcggcgttgaggtctgcacattcagcttgatactgaagaatgccgcgtcgctgctcacggataaggaccctctcaaggttgaagctgatgctaggcttgccgagctaatacagtcattctctgacctgggaactgtggtggataacagtaacattgagctcactgctgatagggagaagatgaaggatggcttgctgagcaccgtctctgccatcgataaatttgaacagagtgttaaagactgtttaggtatctagaattttctagaagcacctttgaggattaaattattccagagtaacctaaatctacccacgaggtaaggttaagctcctctgttcatcagagcatgttgttctccgactagcatatttgatttgacatatcctctttacagtaaaaatggtcattccatagcatggaaaatgaaatatcagaagtaattagggaggtttgtttatagaaggttatctttttctttctttagttcaatcattcccttcaatatcttctgtctgttgtgcacttgtgctccactaattaccggccagcatagcatcactaaaatcgttatccatttacttcttaaacttttagtttcttaggattatcttgttcttgatactcattaaactaacggaaataaaatttaatgggatatttacttcctctttttttagtccaacataagcttgattatactaattgattcttactaaataaactgcgactatttggaagctattatgcagtaatggataatagggaaaaaccttggtaatacaatttttaccttgaactgaatgggaactatacaaatacaagtcacatactaacatcaggtttgaaattttgaatggtaatgaattctgcaagcaatcagggaaagatggggggggaagccataatcattttcaaatgactattcaatggacctaaatgtcctctttagcggtcagccttccaccaaatacaatctgcttcatggtgtgccatcctctgggtttgtctccactgatcttggcaatctcagtttatcaaacaggttctgtgggtgacatagcagcccagcgtgcgtgcttgtagatctccaatttgtgaccgagttacctgagagaactcaatagaaggcagcaggagatcaggcctgtcatggtagaaatggtacattgtcatgtgctgtactcctacgaatgaattcactttttccagctgactaagtttgttacataagttttgtgcttgagaagacattagaatcttttctccatctctgttcaattcatgttttttttaattattgccgctatgtcatgcatgcagatgaaatgctagaatattcatctgcaatagcagttttggcaattcctgataaatttatttgaatgctcaagggtgaatcccagaatattttcgc

SEQ ID NO: 12336 - DNA, 1521 bp, Oryza sativa
  ref <308>: DATABASE ACCESSION NUMBER: AK109684
  ref <309>: DATABASE ENTRY DATE: 2002-08-28
cgaactgcgcctcccaaagtgttcgatcgattgcctcaaccacccgctcactgcgcaggcgacctgttcgatcaattgcctagaccagtcaaccaccgctcaccatggtactggggaaatccattcgccgctctaacggccacgcctcgtcgtcgtcgtccatactggacggcgatgacaccagcagcgctagcggtggcggcatgagcatctactaccagaagattaatcagagagtcgccgttctcgagaaggtcgccgtctccgtgcacgagagccgggcgtccacgcgggaggcggcgctggcgtcgctcgtcggcgcgctcgagggcttcgtccccgcccacttcatcgggtggcacctacgcggtgagatcgttcgcggctgctgcgcctccatcaagaagggagccgccgccaaggaggcccgcctcgcgctccgcgccgtcgcgctgctcgccgtcacgctcggcccgggctccaagaggaggatcttgccggcggagacgtacaacccgctcgaacccggccctggctcgaagaagatcatggcggagacgttcccgctcgtctcccggatcctcgaggtgtcaaccgacgcgcccctggtgatcgccgcgctcgagtccctcgccgtcgtcgcgttcgtcgacgtcgccgcggagaacatggacgacacggaggcgtgcatgaaggcgctgtgggggctgatccgcccaagcacggggcccaaggtcgccggcgtggcgaggaagacgagccctcatgtcctggccgccgccgtgtcggcgtggacgctcgtgctgaccaccaccgacggctggaagaagaagaaggcggcggcgtcctctcccgccgcgtggcgcgacacggcggcgcacctcgcctcgctcctccactccgacagccgcgccgtccgaatggccgccggcgaggctctcgccgtcaccatcgagatgaagctcctgacccgggacagcaacggcgccctcatctccggcgtggcggccagagcgtccgagctcgccaacgaagccgccggagcgggcgtcggcaaggccaacttcgtcgagcagaaggagctcttcaatagcatcacgacgttcctcgccggcggcaaggcaccggcgagctcggtgcgcgcgtcgtcgtcccaccacgggcggctgacggcgtcgacatggacggacattgtccggctcaacttcctccggcgattcctcggcggcgggttcctgccgcacctccaggggaaggtgctgatgggggaggaggcgccgctgatagggcaggtgttcgtcgtcaaggaggacgacatggccatggatcacaagaagaaggtggagaagcagaggacgctcaacagggagcgctccattgtctctgacctcaagcatggatcttctcatgtatgaaaactaggaaaggaattttgggcaaagctgagtcagtgcatgtaaagttatgtacaaaacgatttatgtttgagaataaattgggccaattatagaattatgtaag

SEQ ID NO: 12337 - DNA, 1315 bp, Oryza sativa
  ref <308>: DATABASE ACCESSION NUMBER: AK109685
  ref <309>: DATABASE ENTRY DATE: 2002-08-28
gatgcggcggcgccaccgcgagcagctgcctcccggggccgaccgcgaacgcctcctcgccgaggaggtcctctacctccactccctctggcgccgcgccgcccccgctcccatccctcctcgtggctccggttccgtcgccaccctccgccgcgtcgaccgccggaggcgcaggaggctcgagcgccgcgcccaggagcagcagcgggaggaatccggcccggagtggcccctcgcgccgtctccgcccgcctccccgacaacctggcacgacaacaaggccgcctcctcccccgcgcagcgcccgccgcagcagaagcagccttcgcctggatcgctctcgcagcgagccgcgctccgcgccgccgaggagttcttctccaaccgcgggtcggacgacgacgacgaggtggtggaggaggaagggtctgaatcggagggcgaggaggcggcggggttcttcatggggctgttcgagcgggacgcggcgctgcgggggcactacgagcgggggtgggagggaggggagttcgtgtgcatggcgtgcgtggggaggaaggggaaggccaggaggttcgccggctgcgtcggcctcgtccagcacgcccgcgccgccacccgctgcgggaggccccgggcgcaccgcgccttcgccgccgccatctgccgcgtgctcggctgggacatcgacaggatgcccagcgtcgtcatcgacccccgcggcacgctcggccaggcactcgccgccgccgaggccgctgccgccgtcgctgcccaagagaacaatgttgatgctgttgagaagacgatctcttctgaagatcaggttgcagagaaggaagatgttgagactggaaaaaatgacggatctttgagtgatgtggatgcgatgaaggaaaattccaatgtggggaagaacagctcttcaattaatgacaataatggagatgttcatgagaaagggaatggtggagcttatgaaaaggacataatctgctgcatacacgtgaactgaagaaaaaggcttctgtactatccaagcaggcatgctcatcacagtctgtccatgtgatgagaaggaactgattagcgactatctgatcggacaagccgaagagtctttgatcttgtagtacattggaaggaggcaatatcatagtcactagtcagctatagacaatgttagtttttaaggggaaaatgatgtatatcctatcaatatgcttattaacaatcatgcatgggatgttagtccagtttactccccttgaaacatttcattggatcacttggttaatagtatttctttttcttt

SEQ ID NO: 12338 - DNA, 1401 bp, Oryza sativa
  ref <308>: DATABASE ACCESSION NUMBER: AK109686
  ref <309>: DATABASE ENTRY DATE: 2002-08-28
gttgccacgctgcacagagcgcgacgccgcgcgagttgtcgcggcgacatgaggaaaggcgccgccggaatggcgtgcacttgctcggcggcggcggcggcctccgctcttgtgaagcttcttgttcttgtggcggcggtggcggcgacgacgtccgccggtggcggcgacgagccgacgtacgagaccaagtccatagacccgagcctcgccgtgatgacgctgccggcgcccgtgacgggcccggagagcctcgccttcgacggccgcggcgacgggccctacaccggcggctccgacggccgcatcctccgctggcgcggcggccgcctcggctggaccgagttcgcctacaactccaggcacaagagcgtcggcgtttgctcgccggagaagaagctggtggtgccggagagcgtgtgcgggcggccgctggggctgcagttccaccacgcctccggcgacctatacgtcgccgacgcgtacctgggcctcctgagggtgccggcgcgcggcgggctggccgaggtggtggcgacggaggccgccggtgtgccgttcaacttcctcaacggcctcgacgtcgaccagaggaccggcgacgtctacttcaccgatagcagcaccacgtaccggaggagccagtacctgctggtggtggccatgggtgacgagacggggcggctgctccggtacgacgcgcggcggcggcgcgtcaccgtgctccactccggcctcccctacccgaacggcgtcgccgtcagcgacgatggcacccacgtggtggtggcccacacgggcctctgcgagctccgccgctactggctgcgcgggccgcgcgccggcaagtcggagacgttcgccgaggtgcccggctacccggacaacgtgcgccgcgacggcgacggcgggtactgggtggcgctcagccgcggggccgacaatgacgacgtagcgccgaccgtggccgtgcgggtgacggcggcggggaagaagaagggtggaggcgcggcggtggtggcagaggcgctcgccgggttcagcttcgtgacggtgagcgaggtggcggagcagaatggcacgctctggatcggctccgtcgacacgccgtacgccggcgccgcggtgaggggtcgccggtgaccatgttccgtcgggcggttggtggtgccggtgtgcgttgcacggtgcagctaccctgattaaatttcgttacatttagtacatacgatgtgtggtctaatcttatcttaactaattaaaatattcatattttttcctttcgtcacaacaagaatttcgtccgtaaagtcttcagtttgtgccctacgtccccgcacgcgcatcgcgtaatacttttgcagatttttttggcaatataatcacaacaatttcctaatc

SEQ ID NO: 12339 - DNA, 1956 bp, Oryza sativa
  ref <308>: DATABASE ACCESSION NUMBER: AK109687
  ref <309>: DATABASE ENTRY DATE: 2002-08-28
catcgctgtaccgctctacttcaaggccatcatcgatgccttggtcgcgaataacccgaaggctgccgtggcgtccgccggagctgacccggtggtgcagacagctgcgattcaattctgcacggacacggcagccctcactttcggcaccggggccttcgcattggtgttcgcctatggcttgacgcgagcgctcgggtccttcatgtctgaggcccgcaccgcgatcttcgcccgagtgagctccgacgcgtacacgaacgtgagcgaactcatcttcttaaagatgcacgcgctggagctggacttccaccttgccaagaaaacaggcggtgtgaccaagatcctcgaccgtggtgcgaagggcgtgacgacgatggcgtggtgcctgatgttcgtcgtgttccccacagggttcgagatgggcctcgtctgcatgctgctccagcaggaagtcggcatcgagttcgtcggcgtcgcggtgagcgccatcgtcacgtatgtcgtttggacaacgaaggttaccaactggcgtaccaagttccgtgacgcctacaacgacgcggagaccaagtccggatccatggtggtcgactcgttgctcaattacgaaaccgtgaagtacttcggcaacgagcgcttcgaagccgcgcgccttcgctcagccaacgaaaagatgaaccactacgtcgtgaagctcgagcagagcatgtccgtgctcaattttgggcagcagatgatcttcatcaccgccgcgacgacgagcctctacttcgccagcacgggcgtgcttgcggggacgatgacggtgggcgacctggtgctgatcgactccctcctcctgcagctctacacgccactgagctggctcggcatgatctaccgtgagattacaacgtccactcagaacatgcaggcaatgctcggactcctaaaccgccccatcaaggtcgtagacaaacccgaggtgacagagttcaagtacgtcgacggtaccatcgaattccgcgacgcatgcttctcgtacggcgacaagaaagtgctgaaccacgtcaacttgatcattcccggtggcagcacggtggcgttcgtgggccctagcggcacgggcaagacgaccattttccgcttgctgttccgttttttcaaccttaactctgggaccattctggtggatgggcaagagatcgacaaggtctccatgtcttcgctgcgtaagcatttcggcgtgattccgcaggacaccgtcatgttcaacgacaccgtgcgtttcaacatcgagtacggatccctcggtgcgacgcaggagcagatcgaggacgttgcgcgaaaggccgcggtgcacgacagcatcacccggctcaccgacggctacgaaacggttgttggcgaacgcggcctcaagctttccggcggcgagaagcagcgcgtggccatcgctcgtgtcttcctgcagaaccctgacatcgtcctcgccgacgaagccacctccgcgctcgacacccagacggaggcacacgtgattgacacgctgcgacagaagggtgggtcgcggcgcaccatcgtcatgatcgcgcaccgactggcgaccgtcaagaactgcgacaccatctttgtcctgaataaccaggggcagattgccgagcgcggttcgcattacgacttgatcagcaagggagggctgtacgcgtctctgtggaatcagcagcttctcgcgcggcaccacaacgtcggcacggttgccgaaccgtctctcgcgacgggatccatccctgtcaaggaaggaggcgcccccaccacgacttccgggtaaagacgaagggggttcactcgttcgcctcgtggacgccttccggatgaagacattggcgcttccatgcggggcgacgctggtcgtgaaaagagcgcgtgcgtgttgccgacagccctcgtatatcaacaggtatatccacagct

SEQ ID NO: 12340 - DNA, 2015 bp, Oryza sativa
  ref <308>: DATABASE ACCESSION NUMBER: AK109688
  ref <309>: DATABASE ENTRY DATE: 2002-08-28
acatcgacaagtgggaccgtgggacccacctgtcaggtccatccccaacctccatccaagccagccggcaactgccgaagccgccatggacggccgttgccgcccacgtcgccgccgattccgggtcctcccgctcacgccctcgcgcccaaaccgcataaaatcgattcccctccacctcctctactgctctacactctccctacgtttcccccaaaaatcgtgccgggatagagctccacttcgcccacgatttcacccacgtcgccggccgttgccgcccaaatccgccacgcccggcaacggttttccctccccaagcatgtaaaatccatccccgggctcccttctctcgtttcccccccttgccggcgcttccctcgccttctcccgctctccccacgccgctccccatcgctgccgcttgccagcgaccttcagtcggccgctgccgccgcgctagtcgtcgccgcacctcgccgccggcaccggcggcttcactgcatcaagccccaccctggccgctgctctgctcctccaaaccaccacccaaacgccccctccccgtgcatccgagccgccaccacctctgccacgctccagccgcccgccacagccgctgtaaccaccaccgccacctgcagcttcgccgcaccgcgtagcaccccgtcctccactccttttacccctcgtcgccaccgaaacgccgccccactacaaaaccgagccaccgtcgcctccctcggctccgcaaggacgaggagaacctgggccatcccttcccatcgccagaaactcactggacgtccgttttcccgtgcgccgccgctgctcgtccactccgtcccgagcgccgcccgtcgccggagtgccgccgtctccctccgccctgagcttcgccggccgcctccctccatcgccataccccacgcgagtagattccgtcgtttcggaagtccacagtcttaaggataagagttcggaagattgttcgaagaagcaaggttttgcatatactttcacttcgcgccggggatgacgaattaactttcacatcacaccatctttcatgtttggattcaaaccagatgcacatccaagtagtctccgattgtccatgttagctcacacagaaggtcagagcttactgttcttgcgcagttgccagaagaagatcacaataggggatcttgtcattagacacagcaggagtaaagagatgtcagctgagcttttgcgagcacgtattctggggttagattttactgtatgttggagagctatggtacgcaagccggccgccggccggcggcggttcggtaggcatgctgaaattgacgcccgtgatcggtgagtacccacgaaatcgcggaattgctctgcgtgtacgtgagcacctcgcaatatccatggtccccgctgcccgtggactcagctggtgcatgtgtgcatctcacgccatcccgtgtgattcagtcgatcggccagcgtgggtcaagggcgcgagccaacatggacaacagatgacagtttggatgacgccttgtgcatcggctttgagtccaaacatggaaggtggtgtgatgtgaaagtaaatttgtcatccccggtgcaaagtgaaagtatatgccaaaaccggtgcttgtcttttattccggcatgtttgtggctatgtgaggaaatggatgttgataagttgggttgttagctttaggttgatttggttcttagccaggtatttttgcaggtgtcgtttatcaatcgttaatttttgggagccttttcaacctagcctccaaagacttctaacccgctatctagttgaagcaaacctctggactgagagctttcaacgctctgatcgaattgttgtttcaacttgatcagaaatcttttcccgcctttttcattcacatcctatgtaaaggctctaatgctgtcgggccaaacctttatactccctataatatgacttattttcaatggaaaattcaggtggaaaagttctcctctcc

SEQ ID NO: 12341 - DNA, 1483 bp, Oryza sativa
  ref <308>: DATABASE ACCESSION NUMBER: AK109689
  ref <309>: DATABASE ENTRY DATE: 2002-08-28
tggtacgaaaaggaagggaaaatatgtttgtggattcgaaagaaaagttgctttgcttcgagtatctacgtaatggaagccttcgcagtcatcttgatactgccggatcttgtgtgcttcaatggcagatttgttaccaaataatcaaaggtatttgcctgggtttgcactatctgcatgagaggaagataattcatctagatctcaaaccagataacgtactgctcgatgacagtatggtgcctaaaattgcggattttggtttgtcaaggctcttgagtgaagaaaaaagccgcatggtcactgagagaatttttggaacaaggagatacatggcacccgaatacttagttaatggagatatcacagtcaagtcagatatatacagcttgggtttgataatcagagagatggtgatgggtcctaataatgaaggaacaacgacagaaaatgtactagaaatctggaggcataggttggaacaggattcatcaaagatgaggcagacgccaatcgaaatgcgttaccggcaaataatagaagcgtgcattgagatatcagagacatgcatagcgggtaaaccagataagaggccaaccacaggggatatccttcgtcggcttgagaaagaggaagcagggaattggtctatcgtcccagttactccagttgtagattggataagctcgctatccaggttgatggagagcataaagcgaatggctgtaacttcacccgaaccgcgaacaattcgaggtgaggagtccaaagcgttgcaattgcaacctgggccttctcagccaggggacaggagaccagctgataagagtttttggttggatgctacaagcaacgccaagtgctacatgctatcatcgagattattaaaggttacatggggagaaagccccgagcactggaaatggatcaccctccccgattctaggtttgccgaatgcgcggagctcctaaacgtgtactggctggcggtgattggggagatcgcaacggaggacctgacgccgggtactcgctacgcggtgtacctggtgtacaagctgacgggcacctccgtcggcctgagaggtggccagacgcagaggtcatcgctcaggctctacggcgagatcaccgtctccaccggcaaggtcagcgtcgacgtcgtccctgcagcggcgcgcggaatggccgccggcgtggcctatcctgtggccaggggagacggctggatggagctcaagctggccgagtttgctgccgacgagaagctgctcggtgagaagaaggtgatagtggacttccgcgaggagaacgaccatgtcaagaagagtggtcttgttatagagggcatggagttcaggcccaacaagtgaagctcgcaaaaggctcaacattttgttccacaagaacaatttctagtatcctaactattctcagcacataaaatgacaagttttatctctttaatatactttatctatct

SEQ ID NO: 12342 - DNA, 1696 bp, Oryza sativa
  ref <308>: DATABASE ACCESSION NUMBER: AK109690
  ref <309>: DATABASE ENTRY DATE: 2002-08-28
agccgccgctccagccagccacaccgcacataacacacacactctctctcgccatggacaccgccgatgagcgggagacgccgataagttggagaatctctttcccattagacgccaaaagacgagcaagagacgatgcgcttacaggaacgcctcaaagacctacggcttcaggaggaaatttggcgtatcctttccaagatttgcgcctatgaggggacggagacgatctcgagtccgatacccatcttagtttactcgacatcagacccacagctttgggaggccgctgtccgctaccaggagcaagtcggtgggagagtaagatttccccttctgtatctcaaggtggacaacgagtccgggaaggttgtggacgtgggaaagtactgggacgatcggcacggcgtgggagaacctagaggtcgtttcaagtcattcaaatggtttgcggacaagcataaaatgtttacggctgaagctgaaacagcatcctccaccaaatcgactgcacaacttcagcagcactcgtattcagaggaggaagatttgaccatgtacaaatcccatcaacaattacaggtctcagaggagaaagatacaaccatagaagaaaactcagagaaaaagtggcatgcacgtctcatagatgaatacattcgtggaatattggaaggaatgataactcagatacggagattgaggacgatgagaatgttctctctaagagtcctgtggaagttgacccatgtgctattggtcaatttcaacatttcaaggagatgaattctctccgtgaagaatgtgtcactccaaaccctaagaatgttgacagctcatcaaaaatatcatcgcaacaaggacatgccaaattggcagcaggttcttctagctcacactataaggcagtgggatatcatgagtatgccgatctaatcaatcgaataaacaagggtgtacaactctattctaatagcatgcaagaactttctcagaaaggaacaggtggacttagtgaagcgttcgtggcattcagaaactattttgtagaaaaggatgtttttgaggaaattgattacaaattcggagaaatattgcatcactgctctcgtactgtgggaattaggaagatttatcatcactataatttcacagttgagatgaaaaatgataaggactgttggatccctagggtttattttgcggaagtcaagatgaagtatggtttcaagtatcgtttctgtgctcctctcgaggcgactgatgatggtcaatgttattcgtgcaagaaccaaggtattgataaactcaagcacccatctagaggagggtactcaaaaggttatgatggtgctgtatgcaaccaccttggtgaggatagttctgatgaagaggacgaacttatgtaaccacctgctaactagccagagcctttaggcattagagccagaagcgaaactgatcgagtggcagagaagccaaacagagagttgatacttaagctgtatttatataaatttgtgccttctgtcggcaagttgtgccaactttagctatttatataaaattagtttgtacaaagtacttacgcacacaccttagctttgcagcttcgctaattaagtgctaccatgtacttgagccatatgtgctgtattgggtattttgcaaatttacatttatcatatatttgcat

SEQ ID NO: 12343 - DNA, 1523 bp, Oryza sativa
  ref <308>: DATABASE ACCESSION NUMBER: AK109691
  ref <309>: DATABASE ENTRY DATE: 2002-08-28
gaagaacacagagaggcagcatgccaccatcccctcccatggcgacgacggagcggcggcggcggtgcggccaacgtcagcgcagggacaagcacaagaggggctcgtcgatgaaggtggccggggccggggacggagcagcggcggtgatgacgaccgtcgaggacgtccccgaccacctcctcgaggtcatcctcctgcggctggactcctccgtctccctcctccgcgcggcggccgcgtgcacgcggtggcgccgcgtcgtcgcggacgccggcttcctccgctccttccgctcgctccatggggcgcgccacgtcgccgggcggtaccacaccgtcgaccctagcttcgggtggccaccgtcggcaggtggcagctctgtcgtctttgtgccgtcgtcgccgccggtgatcggcgtggcaagccgcttcttctcccttgacttcctcccggactacgacgacggcaactcatggtcatgggagcttgtggacagtcgaggcggcctcctcctcttctccaagaagagaaaatccaccggtaggtgggctgcaatggcggacgcccgcggcttcagcttccctgacctcgtcgtctgcgagccgctgacacggcgataccaggggattgcctctgcggtatacttcagaagacacccatgcctcggagtcttcctgctcgacggcgacgcggccgacgccgacgacacaggaggcggcggcatcggcatgtccaatttcagagttgtcgccgctctccacgaccgcacatggcagcacgacggtgccgtgccattggcgtgcgtgttcacctccggaagcgacggcgggtggcgcgtactgcagagcgccgccgccgccgccgtcgacctgccggaacgattcgatttcatcaacttcgcaggccgtgccggcggctgtctctactggggaatcgacggcgaagacggcgccatgctcgtcctcgacgtggccaccatgcgattctcgatcgacatgttcccggagaccatccgggcgtcgtacgacaaatggaccttccgggtcatcgacggcggctacgctctccgcgtcgtccgcgtgatgcgcaacgacctcaaggtgttcgcgcagctcgccggcagcggcgagtgggtggtggagaggctagtgagcctgccggaggccacacgcgagctgccggggcgcagggagacgtacttccggcaagaagccaagatcgtcgcggcgaacgcggcgtacgtcctcctgacgccgcaggagaagaagaggtggctcttctccgtggagctcgagacggggaaggtggagcgccgccatgagaggaacaggtacgccggagcggcttactcgtacgagctgccttggccgccggcgttgcaggcttgtgcggattacggtggtgggagacggcgacgccgttgagctgtgtaaaattatactccctttctactcgtaaaggaaatcttttaggacaatatttaagtcaaacattggaaatataaatcatgaataactctt

SEQ ID NO: 12344 - DNA, 1670 bp, Oryza sativa
  ref <308>: DATABASE ACCESSION NUMBER: AK109692
  ref <309>: DATABASE ENTRY DATE: 2002-08-28
gcttcactctccacctccaccgtgccatcgttgccttcccgctgttctcgccgtcgccgtccgtcgccgagcaccgggggagccggtgcgtgcgtgggcgcgtgacgcgggactccgggcgccgtcttcttcccttgcccgacccgaggtcgccgtgatcgcgtctcgtgccaccggccgtcccccgccgcctctccccgtcgcggttgcacttgcactcaagctgccactgccatctttctcttcttgctttctttgccgttggctgcttccgatgaccggcttgccgtcggcaagacgctctcccctggcgccaccctcgtctccgatggcggcgccttcgccatgggcttcttctcgccgtccaactcatctggactgtaccttggcatatggtacaacaatgtccccaagctcaccgtggtgtgggtcgccgaccagctcgcccccatcaccgaccacccttcttcttccaagctcgccatggccgacgacagcagcaacctggtcttgtccgacgcggccggccgtgttctttggaggactaatgtcaccgccggcggcgtgaactcgtcgggtgccgtggcggtgctcgtgaactccggcaacctcgtgctacggttgcccgacgacaccgccctgtggcagacgttcgagcaccccagcgacgtgttcatggccggcatgaagctcggcatcgactaccggtcgcactccggcatgcggatcgtctcctggaagggcgccggcgacccgtcgccggggagcttctcgttcggcgtcgacccggagaggccgctgcaggcgaagatctggaatgggtcgcgcgtgcactggcgcagctcgatgtggacgggttacatggtggacagcaactaccagaagggcggctcgtcggcgatctacaccgccgtcgtctacaccgacgacgagatctacgcctccttcaccctctccgccggagcgccgccgatgcactacctcatgtcctactccggcgacctccacctgcagagctggagcaacgtgtcgtcggcgtgggtcaccaacgccaggttccctcgccgcgactgcagcctcttcggctactgcggcgcgttcggctactgcggcaacagcaccggcggcggcggcggcgccggcggcggcgtctcgacgtgccactgcctcgaagggttcgagccggcgagcggcgccgactggagccgcggcgacttctcgctggggtgtcgccggaaggaggcggcgcgctgcggcgacgggttcgcggagttcccggacatgaagctgcccgacgggtacgcgctcgtcgggaacatgaacgccggcgagtgcgcggcggcgtgccgccgcaactgctcctgcgtggcgtacgcctacgccgacctgagcaggagcacgaggagagatccgaccaggtgtttgatgtggggcggcgagctgctcgacatggagaaggtgaacgagagctggggtgacttaggcgagacgctgtacctccgaatggcaggtgcaggtagggggtcaaaaagaagtgcagtgaaatttgcacttccaatagtgttggcaagtattcttatacccacatgcatcctcatatgtgttcccaagttcaaaggtacatatatatgttcatataagtaataaataatctgtgtgtatatggtgat

SEQ ID NO: 12345 - DNA, 1868 bp, Oryza sativa
  ref <308>: DATABASE ACCESSION NUMBER: AK109693
  ref <309>: DATABASE ENTRY DATE: 2002-08-28
atctctcttgccattcgctttagcctaacatacggtgccgagatgtccgccgccacggccataatctcgtttcatccccgttgttgtggaaccctagcctcccatcctcctccccgcggctggtcccctcgactacggccttatctgaaggaattggcaaggtggcgacagggctccaatgacagacaatcggtagctctaagcctttaagcaagggaggcagatctagtggttggagtagagaaagaagggaggagcaagacgccggcgcttaatcaagaacacggtgatcgccgtggtcacgactatctgtggcattttaggagttgttggctgttactgtttttggaggaacaaggcgaggaggaagcagcacactgaaatggagaaaagcagtgatgccgatgatcttccgttcagggtaaggaaaagccctgcgttgagcccagcaagggatcaatggtttgatgagaacaggggtgctgaagatgatcttgaccttccgttgtttgatcttgagatgattttcaacgcaacagacagattcgcagcgcataataagattggggaaggtggattcggccctgtttacatgacaaataaaattatgagcagggaagacttgaggatgggcaagaagtagccgtgaagaggttgtccaaaagatcagtacagggggttgttgaatttaagaacgaggtcaaactaattgccaagcttcagcacagaaaccttgtcaggctactaggttgctgcattgatgatgacgagaggatactgttatacgagcacatgcacaacaagagcctagacacgttcatatttggtcagttcatttctacataaacattacataattatttttctcaattaaatgtatacacatagtgttttgttgtactaaacatatttctgcagacgaaggaaatcgtaaactgctaagttggaacaaacggtttgagatcattctagggattgcacggggcctattatatctccatgaagattcaaggtttaggatcatccacagggatctgaaggcaagcaacgtgttattagacagaaacatggtaccaaaagtctcagacttcggcatcgcgagaatgtttgaaggtgatcaaaccactgcatacactagaaaggtcatcggaacgtatggctatatgtctccagagtatgcaatggacggtgtgttttccatgaaatccgacgtcttcagctttggcgtcctagtactggagattgtcgccggcaggaggaatcgaggcttttgtgaatccgaaattaatctcaacctcctcagatatgcatggatgttgtggaaagaaggtaagagtgtggacttactggatgagttaattggagacatctttgatgacaacgaagtgttgagatgtgtacacgtcgctctgttgtgcgttgaagtggaacccaagaacagaccattgatgtcttcagttgttatgatgctagccagtgagaatgccacgttgccacagccaaatgagcctggagtgaacattgggaagatcacattagacacagaatcatctcatggacttaccagcaatggtgtgacgacaactacaatagaggctaggtagtctgaaacagtaaattctccttgctctaacagtaagtctgtagttctgtatagcgagtcaaaacctcatgcaaagctctgctgaaactagttcacttataacgagtcttgaaaacttgtaagttgtaagaccacattagacaaggtcatgattgttgcaatgcactagttgtaggttagagacattgtctggcgtgtgatggagccgacaaaactggttaaatgatttgtgtaaaaggctaacagtatttaagcatcatttctt

SEQ ID NO: 12346 - DNA, 1605 bp, Oryza sativa
  ref <308>: DATABASE ACCESSION NUMBER: AK109694
  ref <309>: DATABASE ENTRY DATE: 2002-08-28
tctcctcgccttgccgcgcccgcgcattcccgcaaacacctcgccggcggagcgcccccgagatgaagggttccgacctcccgcccggcggctccggccagaagccaccgggcggcccgccggggaacaggaagggcaagcgcggcgctgaggcgcctccggctacctcgtcgtcgacgccgacaaccgcgaggcggagtaagcgcctcgctggtgcgcctccggatcaccccgcggaagcagggccatcgtcgacgaacgcgaggcggagcagtcgcctcgctggtgcgcctcctgctacccccggggctgcggcggcagcgccgacctcgtcgtcgccgacagccgcaaggcggagcaatcgcctcgctggtgcgcctccggatccccccgcggctgtggcagcaccgccgacctcgtcgtcgccgacaaccgcgatgcggagcaatcgcctcgctggtgcgccttcggatccccccgcggctgcgacagcagggccgacctcgccatcgccgacaactgcgaggcggagcaatcgcctcgctggtgcgcctccggatcccccggcggctgcgacagcagggccgacctcgaaaaccgcgagacggagcaagcgcctcgctggtgaggctccggagacccccgtggaagcagggcagacctcgccgtcgtcgacaaccgcgaggcagagcaagcgcagcgctggtaagtctccggctatccccaagggatcggggcaaccctcgtcggccgagaagagcaagcgcaccgctgatgcgtcttcggctgaccccgcggaagcaaggccgtcgtcgctgtcgcccacaaccgcgccggtcaggactacggccgtgtcggtgtcggtgaggaaggcggccgaggggcagcggcggaccaccacctcggggcgcgggaccaccacctcggggcgcggggacgctgcggagcaggaggcgatgcgggaggcggtcctgtacgtgcgccgagagctctccgtcgtcgcgccggatgacctcacctcgccgcacaactagccgagggtggccgcggccatggcgctgagttgggcgcggagcgcgggcgcaggggggctgtggaacacccgggggcgcgcgcgcgcccacgtgcagccgatgcgggaagtgatcctgggtgcgcgccgagagcgcaccgtcctcgccgccgatgaccccgcctcgccgtacaacgagccgagggtggccgcggctaccacgctgagttgggtgcggagcgcgggtgcaggggcgctgtggtacaccccggagcgcgaagacgatgcgggaagcggtcctgcaggcgccggcccatgaccccgcctcgccgtacctggaggtccaggaagtagaagtatcaaaagaatttggatggtgggtcattttttgtagcagaggaagtagaaaattcagagaagagtttgatgtctaattcgacgtggttcttttcttttcagtactcagtagtagtcggctattgcagattacatatctgactagatacagtcacggttctccagtgatcctggatgtaggtttcaccaccacccgaggaaaaaatacaagccgagatgaattagtctactgaagt

SEQ ID NO: 12347 - DNA, 1943 bp, Oryza sativa
  ref <308>: DATABASE ACCESSION NUMBER: AK109695
  ref <309>: DATABASE ENTRY DATE: 2002-08-28
aaacattataaaaaaagtgtgaaaattatttttttataaagcttattagataataatacagagtgtggtaaaatgtcgacatcccatctcctagagtcattctcatcgaatcaaatcagccaggagtcgaggcttgatacatcgaggatcgattcgtcagatgaagccattcgtaatctcgtctcggcctcgtcagcccaaaactacgatccggctcagctagttgcgaattacccgatcgatccgcaactcttgcaacatgagaacccaaacaattgcactgaaaacgacctagcgccgcaattgcctctagataaatatcgactcaacgttgaccagaacccacacattattagacgtaagccacaagagaagatcacttatctccagcaagttgccgtgagatatttgaagccaccaccaccaccaagagctggtgatatcgtcattaatcaattgccgcataaacaagtggcgcccgctccagctttgattgtgcgacaagcaccaccgaagccagtgacgccaccaccggttgtgatccgcgaggctccaccacagccaccacgcccaattccgggcaaatcggtgactataccaggtagaactgtccctccaccagcccgtaaagtggttgtcgagcgtctcccgcccctcccaccaaagccgcaacaggtcttcatcgagcgttggttgccattcccacaacaaacccagcgagtcgtctacaaggctgctgaggccatctgcagcatcccagacccgaaaaacgttgttattcagtgggagtcgccagaagtcgaactccgaaaggagttcaagaaccttggtgtcatcaatgccgatcctcaagagtacattaaacgatacggaggatcactattgagtgctgatcagctacctgagatcgctcaccagtacagtaagcaagccggcgtgcagctagctgctggtcaccaagctgcagatcacccgctcttggaaggcgatgttcacgccttgaagtgggtcgatttggacagccttggtttgggattctataaggataaactcgctgctagcggtaacggtcatgctgcctctggttcggtctccgccgctatctctggctccgcttcggccgctctttcgggcgctgctcattactcgcaacactcagctgctctatctggtgttcatcactcaggtgttcatcgatcaagtattcaacatcaatcagctgctctatctggtgttcactcggccgctctatctggcgttcatcactcaggcgttcatcactcaggtgttcatcactcaggtgttcatcactcaggtgttcatcaatccgctgctctatctggtgttcattactcaacacatactgctcgctctggctctatctcagcttcggttgctcctgatcaagtcttccaaggaggcgaattcgactgtaatgagcagcaggctgctccagtccagcaagactatggtgagttcgactgcaatgaggtacaaaatacccctgctccagtccagcagcagcaagactatggtgagttcgactgcaatgaggtacaaaacacccctgctccagtccagcaacagcaagactatggtgagttcgattgcaatgaggtacaaaacacccctgctccagtccagcaacagcaggattatggtgagttcgactgcaatgagcagcaggccgctcctgtccaacaagaatcaggagagttcaactgcaatgagcaacagctcgatcaaaacgagctattgaactattcgcgccaacatggttcttattagtttaatttctttatttagtttaacttccttttctcttcgcctgccaggaatatttttaaattttttattaagaaaaatatttttagattcgaatttctagttttcttaataacattttttggaaggaaattttaaaaataaatttttaaaaactt

SEQ ID NO: 12348 - DNA, 1692 bp, Oryza sativa
  ref <308>: DATABASE ACCESSION NUMBER: AK109696
  ref <309>: DATABASE ENTRY DATE: 2002-08-28
gtgttcgcgcgcgacttccgtgacccacctccgccgcctctcgactcctccactctatatctcgagccctagaaaaaccctagctccagccactatctccactagcctacgtccaaggtcgtcttcgtcgtcgtctccgtctcgagcggccgggcgcgatcgatggcgtcgagctgcaccatggtgccggcggatttggtggaggagaaggcggcggcggcggcggtggaggaggatgcggggagttacctgcgcgccgaccaggtggatctcatgagcctggacttcgagatcgaggagaggatggccgacaggttccgcaagctcaacagcggcggcgtggagcgcggcgacgaggggcccaaggccgcgtgggagatcgacctctccaagctggagatcggccacgtcgtcgagcacggcgaccacggcacgctcttccgcgggaagtactacagccaggacgtcgcagtgaaactgttggattggggcgcagagggcgattcatctgaagaccaaatagctcattttagaacatcacttaaggaggtggttgctgtttggcatgagttcaaccatccgaatatcacaaagttcatcggcgcatcgatgggtacaacaaaccttaatattccaaaagatattccagaccacagttccaggaagggtgcacgcactgatctgcctgacagagcatgctgtgttgtggtagaatatctcactgggggcacattgaaacagcatctcataaagcattacaggaagaacaagaagcttctatatgaagaggtggttcggcttgcattggatttggccagaggattgagcttcctgcactcaaaaaagattgtgcatcgggatgtcaaaagtgagaacatgctacttgacccacagctgaaccttaagattgctgattttggtgttgctcgtctcgttgaggctcaggatcccaaggatttgacacgcacgactggaacacttggttacatggccccagaggtgcttgatggaaagccatacaacagaaagtgcgatgtttacagtttcggcatctgcctatgggagacatactgctgtgatatgccctatggaccctactcagacctcagctttgcagacttctcatcgtttgttgtccataagaatttgcgaccggagatcccggactgctgcccgagcgcaatggcgagcatcatgcggagatgctgggacgccaacccggaggtccggcccgagatggaggaggtggtgcgcctcctcgagtccctggacacgagcaatggcggcggcatgttgctggagaagaagaagaagaagcatcccggcggtggatgcttctgcttcttcgtaccccgcgccgcgtaggaaccatccattcacgtcaatgcttccatcttaatcagaatcatgtgctcctcttcctgtgtaaacttgattaggcagtttaggagtattattgttggatcctggcaccaacaaaaagcaagcgtcacgtcagtgtgtttagttgtctttgtttttttttcttcttccacgagatagatgagaattagattagctacggtttccttgctttgagatattagcattgaagcaaggattggtaatttggatccatgaatggtgttgggatattggcattaaagcaaggattggtgagttggatccatgaaaggtattggttgattgatt

SEQ ID NO: 12349 - DNA, 2370 bp, Oryza sativa
  ref <308>: DATABASE ACCESSION NUMBER: AK109697
  ref <309>: DATABASE ENTRY DATE: 2002-08-28
atcagagcggacgacttaaggccaccgtctctcacgcttccgctcatcgcccccggaaccctcccgggggcggccacctgttttagttttttttttttttttttttggtcattgtgattgccacgagagagatcgatctcggtctcctccggcagccgttcctcgtcgtcgtcatgagatgatcgatctcgatcttcttggatggcatgtcttcgtcgttgcgtcgtcttcgtcaaggcgcgccaccgagtagatcaatctcctcggcggagctcgtttttcgtcgagtcaaacagcagctacctccatgtcgcggatcgcgtcggcggcgcggctctccacgtcgttgcgccgttggctcccgggcccgcctcctccgtcgccgccggagaccgggggcatgtcgtcgccgaccggggcccgccctccgcctgcgcgccgccgccggtcatcctccgccagcccgcctcgacgacctcccctccggccgcctctccacacgcctccgccgccctgcccggatctggaaactggctccacgacgacgggcgcccacggactctaccggcttcccctccgacgctgccgctgccgatctcatccgagctccctccgctgtcctcggctccgccggaagtggccctacacatggtcgtggctccaccgccctggggacgcgctccgtccttcctcagcccgtcgccgaccccgtcggcaacctcctccacggctccatgctgtcctcgccctcccggatcctgctggacgctgcgacatggcgaccgacgacgtgcttgccgctccctgctcttctcttgtgtgaactcgcgttttacgagggaacaggagagatgagatagtggtggtggtctgtgcatcgttgacttgatcatgcccgtgcgcactgtggagattggacaatccaaggattggtgatggcctgatgctgatgggcgtgatgcttggactcgaccgtgaagtttgaggcactggactgctggcctactactgtgttgctgcttgtatctttttttttcccgttctgagaacgggtttgcatcgcctatcgcctcgtcgacatctgcgcgtctccgacatcggcatcgattacagcttcgacttcctcgtctcgttgagcgcgacttcggcttgatcacccgattaagtgcacggacatgacgacttctaccgccgatcgtcttcaactgcgcgtctacgccatcaagcttcgggttgccgctgcgtcgccccctcgggccgcagtgccactgcctgtggttcacatctccactggttgttgcagtgctgagaggcgccctcctcatcaaggctacatcatcggtggacttctcgccgctgcatcgacgtggagctgcagttgtgttgtcctctcggaccgcagtttcgctgctttcgtcgtcttcctcaccgttcgcgcatcaacaaccttgtcgtccatattggtcatcgtcagccgctcagggtcttcttcctctacttcgagcatcgccgccgcgtttcccagctgccactgtcgtcgctctaggctggtggtccagctacctctacatagctaccgacgtcgccgtccaggccattggtcccgctacatcgccttctacttcgtccaacatgattcatcgccagcgtcgccgtatcttcctcgactacacttcgctcttctccgacaaccgcgtgctgctccggcaattctccctctacgtcgttctcgcgccgcgaccgtcttggaggccttctctgctagtctcctccgacattggcatatgattcatggtggtcccctgtctcgcccgcgcggtattggcaacaccggcacgcgcgttcgtcccgagttgtcccggggtctggcaaaccctgtgtgacgtctcgtccttcacggttcgactacatcggctcttcggcatcaacttcctcaacgactgccgcgatcgcgtcaccgtcatcatctcctgcacatcctcgcgcaccttggtccacgaccactctacaacgccccatgcgcgtcctgtggctcggctacctcgacatcagcttcctgacatcggctacatcgaccacggctactctacgcacggcttcatcgaccacggctctttcggctccttcattttggctacgtcgacaatggcacaaagggctatcatccgtgttgagcactcttgccggtttcttctccagtccaagtgtccgcgttgctcacgcttgaaatgcggggggatgtttgagtcatattaggatatgattgatttgtgtggactcattccatatcataattcttcttatctcctccccatgtactcctatatataccgcccccctgaggctcaatacaatcaatccacgttacac

SEQ ID NO: 12350 - DNA, 1627 bp, Oryza sativa
  ref <308>: DATABASE ACCESSION NUMBER: AK109698
  ref <309>: DATABASE ENTRY DATE: 2002-08-28
ccagccatggccgcgccgcctcaccgcgcgcagcctcgcgcgcctcctgctccgcctcccgacgccgcacctcgccgtgctcgccttccgccacgcgctcttccacgccgccccgccgcttcccccctcgctccccgtcttcgccgccgtcctctcccgcctccccgccgccgaccccgccctcctcccccccgtcctctccgccctccgcgccgccaacctccccgccttctccgaccgccccttccttcccctgctccgctcgctcccgcccctcccttccctccgcctcttcctctccctcccctccttcaactcccacccctccgtccgctccttcaacgccctcctccactctctcgtccccgcccgccgcctccgtctcgccgccgcgctcttccgcgccgcgcccaccaagctctacatcacacccaacctcgtctcctgcaacatcctgctcaaggggcttgttggcatcggtgacctcgatgccgcactcaaggtactcgacgaaatgcctggcctgggaatcaccccggatgtcgtcacctacaccacggttctctctgcctactgtgggaagggggatattgaaggtgctcagaagctcttcgatgatataatcgctagtggacgtagaccagatgttacgatgtacaccgtgctcatcgacggttactgccagtgcgggaacctccaggatgcagccagaattatggatgagatggaggctgctagagtgcaaccaaatgaggtcacatattccgtggtgatagaagcatgctgcaaggaggaaaaacctattgaggcacgcgattttatgcgagagatgctgggggcagggtatgtgccagacacagcgctaggtgctaaggtggttgatgtgctatgccaggatggaaaatcagaggaggcgtatcaattgtggagatggatggagaagaagaacgtgccacctgataacatggtcacaagcacattgatctattggttgtgcaagaatggaatggtccgagaggcgaggaacctgtttgatgagcttgagaggggtttcaaaccaagcttgctgacgtacaactcacttatttcaggattatgtgaaaatgaagagctacaggaggctgggcgggtgtgggatgacatggttgaacgagggtatgaaccaaatgccatgacttatgaggccttgatcaagggattatgcaaaacagggaagccaaatgaaggggctacagtctttgaggaaatggtgtctagaggttgcaagccaagcagccttcttttccaagttttggttgatagtctttcggagccaagacatgaggataccattagaaaaattcttgaaactgcagctttatatggtcggtatttcctggatggtgattcttgggaaatttttgtcaggaaggtggtaaatgcaactgatacttcgaacaagcatctcgatttagtattagatatgtgatcatgtggtgctgagaaatgtaatcatcaaattcaatagcagtgtccttctacagagatatcaggatattgtggttctctgggcttgctattcctgggatgtgcagattggtatagggatacactggataaatcaaagaatgtgagctatattgacacc

SEQ ID NO: 12351 - DNA, 2188 bp, Oryza sativa
  ref <308>: DATABASE ACCESSION NUMBER: AK109699
  ref <309>: DATABASE ENTRY DATE: 2002-08-28
agcttactagctttccatcatcccaccactgcctctgctaagctactctgaccggccggcgccatgcggcggcgctcgtcgctcgtccacgccgtcctcctcgcggtcgcggcggtcgcgctgccgctcgccgccggccagccgtggccgagctgcggcaccggcggcacgtacgcggcgaacagcacctacgaaaccaacctcctggacctcatcagcgccctccaggggaacgcctcctcctcccccaccctctacgcctccggcgccgtcggctccggcggccgcgacgccgtctacggcgtcatgctctgccgcggcgacctgagcacctccgactgcaacgactgcggcaccagggccggccaggacgtggggcgagtctgcaaccgcaccagggacgccgccctcgtctacaaccagtgctacgtccgcgtctccgacgccgacttcctcgccgctgccaccaacaactccggcgaggtcgccctcatgagctccaccaacatcacccgcgccgccgacgtcagggcgtacgacgccgcggtggtcagcctcctgaacgccaccgtgcggtacgcggtggagaactcgacgaggatgttcgcgacggggcagcgggtggggagcgacccggggttcagcgacatctactccatggcgcagtgctcgccggcgctgtcgcggccgctgtgccggagctgcctcgacggcctcgtggggcagtggtgggacacgttcccggtgaacgtggagggcgcgaggatcgccggcacgcggtgtaacctgaggtcggagctgaaccagggcacgttctacactggccaaccgatggtggtgctgcgggccgacggactcgcgccggcgcaagggccggcgccggcggctacgacgggaggtaagaataattcagcaagcaaagttctggtaatcgtcgtgccgatagtggccgttgcaatcgtagctgcaacttccttttgtatatggaatgtgcgtaggaaaagaagatcaagaaaagcagaacatttctctgaacttgacgcatctgaggaccttgaaagtgtcaagtcgaccttgataactctagcgtcattgcaagtagcaacagataacttccacgaaagcaagaaactcggtgaagggggatttggtgcagtttataagggacttctttttggacaagaggtagccgtgaagaggctggcaaagggttcaaaccaagggctagaagagcttaagaacgagctagttctagtggccaaactgcatcacaagaatcttgttcgtcttgtggggttttgcctagaggagggagagaggttgcttgtctacaagtacataccgaataaaagccttgacatatttcttttcgactcggagcaaagcagacaacttgattgggcaacacgattcaagatcatcgaaggcattgctagaggactacaatatcttcaccaggactcacagaagaagatcatccaccgtgacatgaaggcgagcaacgtcttgctagatgcagacatgaacccaaagatcggcgacttcggcctcgctaggctctttgggcaggatcagactagagatgtcaccaatcgcatcgttggaacatttgggtacatgtctcctgaatacgtgatccgtgggcagtactctacaaagtcagacgtgtttagctttggcattctcgtcatagagatcgtgacgggacggagaaacagcggcccccatttcttagaacaaaacgaagatttaataagcatagtacggaggcactgggaagagggaaatattgtagagatgactgaccactccttgggaagaaactaccctgaagctgagctgctgaaatgtgtaagcatcggtctcctgtgcgtgcagcaaaaccctgtagatcggcctacaatggcagatgtcatggttttgcttaacagcgatgctaccagcactctgccggcttttgcaactcatagcccaacaatttccatcgaggggaactctggttactctcaaaccgttacacaattgtctcctagatagcagggggctaaaacatagttggtactagaaaataccccgcgagttgctgcgggatataatgtatctaaacaaaatgaagtgaaattctaagagaacaattgatccatcacatttagacatagtgcataccaataaaagaaagcgaaattct

SEQ ID NO: 12352 - DNA, 1859 bp, Oryza sativa
  ref <308>: DATABASE ACCESSION NUMBER: AK109700
  ref <309>: DATABASE ENTRY DATE: 2002-08-28
gatgcgattgaatttcggagtttgattttggagacttgagtcgaaattggaatcttgaggtggacgattttgatggcgatgagagggaacaacaagagattgaattgagatccttggcacaacttagactcgcatacaaagaacgaaattttcgcatataggattttgccgaattagtttttaacgtctcacgagaagcggagcgttacatgctcccaaagggaaccattgaagctatagataaacgtcgccatgcgttcctgtggtctggggaggattcttgtcatggctccaaatgtctggtagcatgggacctcgtctgcaaaagtaaaagccttggaggcctgggaattaaaaatctgcattcgcaaaacatctgcctgctcactaaaatgatctaccggcttttttcacaaaattccccatggacaaaatagatttggagtgagcatcaagactctgctctcggctcagccaatctgggacaacactggcacactctaatcactcttctgctgatccttcgagctcattccactatgaaaatcggcgatggctgtcgaacaaacttctggcttgatgtctggctgactgataaacctctctcgattgagttcccagccctcttctctcacaacacaactactcatctcacggttcgttcagcgctccacgctaggcttaatttgccccttgtcccaaggctatcaacagtggctcagcaacaactgcattagctacaagacctacttcaagacttcccattctcacaagaccaagacacaatacaaagttcaatcagctgccgcagtggcctgatatcaacctcagccctctattgcaaaaccatggaaagtcatcatctttggccaccctgggaattcatctggaagagctcggcccctccgagggttaaattttttggttggttaatgactatgaacagacttcctactgctgtcaacctgcacaagaagtcaactatcccctccctaacatgtcagctatgcaatacctgcccggaagacactgaccacatcttccttgcctaccccctggcttctgctttctggggcctgattcaggtgctacccatgttaacctccctgagcgagattcacactatccactggtctggagaccttccagaacgactaaatagcaccttcttcctcttgtgctgctggcgcttatggaaccaccgtaacgaagttgttttccagctccttgcaccttccatcaaccgtcttctccgctgctgcgccaacgacgccaagctttaggcaaaccgttttaagctggctgaccgggcggttctttcgtcttggcttgcatccttctcctctcctctccacctaatgtaatctctcttgtttgttttctctctctctttcttcttttctttcgctctgttatgcttcctcttttcttcttgtatggtttgtacagttttgatgtttctttaattttaattcaggtggggagttccctcccccccggcattaaaaaaaaagatgcttttgctaggaatttcgtacgttaagtttattgagtcggtttggaattccgcatgtacatgcgcgccccatcgtgtacacaagtgaacaagcgagggacatcggatttctgtgggctggctaggcctcctgcatgcttgctgcccccatggcccattcatttggttgcctgggatgatcatgccccaccggagctggatgatgggtctatagtctccaaatcgagtaagagcaagtgcttttgtggcttcacctctcatggtgaacaattccatgtaaatagttgaggtgaactttaaatactgatccctttgggttttcaaaatgaatttcttctactct

SEQ ID NO: 12353 - DNA, 719 bp, Oryza sativa
  ref <308>: DATABASE ACCESSION NUMBER: AK109701
  ref <309>: DATABASE ENTRY DATE: 2002-08-28
agagaaagagaagagactagtagtagaggagagagaaactaaaccctccccctcccctcgatctcttcatatggttgagactacggcgacggcgggcggcgggcgcgcgctcctcctccgcatccctctcgctcctaccttacccctcgccgccactccccctcctcctcctcctctccctggcggcgccacccgtttctctaatgccgtcttctcctcctccccccttccctccgtcctcgatgacgacggatgacggcgaccaccgtggccaagagtagcgaggaggtgcccccggcgagagggcttcctctgtatcttcacccgccgtttccacatggcccagagcgcaaaggagagggggccgggctagggtgcggaggcagggcggcgcacgacgataggtacattgtcttctctcctatactacgtctcatcttgtcagtcgtcacgttcttgttctcgatccgagtttttggttcgcaggattttgcatttttcttttcagttcggctcccgatgtggtgttcggtcggggtgcttcatcgatggaccgccacccgccgcttgccatctccccgtggaggctccgtccacgctcgctgctcgccgtttaggaatttggttgagatgagcggatccatgtttcttttcttccctagcggttgttcttgatgtgctagttttttcttgtataaatcctaaggaattacctaagg

SEQ ID NO: 12354 - DNA, 1388 bp, Oryza sativa
  ref <308>: DATABASE ACCESSION NUMBER: AK109702
  ref <309>: DATABASE ENTRY DATE: 2002-08-28
aggcaaaaaacaaaaaaaaattccgagacatacatagccagaggaggaaatcaatcgatagtgggcatggatgcggcggggatgatcatcggcggcggcgggcggcggaggctgacgagggtgaggacgctcgggcgcggggcgtcgggggccgtggtgtcgctgttcgcggcgggggacgacgagctgctcgccgtgaagtcggcggcggggccggcgggggcggcgcagctgcggcgggaggcgggcatcctcgcctcgctctgctcgccgcacgtgctcccctgcttcgggttcggcgccgtcgccggcggggagtacgggctgcttctcgagttcgcccccggtgggtcgctcgccgacgaggttgcgaggaatgggggccgcctcgaggaggacgatgtccgggcttacgcggcggatgtcgcgagcgggctcgcgtacctccatggggtgggcatggtgcatggggatgtgaaggggaggaacgtggtgatcggcgccaacgggcgcgccaagctcgcggacttcgggtgcgcgaggcgcgccgactcggctgggccgatcggcggcacgccggcgttcatggcgccggaggtggcgcgcggggaggagcaggggccggcggccgacgtctgggcgctgggctgcaccgtcatcgagatggccaccggccgcgccccctggagcggcgtggacgacgtggtcgccgccgtgcgcctgatcgggttcaccgacgccgtgccggagccccccgagtggctgtcgccggaggcgaacgacttcctggacaagtgcctcaggcgccgcgccggcgagcggtggacagccgcgcagctgctggagcatccgttcttggcgctcgccggatgccgcgccgtggccgccgaggagacgaagcccaagtgggtctctcccaagagcacgctggatgccgcattttgggagtcggacgccgacgacgaggacgacgacatgccggagagctgggccgagaggatcatggcgctggccgtcccctgctctgccgtgccggattgggaatcagacgatggctggatcgacgtcatgagcagccaatccgaacttcccatcgcggcggctgaaacgccggccgagcagacgcgcagcgaagtttctgaatcgccggtggcttcgccggctttggagacgacgagctacgcgagtgcttgggatgaaagatcggaagctgtaatggatgctgacgtggacgatgacgatgatgagctcgtgcacaatgtacgaactgttgatacctttgtggatgaacagctccgccaagatatttatttagattttactactagtgacccaattgtacttcatgttgatgtttctgatgaaagaaaagtaaaattattgcctcc

SEQ ID NO: 12355 - DNA, 1968 bp, Oryza sativa
  ref <308>: DATABASE ACCESSION NUMBER: AK109703
  ref <309>: DATABASE ENTRY DATE: 2002-08-28
atctcctatgtcttccaggctctctctctcgtttactctcccccactctctcctctctcccagtctctctttctctctccctcctcaaccggatgccgttctctctccacctctcgtcgtctctctgcccctgctcgcgcggatccgctgccggcgatgacgggatgggccgagccttcaagccatcgtttctgctcgcgtgatccgccgtcgacggcaacgggaggggcggatccggcgactcttcccctcccgcacggataccgtccactcttcggccccctctcacgtggatccaccgtcggcggcgacggtaggggcagatccggcgacctcttcccctcccgcacgtgtcccgtcttctctccgcccgcctctcgcgcggatccgtcgccagcgacgacgagagggttagatccggcgacctcttcccctcccgcaactgctggccttggagctgcatggatcgagggatgagagcaacgtctcctcttcttccccttcttcctcctcacctgaccatcaggaaatcaatcctgtggttttttgaactgttgtactggagattgatgtcaacgtgataatcactgactactacatgcctggcatgacagtatgatctactgaagagggtgaaggtaagttttgtttgcattgaatttattcttatcctgtgagcattcataaatcttgggtcctttgttgctgtaagtggagtaaaatttgctccttttgctcctcattttgggggtacaagtgtcatcttcattgaaggacataccagttgtgatcatttcttctgagaatgtgcctgcaatgatcaacaggtgagctgaaagttccatctgagttgtctccttgttttatcttatcttggaaattattgttgttggtccatgaggcgtgctcttacaaatctaccaaggcccctgcttttatgatgattggttttattttaagttcatgcgattggtatgcattgctgaggaagaaaacgaaaaatatgtttttcctaccgtttttggtgccttcatggatctgattttaacagcaattaacatggtacatactccatatgtgagacatagggttggggaacagaaggattgcagatctgatttcatctttgatttgtagtactgaatattttctgaaactctgtggtcacatatgaatgcaacagaaattgatcttgattaagtagtagttcatgttatatatactgattcaatgagtatggcataacatatttgaatctcataaatctaatgaaattgaaactgcatttagggttgagttcaatgataacctggggttggggaacataaggattgcagatctgatttcatctttgatttgtagtattgaatattttctgaaactctgtggtcacatatgatgatatgaatgcaacagaaactgatcttgattaagtagtatttcttgttatactgtttggaagagtatcacattaacatatttgaatctcataaatctaatgaaattgaaactgcatttagggttgacttcaatgataacctggagataatgattggaggtgatttgatgccctacaggaagagacttgcgatctgtattttcttgtgtgcttctattatttctatcccttctaataataatattgtatgtcttgctggcttgcgagagaaatatgtaaaatcatgttagtgggagtgctaaaaatagtggaaaaaaaggcgggacaatcagactgctggacggatagaaaaggaaaagaaaagcgaccgaactcctgaacggaaagaaaagggaaagaaaagctcctaccggactaatggactgcgatctttttattgcctgatagaaaggtggcttgatgtcttagaggaagagccttgtctgcttctatcatttatattgcttgtaatgtaatgtcatgtaatattaatagcatgactcaacataaaatcgggataaaattggagt

SEQ ID NO: 12356 - DNA, 1585 bp, Oryza sativa
  ref <308>: DATABASE ACCESSION NUMBER: AK109704
  ref <309>: DATABASE ENTRY DATE: 2002-08-28
taatgcctccatttacatatggtttataagtaccatttgcttcatttggctcctttcttgtaatttaggttatttacatggtgggggttcttaaggaacaataataaggattcaattgtacatgtaactttctgtcatgggctttgggttggtcgtcctaggcccattggataggattagggtttgttaggattagattaaggactcctccatctatataaggagggatcctatcctaggtcagttaggcattagatcaagatttatcttagtgcccatcggcctgccttctcagtgcaacagagagcgtcgcgctgtttaggttcaggaccgttccttgttatttcatctactataatccaatctatccctattcatcccgattcttctccacataatccttgcccatgacaacttggtattagagcttcggttccgtgcccatgggtaccgagatcgctgcggttcccaacatcagcgaaggccttgccaagatctcaaagaagatgatggacttggcggcgcaactccaggttttggcggctcaatcagccgagcaggccatgcctctcggagccgccgagcgatccgaccggcgggccatgacgttcctgcgcccacggcagcaggacttcaagcgccgtttgcggagcaggatgcgtcacatgcagcagccaaaggtggcatcaacagcaccacctctgcccaagccgcctccaaggggtcttcgacctagttgttgggcctgtcgatggcgttgtcacctccaaccgagatggcacggtttccggcaggagcagggatggcggcgcggtttttggaagcggcaggaacagcagagctgtttccatcgctactttcaacagcggcggtggagaaaacggcgacttctgttaccttggagtcacggtgtgaagcagggtcatcacgttcttttggggatggcactgaatacgatagagggagatagggattctgttttccctcagctacgccaattaaatgggccagactggtggactgggcttcgatcagcagctagcccatgttggcttagatatgcttatcacacgggtcagtcaagttgggcttttagatttggattgtggcgtgggcctaaatttccatacagggcttcaggatggggtcctcctgtctatgttcttgatgacaatataagagtagggttgtttgcaatagtattagttatatatatatttataataagccaagatgtaaaaggcttaagagtcttagtttaggttatgatgttttgttgagtctagcagggtccgctgcagctcgaggacgagctgctcaaaaagaggggagtaatgtcatgggctttgggttggtcgtcctaggcccattggataggattagggtttgttaggattagattaaggactcctccatctatataagaagggatcctatcctaggttagttaggcattagatcaagatttatcttattgcccatcggcctgccttctcagtgcgacagagagcgtcgcgccgtttaggttcaggaccgttccttgttatttcatctactataatccaatctatccctattcatcccg

SEQ ID NO: 12357 - DNA, 1441 bp, Oryza sativa
  ref <308>: DATABASE ACCESSION NUMBER: AK109705
  ref <309>: DATABASE ENTRY DATE: 2002-08-28
ccctctcagctgcgcttcgcgggaacgccatggaagacaaggggacgcagccaccggagccagccgcggccgcggcgatctcgtcggtgctcgccaacgacgacctcctccgcgagatcctgctccgcctcggcctccccaccaccctcgtccgcgccgccctcgtctccacccgctggctccgcctcgcctccgacccggccttcctccgccgcttccgcgcgcgccacccgccgcgcctcctcggcttctaccacacggccagggcgcgcttccaggacgaggtcccggcgttcgtgccgctgccccagccgccggagctcgccgccgcgctccgcggcgcccgcctccgcctggcgcccggctcctccggctccggccccgacgcgcccgtcatcctgagctgccgcaacggccgcgtcctcgccgcggagttccctcccgatgggccacgggtcagcatcatcagcccgatgcaccccgcccgccacccaccggctctcccgctggtctacgaactccctcgccagccggggcagattctgcatgcctcgtgtatgctcctcttcccagatgtcggcagcgacgatccgtcctacactttcgtggaatttctacgcaaagatcaggagatgttggccaaggcagtttctgtaagggctgaaatttcggatctgaacagtgtccgtgaatcggcaactatagagattcaggaaagctgggaaaggagcataaggcgtgatgtgcttgtcaatggcaatctctatctgttgggagggaaggggcatgttcttgggttgaatttggcatccatgaggctattcttgttcagattgccagatggtgtgcagcagctacaccggatgggaaacattgagctgctacgcgcaggcgattccggcttatatctcatccatctgaaggggtttcagattcatgtttggttccgcgcctccgattccgacatcggtggtggcaactgggagctggttgataacatctgcttgggcgaatcgtttggtcagtttgcagagcccaattgggaatcaggggatgctctggttgcgctccatagggtggaggacaatgctgaggtgttcttgcgggtagaccgtgtgatcttccacatacatatcatgaacaggacggtaaacaaagtgtttgagatgtcaccagaggcttatagatattttgacatatttccattcatgatgctctggcctcccaccttcccacaacttaggaatgatcatgatcaagatcagtgatcctcgaaggcgcatttgtctggtgccttgcaagtatggtcctgaatttgtcttgtagatctctcactgctagaatctgcttatgttatgtatctctgtcttttaagatgaggtcgaagattaatgtactatgcatcaagaatatatattacctgatgctatctttgtctgct

SEQ ID NO: 12358 - DNA, 1933 bp, Oryza sativa
  ref <308>: DATABASE ACCESSION NUMBER: AK109706
  ref <309>: DATABASE ENTRY DATE: 2002-08-28
gcttctccccgactcccgcgtgctcgccgcgccgcccaccgtcaccgcctggagcgtgcgaaagctcgccggtgcggtttctccgctcagcgtgaaggatgaggaagctcaggttccacgagcagaagctactcaagaagaccaacttcctcgacttcaagagggagaaaggccaccgcgacgccatcgtcacgcagcgctacctcctcgtcgagagagacgactacaagaagtactaactcatctctctctccagagtatcaactcgtaccttatcggttggttaaaggattatctgtgtgttctttcgcgttttactgttcatcctgtccatggacatggatttgctgcaaatttgtgattttgtttttgggtggtggcaggtacaatggcatatgcctgatggtgcaaaagctcgtcaacattataaagcaaatggacccgagagacccttacagagcggagatgacagacatgttgctcgataagctgtaagtagcctgttgcgtggtctgcatacaaatttagagctggacagttacgatctacaattccacatgacccatcaaacacgttaggcacacaaatttgctgtttgctgaattgtcatagagtcagaatcgagattgctcagggaaattcagttcctgtatataatgtttcagagaattttatagcatgtcaactaattcgtgtgtttgaggaggggctgtgtgcctgtgtctatttttgaattaccaaattgattggatttgcaatcgaggctataaagtatatacacatgactagtttctcagtagttcatctgcttcttgtccagggacataattgtttcgataatcctgccaaagatttttcgaataattctcgctcttatgtttggatacgaacctcggtagtcctcttcttttttactcccaacattttgagcttggactggactaaaagattgatagacttgtgctaagcagaacttataatctaatgttactttctgcaatggattgcctatgcttgggtacttcatatagaactgtgcactcttaattttgtatgcttttcttgtttccagttgtctagccatttccagattttgtactactcatgtgtagtttgatgaagttcatgaaatttcaggtacaacatgggtgtaattccaacaaaaaagagcctgttaacatgtgaaaaactttcagtgagctccttttgcaggtcctttctctctctctctctctctctccatgtatatgtgctgtgtagccatcttttaccatttagtggcaaatgtttactcatctcagttcaacaattgttaaattgcacgtttcattggtcagctgtatgttaaagtgttgttgtaccactgcttcaacataaatgagacttaccatggctaaccacttaacaaacactataacctcgattagcacacaagactaaagttgtaggagatcagacatatcgtacatcacttattgcgtgtattggcaaattattgcaggcggaggcttgcaacagtcatggtgaagctcaagttcgcggagcaccttaaagaggccgtgacatacatacagcagggtcatgtgcgtgtaggcccagagacagtcaccgatccagcctttcttgtaaccaggaacatggaggatttcatcacctgggttgactcctcaaagatcaagagaaaggtccaggagtataatggtgaattggacgattttgatgctatggcttgagaatatcgttgagcagaatttctgggtccatcggtgtagctactcgtgtatgatttttttttttggaactttttaaggtgaggtcgtgatttgctgcagagctacttgcatgtgcattgttgttgtcaatgttgtgtaatgcagctcaacgcctatgacagttcattcacttactaatacaattttgtagccgtttctct

SEQ ID NO: 12359 - DNA, 1610 bp, Oryza sativa
  ref <308>: DATABASE ACCESSION NUMBER: AK109707
  ref <309>: DATABASE ENTRY DATE: 2002-08-28
gactgctcctagcggctctctctctctctctctctctcccctcttttttaagcagccgcctttccccggcggccggcggccggcgacgccatgctccacctccggcagtgcctcctcccgctgctccgcgccgccgccgccgcccatccccacacctccgccgcatcctcctcctctctccacctcagccgccgcctcttctccaccgccgccgggcccgacaccgcgccccccttctccgtcgaggagtacctcgtcgccacctgcggcctcacgggcgcccaggcgctcaaagcgtccaagaagctctcccacctcaggtcgcccgccaagcccgacgccgtgctcgccgtcctctccggcgtcggcctctcccgcgccgacctcgccgccgtggtcgccgccgacccgatgctgctctgcgccagggcgcgcaacgtcgcccgccggctgcattcgctccgcgaccgcgtcggtctgtccgatgccgacgtcgcccgtttcctcctcgccggcggcgcaatgggcctccgcaaatgcgacatcgccccgaggctcgagttctggatcggcttcgtcggatcgttcgacaagctcctaccggcactgaaggggaacaacggaatcctcatgagtgacctggacaaggtcgtgaagccgaacatcgcgctgctccaggagtgcgggctaagtgtttgtgaaattgccaagctgtctacgctcaagtggacggtgctgtcgttgagtccagagcgagtcaaggcgtcggtgctgtgcgtcgagaagttggtcgtgccccgctcctcggatcggttcaagcacgtgctcaagtccgcctgttggatctccgaagatatgctcgccatgaaaatggagttcttgaggagcactcttggttgctccgaggacaagctccgtgccgcggtctgcatttcgccacatattttctacctgtccgacaagaacctttgccgaaagatagacttcctgatctccgaggttggcttggagcgtgagttcattgtggaaaggccttgggtgctcggctacagcctcgagaagcgtatggtgccacggcattctgtcatgaagatcctgaggaccatgggattgatgaaggatgctgttgacttcagcagttcacttgtttactctgagaaaaaattcgttgcaagatacattgatccttacaagcaagcagctcccacgctcgcagattcctacgctgctgcttgtgccgggaaaatgcctgctcatgttcaccgttgaatgtagattttcccagaggaggcaagcttgtaggtataccttatcgtatgtgttacacaaatttaggctgttctcattcgaaggttggttatctgttgcatgaactgcagaaaccttccaagatgaccaagcatgtaacatttgatcgttttgctacctaggatgcatgtttgatgataaatatgatagcaagttccttgatcaagaaaagaaaaacaacaagaagaaagcaagttggggggccatgcatcaactgttgtggtgaaatgatgttcctgtatttttctccccattatctgataagtaaagagtataataaaaaaaaattgtgatggaagatt

SEQ ID NO: 12360 - DNA, 2224 bp, Oryza sativa
  ref <308>: DATABASE ACCESSION NUMBER: AK109708
  ref <309>: DATABASE ENTRY DATE: 2002-08-28
gtccagttccacgaaaacccaaacggccaaacccctgtgtttgccgtgacgatgccctccctccccaactccggcgacgagggcggcgccccgcctccgactccgccgccgccgggggcgcgccgcgtggtggtcgcccaccgcctccccctccgcgcggatcccaatccgggcgcgccgcacgggttcgacttctccctcgacccgcacgcgctcccgctccagctctcccatggcgtcccccgccccgtcgtcttcgtcggcgtgctcccctccgccgtcgccgaggccgtccaggcgtccgacgagctcgcggccgatctcctcgcgcggttctcatgctacctggtgttcctccccgccaagctccacgccgacttctacgacggcttctgcaagcactacatgtggccgcatctccactatctcctcccgctcgcgccctcctacggcaggggcggcggcctccccttcaacggcgacctctaccgcgccttcctcaccgtcaacacccacttcgccgagcgcgtgttcgagctcctcaaccccgacgaggacctggtgttcgtccacgactaccacctctgggcgttccccaccttcctccgccacaaatccccgcgcgcccgcataggtttcttcctccactctcccttcccctcctccgagctcttccgcgccatccccgtccgcgaggacctcctccgcgccctcctcaacgccgatctcgtgggcttccacaccttcgattacgcgcgccacttcctctccgcgtgctccagggtcctcggcctctccaaccgctcgcgccgcggctacatcgggatcgagtacttcggccgcacggtggtcgtcaagatcctctccgtcggcatcgacatgggccagctccgcgcggttctgccgttgccggagacggtcgccaaggccaacgagattgctgacaagtacaggggacgacagctgatgctcggcgtggacgacatggatttgttcaaggggattgggctcaagctcttggccatggagagttgctggagtcgcgggcggacctgcgtggccaggtggtcctcgtgcagatcaacaacccggcgcggagccttggccgcgacgtcgacgaggtccgcgcggaggtgctggcgatccgtgaccggatcaatgcccggttcggctgggcggggtacgagccggtggttgtgatcgacggcgccatgccgatgcacgacaaggtggcgttctacacgtccgcggacatctgcatcgtgaatgccgtgcgcgacgggctgaacaggataccgtacttctacaccgtgtgccggcaggagggcccggttcccaccgctcctgccgggaagccgaggcagagcgccatcatcgtgtcagagtttgtcgggtgctcgccgtcgctgagcggcgcgatccgcgtcaacccctggaacgtggacgacgtcgcggacgccatgaacacggcgctgaggatgagcgacggcgagaagcagctgcgccaggagaagcactacaggtacgtgagcacgcacgacgtcgtctactgggcgcagtcgttcgaccaggacctgcagaaggcctgcaaggacaactcgtccatggtgatcctcaacttcggcctcggcatgggcttccgcgtcgtcgcgctcggccccagcttcaagaaactctcacccgagctcattgaccaagcataccgccagactggcaacaggctcatcttactggactacgatggcacagtgatgccacaggggctgatcaacaaggcgcccagtgaggaagtgatccgtactctgaatgaactgtgctctgatccgatgaacaccgttttcgtcgtcagcgggcggggcaaggatgaactggctgaatggtttgcaccatgcgacgagaagctggggatctctgcagagcacggctacttcacaaggtaagcacaagatttcctccctattctcttggcatgttccttcgttggttaggtgaaactgtggttgctgtcggcctaggcattgttaggtgacaaatggataaggtgcctggtatagtgtatattctcgaactagcaattcttctgtaatcaggtcactaccctgaactgggtggtgacaatctgctggcttgcattatgatactaaacaggagtagagatggtggtatttaagtagagggcctttgtgattctatcttttctgttagaatacacatgttctgaatg

SEQ ID NO: 12361 - DNA, 2354 bp, Oryza sativa
  ref <308>: DATABASE ACCESSION NUMBER: AK109709
  ref <309>: DATABASE ENTRY DATE: 2002-08-28
attttggtcctagtaatcaactacaggccgctagccatgtgatgcagccgagagaaatcgcccggctgctgctgggcttttggagcgaatgggcaacccagatccttgtagtcctcagcctcatccagcagttcttcccgctcttcttctccggcatccggcggcgccaaggcagaaacaaacggagggctgtcctctggctggcgtacaagttcgccaacatcaccgcgacgtacgccctcggcaggctctccctcagcgccgcgcagcgcagccaccggctcgtccccttctgggctcccttcttgctgctgcatctcgctggtccggacaacatcactgcctactcgctcgaggacagcaagatcgcagggcgccatgccctgactctctttgtgcagggcctaggtgctgtgtttgtcctcgtcaagcatgtcggtagcagcaggaccttgctgttgccgggtgccatcatggtcaccaccgtggccgtgttcaagatgtttgagaagacttgggctctctggatcgccaactttaaggtcatcctgtcgtcggtggaacgagaagacggtgaggaggaaccgcggcaattgtaccgggtttaccttgaggaagacgaactacctcgggggggattcaaggggaaggaagtcgacgaggaggaattcctcatgcggcgtgcccacgccgtgttcctcgtctgcaagtctgccatggttgactcttcaatgtatgatccagatagatactttctcagaatacttgcgtaccttagggagaacagggtggatttgtggacgctgatggagatggagctctccctcatgtatgacattctctacaccaaggcagccgtcatccacacctggaccggctactgcatctgcatcgtctcatcgctcaccgtggctgcctccttcctgctgttccaattatatggtaaggaggggcaaagtagcagagctgacattaccatcacctatgttttactgagttcttccttgctcatggagatggcatcacttttgagcgcgctctggtccacctggacgttctccttcctatgtgcaacgcggtggaccagccttcgacatgcagccttgtgctctaagaagtggcactgccttcgcaatatggtcctctcctttcgccggcttgcctgtagcacagggatttggagttacttgagcttgtcaaggaggtggtcaggtaccctggggcaatacaacatgttggatgcctgcactgccaggcctcctctacttggcaaactggtagtgaggctagtcttcagcagactgtccaagaagctaggcttcagcagattggcagagatgttgggcttcggaagactggcagaagaattgagctacaacgtggtgacagctgacattccaaagggactcaaggacatggtaattgagtatataaaattcatgatcaaggacaggaccgtgaatacactaggaatttttagggagcaatggggaaaggtggcaataaagcgttggttggaggataaacaagttgatgacgagtacaaggaatacctcgagaagaggcttggtgctgagctccacgagggtattatcgtctggcacatcgccactgacatctttattgctcagcgcaaggccgacgatcaagatgctgtgaaggaagctgtcaaagcattatcaaactacatgatgttcctccttgtcaaacaaccagacatgctacctggccttgctcaaaacaagatgtaccaatggaccaaagaaagtctggccaaagagtgggaggaagctggtgtacccgcatatgtttctgggctccatccaagtcagaaacttgccaacatgctacatgacaaggaggtcacacaagatctgatatctaaccgtttatttttcgccacccagctagcaaaacgactgcttgaaagagatgacacgatgaagctggtctatgggatctgggtagattttcttatatatgcgtccaaccgatgcagcagggagtcccatgccaagaggctcaacaacgatggtgagtttacaaccatcgtatggcttacagcagagcacctttaccaacttcaaatctatgatgcacaggaaaagcatcattaattctatcactcgtttcatctgcagtgacaacatatgtgaatatttacatcgatcatgtttgttattttttatattttccaattcaactaacctacatgctaggttaacttctatacttttctgtgttttaattgtacttttgatcaatttctttaccatttaaccatctctttatctgtagaagacaatagtattatctattattgaaaattggcccatatgtggggccaccggctc

SEQ ID NO: 12362 - DNA, 1862 bp, Oryza sativa
  ref <308>: DATABASE ACCESSION NUMBER: AK109710
  ref <309>: DATABASE ENTRY DATE: 2002-08-28
gaagcaggcccgtcctcgattcgccaaaaaagcaagtccccaatctctccgcaacctgttcgacggaatgcagcagggagcggcggggcaggctgggccgtcgggtggtggtggaggcggtggcggtggcggtggcggtggcgcggaccgcctcagcgcgctcccggacgcggtgctcttccggatcgtgtcgcacctgggggcgcggcaggcggtgcgcacgagcgtgctatccaagcggtggcgccacgtgtgggcgtccgcgccgcgcgtcgacgtccgccacccctgcgcctgcgacgagagcgccgaccaggagaggttccacggcttcgtcaccaccatgctcctcaggcgccgcccgttcgcccccatcaaggcgctccggctgtgctggagccacgacggcgacgccaacaactggatcgctcatgctgtcaggcgtggggccgaagaaatcgatttctccgcgaggcatcaccaagatgatccgaaaccggagctagagtacacgagcttcatttctcacaagatcaagatcttgaagctgacgcgtgtccggatgggcatcaagtttatcacgcagatctgctataggtgcacttttttggaagaattagagctcaagaatgttaattcacttgaagggcagattcaatcgacctcgctgaagcgcttgtctatcatcaactgccttatctctgatggatttttggttgatgctccgaaccttatctcgctctgcttcttcagacctctcagcggtaagagcacggagggagccaatcactcgtctgataataggagttggccattctcagcgtcagtgtgggagtttgatgacgatggatctgatcatgatgatgatttctttgcaattgctagtggtggtgaacactttgatgataagagagacaatgaatctgatcaagacaatggttctagtgatgaagactcagatgataagagagaccaagaatctgatcatgatgaagatgttccctcttccccatattctgattctaaggactcctgtgatggcagtgacagtgatgcgagtcttatgaatccagtgataaggagggtgatgatcttgaagattgcgacagcaatgatatgttggaaaacttgatcaaggtagctaggggcttgacagcttatcatggagaggtgcttctgaggaggcaattggaaaatttccccatgttcaataacctgaaaactctgtcccttggtgaatggtgtatggttcctgacttcagtgctttgtcaaccatacttaagaaatcacctaaggtagaaaggctttatcttcaccttgacatgatccacagaggaagaggggacatcgatccaagtggaggatcatttgcttgcaacaacctgaggaaggttaagatcacatgttgtaaagatgatgaaatggtccatatgctgaaacaattcctccaacgtaacggcatatcacttgagaagattgttcatcacacttctagcactcataatggcgaagaagacggaggcggggactccagtgcgaaacggaaggcgcaaggcgaagttgcgaggctagcagtgaaacagaggagggcgcgaaacagtagaagcccggagtgaggggaacatgtttaaaatgctgaggaatccagtgctgagtttacattgcagttagcagtagaattcttcacaggatgtgtatatgcatcaaatctagtacaggtactttggggacatgaaaaattatgcatccgttggtgttgcatgaaaatagatcgttggtcaatgttcagtgacttggaatcctgtgaattgctatatgcctatatcatgtttgatgtattgagtagtaattggcagcggct

SEQ ID NO: 12363 - DNA, 1491 bp, Oryza sativa
  ref <308>: DATABASE ACCESSION NUMBER: AK109711
  ref <309>: DATABASE ENTRY DATE: 2002-08-28
gcgcgcgcgcgcgccaccgcctcgcctcgccctcctccccgccgtccatggcgctcctcaccgccgcctccaccgtccccctccccaccacgatctccttcctcaccctctggtacaccagcggctcctccaccccgaccccgaccccgatcccgagcacctccaccgccatcttcgcgttcaggaactggtcggtgaagtgcggccacgccaccaccggcagccccgccgtcgccgcctccagcgtcgagttccacccgcagtgcgtcacgaacgcgcccgccgcccggtgggacaggatcagcgcctgcggcgcccacccccagatgagcagcccgcgccccgccggcgccacccgcgcctccagctcccggaggaacgcgagcgccgcctcgccatggcggtccggggatctcaccacccagatgaacgggtggcccgacgcctccagcccgaggccgagctccaccgcctgcttctcctccgggtgcacgatgctcccgaagctgacgtagacgacggagccgggctccttgccgtcgagccaccggaggcactcgtcggcgccgatggcggcggtgttccccctcgccgccagcgtcgcggtgctccggtggtagagcgcgaccggcccgacagtccagagcttcatccccctggcctccgcgtagccggcgacgtactccggctccatctcgaggacggtgttgatgacgacgccgtcggactccgcgcgtgcgcgctccaggtcgtcggcgaacttctcccacccggggatgtcgcggaagaagcccggggcctgcgcccgcgtgacctcgacccgcctcgccaggccgggcaccaccaccggcgcgttgtcgtcggcgacgccgtcgtaggcgccgaaccgctcgacgttgtgctggcagaggaggcagaaggcgcacatgctgaagaaggtgagccgcgggacggcgaggccggcggcgagctccgacgcccacgggtggcagaagtccgccacgacgcacgtcgggggaggcgcgcccccctcgtccgcgcggaggaggaggtggcgctcgacgggctcgcggaggcgcgccacggcggcgaagtagcgcgccatgaactcggaggggacgttgtccatgttgtccacgccctccggcaggccggcgccggcgtggtcgagcgggaactcggcgaggcggacgggcaggccggacctcctggccgagtcgacggtggggcgcaccctcgccgccgtggccggcgtggcgacgacggtgcagaacgcgccgtgggtggcgagcagcagcgcggtgtccaccgccggtatgaggtggccctgcgccatgagcgggacgaacacgaagtgcgccgccgccatcgatgctagctaccagtaccactagctaatcagtaatcagatagctcgtattctcgccggcgatgatccatatgtactccctccgtcccagaaaaagacaaaccctgatttccgtgtccaac

SEQ ID NO: 12364 - DNA, 2670 bp, Oryza sativa
  ref <308>: DATABASE ACCESSION NUMBER: AK109712
  ref <309>: DATABASE ENTRY DATE: 2002-08-28
actgaccactgtcgccattgtcgccaagagcttagagcttcttctatcctcgagcacaagcacggctgcacggcaatggcgatcataaattaagccaagctcgtcgagctaggtacggggtagtaagcaagcaagatgaggggcgatggtgctggcagtggtagctacgagtacttgagctgccagaaaaccaccgggatgatctggaacctgacctcctcctacaccgacaagagcaatgaggcatccatggtgtccgcctccctcatcgtcttcgccctcgccgccctcttcttcaacctcaacctcttcagcggcatctccgacgtcggcgccatcctcgaccccaaggtccgcgtcatcctctccaaggcgctctcgctcttcctccccgtcatgtcctacctcttctccgaggccaagaacgccggtgccgccgcctccgccgccggcggtagcacgggctcgctcgagctcgagctctcgctgcgggcgcggctgatcctcgtgtggatgctcctcgtcgagctgctccgcaagaaggtggaggagattcggatggaggcatggcacgccggcaccgtcgagcgcgccggccgcgtcgcgtggctcggcagcctcgtcttcttcaacctccgcgccgccggccgcaaggccgtgttcggcatcctgtggactctctgcgccgccaagctggtgcagcggatgacctacaccgaggtcggcaagcgctccttcgcctacggcaagaacgccaagctcgtcatctcctacatggcgcagatgcttcagaacgatgccgaggtcgagctcgagcaccacccccatggctgccatggcggggacgagctcttgaggagatgcaagtatttggtgatgggagaagaaggcctggtgatcgaaccgatcaactccggctacaggatcaccggcgacatcgacgccgtcaccaccgtcggcaagatctggaccctcgccgagagcgaccatctcctcgcgtcgctcgacatggaccatcgcctcaggaggctctgcgtgtcgttcgcgctcttcaagctgctgcgccggagcttcgagcgcctgccgccgatgaccgaggcggagacccgccattgccgggacctcctcttcagaggcctgtacgccggcgccggagacggagacggaggcggagcggaggcgttgttcgaggtgatgagcgatgaggccaacttcgtggccgagtactaccactccgtcgtccccgtggtgctcgcgagccccttcttcctgctcgccaactacgtcctcctcccgctcgtcgtgctcgtgctctgcctcgtcgtcgtcgtgctctgcggcaacggcgacgtgctcttctccctccgaagcatcgagagcgacaactacaccatgtcgtccggcggcgtggcgaccatggcgaggtgcctgctgcgggccgtcgcgacgtcgccggcggcgttcttcacagccatcgacctctccatcacgtcgctcctcttcctcgtgctcgtgtacgaggaggtgtgggagttcgtcgtcttcctcctctccaactggttcatggtgtcgctgctgcacgcgtacgcgtcgtcgaacgcacggtggcgcgacagcgccgcgttccggtgggcgatccggcgcatcctgtgggcgcggagcaagatgctgagccaccatggcctccgcttcaagcagttctccgttctgagctcttgccggctctcgctgacgctgccggccgccgtgtcgctcgcgctggcgatcctgcccgccgtgtcggtgccctgccaagtgaagcaatccatcgcggagtacatggccaagtcgctgtacgacggcggcgacggaatgtccgccgtcgcagagcacccggagctgttgccgttctgcgcgagcggcggcggcggcggcggcggcgtcggcgtcgtggaggtcatcctgacatggcacatcgccaccgccatcctggaggagaagtgcccaccggcggcgtcccagagcgacgacgccatcgtggcgaggacgctgtccaggtacatggcctacctggtggcgttccacccggagctcctccccggcaaccaggacagcacggagctcgtgttccaggccatgaacgacgagctgaagcaggtgctcggcttctggggctaccacctccggccattgctaatgctaatgctgcggcgcaccaggaggttcgagtgcgacatggtcgtcatggccggagtcgccgagcggcggccggcgagcaagcagcagcagcaggaaatgacggtgttgcagaagggcgcggcgctggggcgcgcgctggtggagaaagcggggagggatggtgccggcggcggggtgtggaaggtggtgggcgatgtgtgggtagagctcgccgtggaggtggcgccggcgagcgacgaggagcgcgtgatggggcacaggaaggtgttgccggagggcggcgagttcgtgaccgtgctctgggcgctcgccgtgcacaccggcataagccgccgcctggctgtcacgctcacgccgccggacacgatggatcgtgtttgagtacccattctaaacattagaggggacatctcgagagaattcgttctgagcatgttatctaaatagttatgattttataaaaaagttcaacaagatatattaatatgtgat

SEQ ID NO: 12365 - DNA, 1522 bp, Oryza sativa
  ref <308>: DATABASE ACCESSION NUMBER: AK109713
  ref <309>: DATABASE ENTRY DATE: 2002-08-28
aaaaaccctaccaaagcaccaaacctcgtgacctcgccggaagccgcgccgccccagccgccgccatgccaccgaaggccaagaagaagcagtccgcggcgtcgccgcagccgtcccctcgcacccctgcatcccgcggccgcgaaggtggaagcgtcgccgcgggcggcggcgacggaggaggaactctcgacctcccgtccgtcgccgcggcggcggcggcgcggcacccggcgctcgtgccccgtggcggcgaggggtgcttctccgggaccgtcgcggaagtggcccccaggggcaggagccgcggcggggaggcgaggctctggctctccgagcccgccatggtcggcgccgcgctgcggcctgggtgcctcgtctccgtatctctcatttcttcaaataggggtcgatcagatggttcaccacttgatagtttatttgaggagtgcaacgagttctttgatcttgatgtggataatgatctcatgcctaatgaagctggtcgaaactttgtgattgccaaagttttcccctcacgtgaggtccaaaagaatggtatcaagctgtcttgggaccttgcttgctccctgggaaatccttcagtaggttgttccttgttttttagccccctatatacatctcaggccccaaaggaaactgatagtgttgacattttacgggtgataaaatgcagcaatctttaccttagttttgtcccagctaaagttggatcttccagcgagattgaatctgagtctgtacaccatcctataagaaatggaatggttatagaatcacctaagagaaattcttcagttctgtcaggcaggaatgagtcctatgatattgcatcccacagtggcccttcattgtgtttggatccagctactgcaagatcatcattagcagatgagaaaattaatgagttgctgcagacttgtgcatcacgctggctcagtggtaggcacctactgaaagcaaactatgttcccctcctgatgtgtgggaaattgtccatgtttattgttatgggagcagaagtagatggttctgctcctgatgtggtgcatgataaagataagttaccgtctaatgaagagatttctggtaaatttggggaagcgcctgtttcattccttgttgacagaaccacgaaagtgcatctttctggtccagtctgctcagaggagattgcctttgttaagccaggcccatcagcacacaattcctttcgtactgatgcaagaaacggagatttcaatcacggtccaagacttggtgggctatccaaagaatcaaaagaaataaaagaaatcatttcattttcaatcaaagaccaaattggcttgcaaagggtcaaagataacctctggtacagaggtatccttctttctggtccacctggaacagggaaaacctctcttgctacttcttgtgcctatgatgaaggagtcaatctttttacacgttttgctgtggtagagcagcatggaagaactataatgaataagtgatccct

SEQ ID NO: 12366 - DNA, 1501 bp, Oryza sativa
  ref <308>: DATABASE ACCESSION NUMBER: AK109714
  ref <309>: DATABASE ENTRY DATE: 2002-08-28
aggcctgcagcgccgcggtacctgaaaacctctcttccgccacaagtccacctgccgccgccgccgccgccgccgcggcgccgcccaaatgtctctgcgctgctaccaccaccacctcaaggtccgcgccctcctctgcggctttggcggcggctgcttccccacgcggacgcccccctccccctcgccctggtctccgcctctcacgcatttcatcaagcacctcctgggcagtccggccgcgctctcaggcaccgccaccggcgccgcctgcgagccctgctccctcacgctccacttcctccgcaacacctgcggcctctcggaggatgaggcggccgcggccgccgcgcgcgtccgcctgcgctccaccaagaaggcgcacgccatcgtcgccctcttccgcggcatcggcttctcggccgccgacatcgcccgcctcgtcacctcgaacccgtccttgctctcttaccgggccgacgccaccctcatgcccaagatcgagttcttccgccgcgagctcggcctcaccgacgccgagatccgccgcctcgtcctcgccaacccctaccgcgtcctccgttacagcctcaagcgctgcatccgccccaactacctcatcctcagagacctcctcggcagcgacaagaacgtgaccgctgccgtcttgcagtccacggatctcatccacggggacgttcgtggcatcctcctccccaagatcaagatcctccaggactacggcgccacgaacgatgtcatcgtcaagctggtcaccacgcaccccagggcactcatgcatagggcctcccgcttcgaggagagcttggctgccatgaaggagctcggggtcagaccttcctctggaatgttcccctattccttcgggctctttgccagattgcatccaaggaaatggaagggcaggatggacaatttcttgagcttgggatggacaaaggagcaagtgattgaggcgtttgtgaggcacccgtactgcatgtccgtgtcgaatgacaaggtgaagctcatctggcagtttctcgcgaagaagctcaggtggaccaccgattatgtcgcaaggagcccgatggttctctccttcagctacgataagcgaatcttgccaaggtgcacggtgctgaacttgttggcatcgaggggcatattcaacagggacatcaagacatcccatctggtactgggggagaagaagtttaaggagaagtatgtcaccccttaccaggatgaaattcctgaggtactggaagcttattcttctgtggcagaaagtcgagtccccgtgtataagtagctggagaggattatgctgcgcttcaccgtgcaacaaaggcactgccttccccttgactttaattatgttcaatttcattgaatgctttcttttctttctgaaatcaaggcatgcaatggagctgaaaacaaattgttgtaggattcttgaaatatgaatgattgaaactgcgaacatactggttac

SEQ ID NO: 12367 - DNA, 1543 bp, Oryza sativa
  ref <308>: DATABASE ACCESSION NUMBER: AK109715
  ref <309>: DATABASE ENTRY DATE: 2002-08-28
gatgcctcctctcctcgcctccacctcctccacgtcccctctcctcctcgcctctcgcctccgcggaggcggcggctgcggctgcggcggcgcccctctcctccaccggacgcgccgcggcttcctcgcgtcgagcaccaccaccacccagacgacgaggacgagtttcgcggcgatgagctggctcgggaagctggggctgggcgggctggggggaagcccgcgggcgtcggcggcgtcggcggcgctggcgcagggccccgatgaggaccgcccggcggccgggaacgagttcgcgcagttcggcgccgggtgcttctggggcgtggagctcgcgttccagcgcgtccccggcgtgactcgcaccgaggtgggatacagccaggggaacctccacgacccgacctacgaggacgtctgcaccggcgccacctaccacaacgaggtcgtccgcgtccactacgacgtctccgcctgcaagttcgacgacctcctcgacgtcttctgggcgcgccacgatcccaccacgcccaaccgccaggtcagccagccacagattaactcgattcacaaacctaatcgcatgatttcgtttaccgtaccttgctctatgcttaatttcgggttctttgattgagtgggtggcagggaggttcagaattggggatttcatttacgataatttcgtgagggtttagtggaattgaagaattaggctactgatattactagttcagttagtaggagtcactagacagatattctactgcaaatttttacagagaagaagaattcctcgcgagtaaggtaaatcactctatatacgaaagaaacgtgggtgctgtcgtgcacagtaagagctcaaacctgtgacaagtgcggcatagaattgactatcagtactgcggtttcttaattagcttgcaggtcacggctgaccggaattattgatgagttcctcaccaaccaaaggagcttactttggccttatgttctttacgcagttttggtttacagcaagtaccacaatcccataatcctgagcactggcagagaatagactgtcatagcgtcatggttgtgttaggctgtgggcactcagcgttgattgtcctgttcatgggaccattgggcccaatgaatcaggttctgttatattggatcaagaatttgcagcatcccagctgcagtttgcactttcatcatcaaagggccgaataccaagtggctacctgcatattaatcttgagcagtcaatgttatagtgtgggtactgttagcaagtatataccatcatattggtgttatcggttggtttgacaagcatctaattttgtagtggtgctgagtctagcatgtcttgcagtgtttgtaatgcataaccttgcacttgggcagcgctatgtaattttgcaagatcgattgcctatagtatgtatcattttgtgttcactaatttatgtataacttgcatcttgattctttagattggtggacaattgactgctaccaaggagtgccaccaaaaataacaaactaactg

SEQ ID NO: 12368 - DNA, 2443 bp, Oryza sativa
  ref <308>: DATABASE ACCESSION NUMBER: AK109716
  ref <309>: DATABASE ENTRY DATE: 2002-08-28
aagcaaatctaacgtagttttttagcgaagcgaactgctggattccacggtgttcgtctcgccaccttccatttctgtttgatgatttaatcctctgcccagttcttcactgacgaacgaacaagctcgccgccattgccaaaccaccttcttcttcttcttcttcgcctcctcatcatccacgatcaggtccatttgggagatcaatgcgaaattgtgcagttgctgcgtcgttctggggcggaattgattgtgttcttcagtctatctaatccctattaatcgatcgttgagggtttgagatcggatttggcgatggcgattacgaaggttctcggatcgaaacctgccgactgcttccaatttcaagatcctaattcctggacttgcatgactgagcttgtaagcgatgtggtcgttgaggttggagatttctccttccatctccacaagttcccattgatgagccgaagtggcacgctgcaaaagctgataagcgaagcagccgccggcgccgacgacggcgagccgtgcagcgtcaagctccacgacgtccccggcggcgccgcggcgttcgagctggcggccaggttctgctacgacgtcagggcggagctcgacgccgggaacgtggtcgcgctgcggtgcgcggcggagcacctcggcatgaccgaggaccacggcggcgagggcaacctcgtcgagcaggcggaggcgttcctccgcgacgtgctcggcagctgggacgacgccttgcgcgcgctgcggtcgtgcgacggcgcgctcctcccgctcgccgaggagctcctcgtcgtgccgcgctgcatcgacgcgctggcgagcaaggcctgcgccgacccgaccctcttcggctggccgatggtggagtactacacggcgaggggcctcgaggagacggtgatgtggaacggcatcgccaccgccggcaagccgaggtcgccgggcccggactggtggtacaagcaggcgtcgtcgctgaagctgccggtgtacaagaggctcatcacggcgatgaggtccaagggcatgagccccgagaacatcgccggctcgctgacgcactacgccaagcgccacctctccggtctgacccgccactccggttacgtcggcggcggcggcgcgtcggggaccgtgctctcggacgtggagcagagggcgctcctggaggagatcgtcgcgctgctccccgtcgagaggggcgtcgccacgacgaggttcctgctcgggctcctccgcaccgccacgatcctgaacgccggcgcggcgtgccgcgacgcgctggagaggatggccgggaaccagctcgaggaggcggcgctggaggacctcctgatccccaacaccggctacgccgtcgagacgctctacgacgtcgactgcgtgcagcggatgctggagcagttcgtcgccgcgaacacgtcggcgttcgccgcctcgccggagatcacggacgaagcccagctggtcgacggcccctccggtgagctcatgccgatcagcacggtggccaagcttgtcgacggctacctcgcggaggtcgcgacggacaccaacgtcaagctctccaagttccagagcatcgccgagctcgtcccggactacgcaagggccatcgacgacggcatctaccgcgccattgacatctacctcaaggcgcactcgtggctgacggcgtcggagagggagcagctgtgcaggctgatgaactgccagaagctgtcgctggaggcgtgcacgcacgcggcgcagaacgagcggctgccgctgcgggtggtggtgcaggtgctcttcttcgagcagctccggctgcgcaccacggtggccgggtggttcttcgtcgccgacaacgtcgaccagggctcccccatcgccgccggccggtacgcgccggagaggagcggcgagctggacttcggggcggggccgccggaggaggaggatggcgacgacgacgacgacgaggcccggaacaacgtgcggtcgtcgtcgtcggcgacgatgagcgtggacgacatcaggcagcgggtggtggagctcgaggaggagtgctcgagcatgagggaggagatccaccggatcgggaagcccaagggcgcgctgagtaggctgttccggaagctcgggctcggcgggaggtcggcggcgaggcggcagcagcagcagccgccgccgccgccgacgagctccggcgacgagaggcggaagtcgatgtccttggagtgttaaggtctacgtgtgcgtttcagttcggtgtgtttgtgttactgttagtttggttaaattatcatttgttcgaactctagaatagatttttcccccttttggaacaggaagttattagaacgtacatggagtatatctattgtcaaaattcagttattactttagaatttagatgcaatcatgcaaatatttggtg

SEQ ID NO: 12369 - DNA, 1450 bp, Oryza sativa
  ref <308>: DATABASE ACCESSION NUMBER: AK109717
  ref <309>: DATABASE ENTRY DATE: 2002-08-28
atagtttccacacgttggcctctccttcccctcccttctccacctctcttcctctttcctcttcttttcattggcagcctagccggcgtgtggagaggaggccggtgggggaggcagcggcagtgacgacgcggtgacgggcgacgagcgggagccccccccccacaccgccgccaccgccgtcgccgacggcgcgggcgccagatcccaccgccatggctcctcgtcgatccccggcgctggtggcggagacgaccggcggaggcgggtcgacgccaacgaggagaggagcggcgcggcggaggctgcccaaggtgacgccgcggtgggtggaggtggtcctgtgatcaatgggaactcggcgatggctggactccagccgcgatgtcggggtggcctcgccccaggtgttgccgacaaccagcgggaggcgcaatcgggtgatgacgacgagaaaaaaaatcgggtggccgccccccgaagaaatccaccgcagccgctggcgcacgtccccgggctggttgacctcaacgtccttggaccgtcggccggtgcccggtgacagcctggccaccacgctcgctggtcccgccgagttgccgccccgccatcctccgcgtcccgacaactccgcgccgaccgccgccgactcccgccggtctatcccctctgcgccgacctcagcgtccacctccactcgcgttgctccagggagaggtccaccaccggtctccatagccacccgggggaatctgtctcgccaccgcatccggcgggctcgtggcgccaccatcgcttaagctcaccacgccgccggacgccggatctcctccgccgctgaccgggtcgtggtcccctggccgtcggctctctctctctccggtgcttgagtgcttctctatgcagcaggagtgagaggccaagtcttgaggggtctgtggacttggtctatggaggctatccaacaaagggaggggaagaagaggctgacatttggaactcacgtgggttctacgctgagttgagggatgcgctgaatccggttttgcggttcaaggacgattttataactcgatgataagttgaggcaccttcggtgtactttttcccaccccccacaggccacggtaccccacctcgcgacgccggcccagattagctaccgcaccgggcgaagtggaagccgaagcccacatgcacctttttgccgggctggcttggtgcgcgcgttgacgcgtccatcgcgtggggaaaatacacttgtgggctttccggttctggactggaataaacctctcaccgaaaacttcatgggccttaccacagaaacatatgcagggtccgagaggtgcacaggtacccgctccaaaacataaaacatataacctattattatcaggttggatattaactaataagtagtctccatattcgtagtatttaaaaatct

SEQ ID NO: 12370 - DNA, 1354 bp, Oryza sativa
  ref <308>: DATABASE ACCESSION NUMBER: AK109718
  ref <309>: DATABASE ENTRY DATE: 2002-08-28
agcaatccatccgtccgttcaaatccctctctgggaaacggacgaaacgggagaggcgcggaaaacccccaccccccaaatcggagcgcggaggcgccgaccaagaaaccctacgccgcttgggcggcgatgatggaggcggcgccggacgaggaggccgggctggcgctccccgagggcgagcggattctggaggtcaccctcatctccgcgcaggggctgaagcctccctccggcctgcggcggcggctgctgcaggcgtacgccgtggcgtgggtggacgcggcgcgcaggctccagacgcggccggaccgcgcgggcggggtcgacccggagtggcacgagcgcctcctcttccgcgtccacgaggccgcgctcgccgacgactcccgcgccgccgtcaccgtcgagatctacgccgcgcccgccggcggctggcacatcgggggggactccctggtcggctccgcccggttcctgctcggcgaccacggcctcctgtcccggcccgtcgggtccccgtcgatgttcgccgtcggtgtgcgccgcccctccggccgcgtccacggcctacttaacgtggcggccagtctcgtcgccgcgccgccgtccccggcagctgcccacgctctccgctcatcccccgccgtctccctcagcggcctctccacggcgcccatcccagcaggccgcgtgctccgcgtcctcaaccgctcgtttccgacgcccccaccctctccgacggttcttacgaccaagaagcagcagattgcagccaagccgaacaagaagtgcgctgacaagctggacgttgcggtgaagctgaacaatggcgcagatgatcggagcgatgaggagcgtgaggagttgagagagatgggcggggtggtgttttgcgggccttgtatcctaccattaccaagaaagatccacataagcccctctgacgagaacctgcaggcctttgctagcatcttctccggcggagttggcattaccagacagagccctcgccattgaggagtccaggcatttaataggttcggttctttcagttgattccttgtggagatagcctgtttcttcttgttgtggaaaattagtttcttaaccatgaggatatagtgctgagttgtattatagcatctattgttgttactgcaaatatgtctcactgattcttttttgtgtgaatcaatggaattatagatttatagtgccacaatgaatagcgcggaatcattttgttatctgctatgctcaaagaacctcaatttaaggtttgaagatttcgtttgaagcaatataagcctgaatgcctgagtatttccactcatcttaatggcatatgtgg

SEQ ID NO: 12371 - DNA, 1565 bp, Oryza sativa
  ref <308>: DATABASE ACCESSION NUMBER: AK109719
  ref <309>: DATABASE ENTRY DATE: 2002-08-28
atcatcttcttcctcctcccgacctcccgctcctccgcactagtccgaatccgagctccaagtcgtcgagcaacctcaccgccggaggacaccttccgccgctcgccgtcgccgccgccgccgccgccgcgcagcatggcgtagcggtggtgggcatggcggcgcaccaggggatggcggcggcgacggcggcggaccggttctgcctgccgaggatggcggcggcggcggcggccgcctcgcaggtggagaactggggcgactccggcgtcatcgtcagcagcccgttcaccgacgacacctccaccgacctcgacgacagcgccgacaagcaccacctccacgctctagtgggcggcggcgatggcggcgacgacgccggcgagcagcgaggcgcggattcctccgccgtgtccaaggaaagaagaggggatcagaagatgcagcggaggcttgcgcagaatcgcgaggcggcgcggaagagccggatgaggaagaaggcatacattcagcagttggagagcagcaggtccaagctgatgcaccttgagcaggagctccaaagggcaagacagcagggaatcttcattgcaactggaggctccggcgatcacgggcactcgatcggaggaaatggtacgttggcgttcgaccttgagtacgcgcggtggctggacgagcaccagcggcacatcaacgacctgcgggtggcgctgaacgcgcagatgagcgacgacgagctgtgcgagctcgtcgacgccgtgatgatgcactacgaccaggtgttccgcctcaagagcttcgccaccaagtccgacgtgttccacgtcctctccggcatgtggatgagccccgccgagcgcttcttcatgtggctcggcggcttccgctcgtcggagctcctcaaggttcttgccagccatcttgagccgctgacggatcagcagctgatgggcatctgcaacctgcagcagtcgtcgcagcaggccgaggacgcgctgtcgcaggggatggaggcgctgcagcagacgctgggggacacgttggtgtcggcggccgccaccgtggtcagcggcggcggcggcgccgacaacgtcaccaactacatgggacagatggccatcgccatggccaagctcaccacgctggagaacttcctccgtcaggctgatctgctgaggcatcagacgctgcagcagatgcaccggatcctgaccacgaggcaagcggcgcgggcgctgctcgtcatcagcgactacttctcgcggctccgggcgctgagctcgctgtggctggcgcggccgagggactagactgactaaagaggatcaatatcatttgcctgagttctgagttctgacgatggatggaggtgaacctgttttttgattgctgaatcctgagagagcgttaactgcgatcggcattgtaaaatcagttgctttggtgatgaagcagtagtagtaggagaatattttagattgggctcttgggcctgtaacgtgttgtagtgttagcgtagtaagaactaatccgcgtacaatgtcaaaaggagaagttttatt

SEQ ID NO: 12372 - DNA, 995 bp, Oryza sativa
  ref <308>: DATABASE ACCESSION NUMBER: AK109720
  ref <309>: DATABASE ENTRY DATE: 2002-08-28
ggctccctttccccgccgctcccgctcctctactgcgccgctggtgcccctctctctcccacccaccgccggcacccctctccccctccgccggcgcccctctccctctccgaatctggcggctggccagcggcgacgcggcgccgaagccggcggcggacgaccccgaggcggtctcggcgggagcgggggccatcgttcctgggcgtcgtcgcggcgattcagcaccgccggcccgagcgccgccttcaccacaggttcgcctcctccgcatcttcttcgcggaggtcgccgcgcgatgagcggcggcgcggtcgtcccctcctcctccttttccgacgcaaagaacgcaccgggtggagatggcgatggcgctggcgtgggagctcgacggtgctggacggtggggcagctcgagctccacggtggtgccctcctctccccgtcggcggccccgaagcagcggcggcgttggcggcgcaggagcggggtgcgggcggctagatccaccgctcctctcctctcccgaaccaacgctgacgtcggtggcgcgggagctcggcggcgacgacgagctcggtggcggaggtggcccgaacagtgaggtgcgagctgcgacggaggcgccgggcggcgggatgtcccgagcagcgatgacgatgccgggcggcgctgccgctcctctctccacgtctgctgcctcgcccatctcccctctctcctctaactcgcctgtgggtcccgcatgagacgaagaacgcgtagccaaagttggctacgcggagctgaggaggttgagcatttggttgatgtggcaaggaatattcgttttttggggtggaggccgaatgccacgtccgcccattgtgaacgcccttaggagaattttgctcagacggagggacatgtatcacgtttacgctagtgtcacatatagctttgtgttctcacacctatgccatatgaaattctagtcttctagagatatatttttt

SEQ ID NO: 12373 - DNA, 1449 bp, Oryza sativa
  ref <308>: DATABASE ACCESSION NUMBER: AK109721
  ref <309>: DATABASE ENTRY DATE: 2002-08-28
tttaataatcataaaagaaatttaaataataaccatttaagtgagcccaaaaaatgttctcgagccttcgtagagcgtcgtgtaatgtggcgatgaacgccaagtcgacccattggtggaccaacgtgaaaatggcgccgccagatccgattctcggtgtgacggacgcgttcaagcgcgacaagaacccgaacaagatcaacttgggcgttggcgcctaccgagacgacaacggtaagccgtacgtgctcgagtgtgtcaagaaggccgagaagcagttggctgagcagaacctcgacaaggagtatactcagatcactggtgtgtccgacttttgcgaggctgctgtgaggctcttgctcggcgacgactcgcctgctatcaagaataagctctacggcgttgctcagaccatctctggtactggtggacttcgtgttggattcgagttcttgcgtaagtattcgccttatgctaaaactgtttggatgccaactccaacatggggaaatcatggtccaattgccaatgactcgactttcgaggtgaaatactatcgatattacaagccatcgaaccgtggattcgactttgaaggttgcttggaagacttgaataaaatcccagaaaaaaatgtcattttgcttcaatcttgcgctcacaatccgaccggtgttgatccaacacaagaacaatggaaagagatctcacatgtcatcaagaaacgccaactgttcccgttcttggacacagcctaccaaggcttcgcctcaggcgacatcgaccgagacgcattcgcgccacgtctattcgctcgcgacggccacgaattcatcgtggcgcagtcgttctcgaagaacatgggtctctacggtgaacgcgtaggcacagtgtccttcgtagtgaacgacaaacaagatctcgagcgcattctgagccagttgcgcgtgaccatccgccgcctctactcgaacccgccacgtcacggcgctcaagtggccgctcgcgtcctaacccagccggacctacgcgccttgtggctcaaggaggtcaagctgatggccgaccgtataatcacgatgaggagcacgctcgtcgacaacctcaaaaaggagggctccaaacacaactggcagcacatcaccgatcaaatcggcatgttctgcttcactggcctccaggagaaacaggtcgagcgattgatcaaggacttctctgtctatctcaccaaggacggacgtatctcgattgctggcgtctcatcgaagaacaatgcttatttggctcatgctattcatgaggtcaccaaataaacaatctccctcccttagactatccttttttttctctcaattatatatgtactttgtttttagactattatatattatggttaaaccaggtgtgtggtatatatatgtttagattaagaatcgtatcatttatagt

SEQ ID NO: 12374 - DNA, 1754 bp, Oryza sativa
  ref <308>: DATABASE ACCESSION NUMBER: AK109722
  ref <309>: DATABASE ENTRY DATE: 2002-08-28
ctctctcttttcaccttgagataaacaatgccgttcatgcccgaacagagctgctcctcctcctcctcgtcatccccggccaccgcctcaagccgccgtctcttcctctcctcttcccgtctcctccgctggcgtcaacctcgagttcctcgtcgtcaacgcggccaccgcaggggagtaggagctccgggccggcgccgtctcccacaccgacgccgaggacggctgcgcccccgagtggcgcacggtggcgtccctcctcccatgccgcatcgaggaggagaaggtggcagcgccggcggtggccgcatcgaggacgccgcccagtcgagctcgaggccagatctggagtgctcgaggtcatcgcgacctccacaacgcacggcaagggcgacgatggcaaacacaacagcggtggcggcatcgacggcgcgcggagcgaggaggacgcggcggagcgagatccgccgctgtcggccatggtcgccggcgtcgcggggtcgtcgccgtcgccaggtcgtctccgtcgcggggttgtcgtcgtcgctgttgagggtggaagaggaaatttgtggtgcggagctgtgtccacgagacacacgtctagccaccgcgcgtccaacgcgtagcctggcgccgtggctcagccaaaagcgactgaggaacgcgtccccctgcgagcaaacgcgcgcctactcggggggacggctcaggccgaaaagcaaacgggacggcgacgccgtgagctaggggaacggctccaagacacccattgcttatgctataagactgtctccaacaagtgactcgtaagggcacccaaactcaaaatgggtctccgatagtattatttcagcctctaacagagtacctatacagaagacccattttgcgtgctataagaggcataacctaaatctgagtatcctctctcctgaagacctatttacaataagggttctcttttaggtcttattgttggagaagactaaaaataggtattgaactctttgactgtagcgctatgcaaacttaaaatgggtcttgtattttgggttttattgttggagatagcctaaggtttcatgaaacttgtacaggacttgagtgctcagctttgactggcgagtggtgacaataaacaatccaagagaaatgtgggactatataattaaatccgtatgaacgcaactaacatcttcaactaatatagcaccttacttgctaaaatttatgagatttgtcttttttttttattttgctgatcatcttctcggaggagttgaaaacttgtcagatcactcttttttttttctccttttgcgactctaaaacacttatgtgccagtcggcaaaggccgaagatataaaccatttctattattttaaaagttcaaccaacaatttcgttctgcagccctgactcctgcgtggtctttcaaagctccaacttgttagttccaagcacttataactggactgaaccaaaaccaaaaccaaacaaaaagaaagtggcaaatccacacgtaatgtatagttgaccatactggaattaagctgttttttctcctatgtggttgcttaagggcttgcaattagttagttgcctcatttttctaatatgctccctccgtttcaggttataaaatgttttgactatagttaaagccaaactattttatgtttgtccaagtttatagaataatatagtaatatttttgactcaagataaatttattataaaaatatagagt

SEQ ID NO: 12375 - DNA, 2057 bp, Oryza sativa
  ref <308>: DATABASE ACCESSION NUMBER: AK109723
  ref <309>: DATABASE ENTRY DATE: 2002-08-28
gtacatccaaagcaaagcaaagcaaagcaaagcatcaagctcacacctcgagagtacgagctcgagcttagccaagcaatcaagcttacttgccttcttcttcttcttcttccttgagttgattgattgctactagctcagacagcaatggaggtcaaggtattgagcagcaagctcgtcaagcccgcctacaatggcggtgtcgccgcggcccccgacgtggagtatattcctttgtcgatcttcgacaaggtgacgtacaagatgcagatggcgatcatctacgcgttcccgccgccggcgccgtcgacggcggccatcgagaaggggctcgcggcggtgctcgcgcagtaccgcgcgttcgcggggcagctcggggagtcgcccgacggcgaggcggcggtggtgctgaacgaccgcggcgcgcggctggtggaggcggcggtggacgccgacctcgtggacatggcgccggcgaagcccacgccggagctgctccggctgcacccggacctggagggggagctccaggaggtggtgctgctccagctgacgcggttcaggtgcggctccctcgccgtcgggttcacctccaaccacgtcgtcgccgacggccacgccaccagcaacttcctcgtggcgtgggggcgcgccaccagggggctccccatgggcgccccgcccgtgcaccaccacgccgccctcttcaagccccgcccctcgccgcacgtcgagcacgaccaccgcaacagagagtactacctccccgccgccggcgacgacagccacggccacggcgacggcggcgcggcggacaacatcgtgatccacaaggcgcacttcaccaaggacttcatcgccggcctccgcgcggcggcgtcggaggggcgcggccggccgttcagccggttcgagaccatcctcgcccacctatggcgcactatgacgcgcgcccgcgggctcagccccgacgaggcctccaccatccgcctctccgtcgacggccgccaccgcctcggcgcgccggcggagtacttcggcaacctcgtcctctgggcgttcccgcgcgccaccgtcggcgacctcctcacccggccgctcaagcacgccgcgcaggtgatccacgacgaggtggcgcgcgtcgacggcgcctacttccgctccttcctcgacttcgccctctccggcgccggcggcgacaaggaggggctcgcgccgagcgccgtgctcaaggacgtgctgtgcccgaacgccgaggtggacagctggctcaccttcccgttctacgagctcgacttcggcaccggcagcccgacctacttcatgccgtcgtactttccgacggaggggatgctgttcctggtgccgtcgtacctcggcgacggcagcgtcgacgccttcgtccccgtcttcaaccacaacctcgaggcattcaaggagtgctgctactccatggagtaaaattcaaaatcaaaatcaaaatcaaatcatttattcgttattattattgattatggagtaataataataagttaaatttttattattattccattgtcttaaaagcaaattatggattaatgatatatatagaagaagagagggaaattcaagatttaggtagtgaattaaccatttcttttcaccattttgtacgtatgcatgtgcatgggtacgtacaaaaagaaaggaaaaggttacaggctgggtacttagtacgtgccaaattggtgccaacgcggggggtggttagatgtcgaggttatcaatttggtgaggggtggttattaggttgaagcgcacgttaattaatcaaattaattataaggcgtttgcttgtttgtttacgaattacgacaacgtatacagtacgaggagtactatattttcttctactgtttttttttttctggcttggattcatttagcttggatcaggggcgtttccatgtttcaccaagttttggatgatatctgtgtaacacactgtatgtaaaccggtctagtatagtatttgtttaagaggtgaatggaaatgttgcttggaattcggctat

SEQ ID NO: 12376 - DNA, 1447 bp, Oryza sativa
  ref <308>: DATABASE ACCESSION NUMBER: AK109724
  ref <309>: DATABASE ENTRY DATE: 2002-08-28
gggtcgcgtcgcgtgggctgcatgcgtcggtcgctcgcgccgcggcggcgcgcggcggaggcggcgatggcggcggcgcgcaacccacgaaaccctaggcgccgcggggccatcctcgccgcggtcgcccccttcctcgccttcgccgactacctcaggctccgcctcgtcgaccgcgcgtggcgcctctactgccgccgcgtcggccacgccccgccgcccttcccctggctgatgctccccgagcgggagtcgccgccgggggcgggggcggtggcgcgccgcgtgttctacgacgtgcccggcgggcggtcgtacgggtaccgggtgccctcgagggacatgcaccggtgcgtcgccacggggcacgggtgggtcgtcatggtcgccgtggacgcgccgcgccgcgtgatgctgctcaaccccatcaccggcgaccagaggatcgtggcgtggccgttcgccaggtggaacgcgcggttccacgccgtcctcacgtcgtctcccgccgccggcgaggcggggtgcttcctcgtggtggtcgcggacaggctcctcgccttctgccgccccggcgccgacttccaggggtgggagacgctgcgcgcgccggggttccgccaccacgcggccctcagcgacgtcgtcgccgtcggcgccacggtgtacctcgtcgacgagcggaggcggctgtggcgcgccgatctcgcggacgagaaccccaaggtgcagcgcagggacacggggttcgcgctcccgtcgctcgagctgaggcggcactacctcgtggagtcgctcggccacgtcctcctcgtgctctcggacgagcgccacaaccgcgtcgcgctctacaagctcaactgggacgcgagggcgtggctgccgatcgccgcctgccccggcgagcgcgtgctgctgctcggccgcgggtgctcggcggccgtcccgccttcctccgcggccggccgcgccccggggaccgtcctgttcgcgcaccagccgtcgacgctgcccgacgtggacgtcgccgcccgtggccaggcgtggttctggtcggagtcgagggtgggcgcggcgccgggtgatctgctggtgctgaagaagacggtgccgcaccgccatggcgagttccccgccgacggcgactcgttctggttcttcccagcagttgatccggatgaggacgcaaggtgaaaagcttcgattttttctcttcatgtattgtcaagcagctcaagcaaatcagggtaaagatagtgatagcatcatgactcagatgtgcatggtttagctctttagcctcttacagagtttacagttcagtgtcatatatgagtcctgcttctgcaattgtgatctcaagtgctaatcaattgtgtagagcttttgatactgttgtagcatgttaatctgcttctgcaatgcatattctctcgctttttttgtt

SEQ ID NO: 12377 - DNA, 2279 bp, Oryza sativa
  ref <308>: DATABASE ACCESSION NUMBER: AK109725
  ref <309>: DATABASE ENTRY DATE: 2002-08-28
aagcgaaaaaccgagtttgtatactcgataaattaagtgccccgacgatggccagtgcagcaggtgcaggcgtgcaggccacacagcgcgcactgaaacgtgttcagcacctcgcgggccagctcgcgcagggcgccactgccgcgagtgctacgatcagcacggcgctggtcgctgcagcaggtcatggcaccgacaagaaaactgcctccaccccatcggagccgtcgctggtgccggcgccggccccgcagtcgtcacgtgccgatcacgccaaccagaaaaacggcggtctgatgatcgccaaagcgctggccgaacagcacgtgaaatacgtgttcactctcacgggcggtcacattgcgccgatgctcgtcggttgcaacgcgctgggcattcgggtggtggacgtgcgcgacgaagtgacgacgtgctttgccgccgatgccgtcagccgtatgacgggcattcccggtgtggcaatggtcactgccggaccgggtctgacgaacacaatcacggccgtgaaaaacgcacagctcgccgagtcgccgctgatcgtgttcggtggcgccacggccatgatcttgaaagggcgtggtgcgttgcaagacatcgatcagattgcgctcatgaagccgcactgcaagttgtgcatcagcatccggacggtgcgcgacatcatcccatccattcgccgtgcgtttcgtgtggcgcaggagggcgtcccgggccccgtgtttttggaaacgcccattgagattctgtggcccgagagcctgttcacggagatgattggcggcagcggcgacaaaaaaaagagcccgcgaagctgcagctgaacgtggcgtcgattatggccaaagtcacggaattctatctgaagcgtcacgccgccaacgtgttccgtgacggtctcaaagaggtgccgccgctgctggccacggccgtgccgccacaactgcccaatccggctgcggtcacggccgtacatgcgatgctgttgaaagcacagcggccggtcattgtcattggcagtcaggcagtgcgggcgaccggggtgagtgcattggccgcggctgtggagacgctgggggtacccgtctacctgtcgggtatggcacgcggtttgatgggacgcggtcacccgctgcagatgcgccacaaacgtggtgtggcgttggccaaagccgatttcgtgctgttggcgggtgtgcccatggacttccgcttggagtatgggcgcggcatcaacaaagccgcatacctgtgtctggtcaacctctctgccgacacgctcaagaccaacagtgacctgcgccgtgcgaacgcgcgtgtgttgggcgatgcgcacagcttcctcacgacgctctcgcagctcgccgctgccgacaagaaacagtgggcggagtggatcaagttcctgacggcacagtgcgccaaacgcgatgccgaaatcgacgccatgatcgccaccgaaaccaaagccaaacccgtgctgggccctgccaaaccgggtgcagctggtgccggagaggccaagacgtttgtgcatccggtgtacctgtgcaaacagatcgacctccacctcgcggacgatgccgttgtggtcggtgacggcggtgacttcgtcggcactgcggcgtacgtggtacagccgcgcggtccgctgcagtggttggatcccggcgtgttcggcacattgggtgtgggcggtgggtttgcgttgggtgcacgcatggctcgccctacggccgaagtgtggatcatctacggcgacggtgccagcggttggtcgttggtggagtttgacacgtatgtgcgcatgcggttgccggtgattgccgtcatcggcaacgacgcgtgttggtcgcagatgtaccgcgatcaggtacggctgctgtcggatgatgtggccacggaactggcgtatacgcactatgagacggtggcggaagggttcggtgcagtgggcattttggtcacacgcaacgaagatgtggcaccggcactgaaacgcgccaaagagctgttccgtcagggcaagccggtgctcatcaacgcgctcatttcgcgcagtgcgttccgtgagggctccatcagcctctaatatgcacgtcccgtcgccgtcccgtcaccgccgatccgaaccgaccgccttggcctgccgccggccaccgtttccgtgtcgctctgcgtgttttcctccgtccctctgccgtgttctctgctgctgttcgtccgtacgttcaacccgtttgcaattgcgccatcatatc

SEQ ID NO: 12378 - DNA, 1381 bp, Oryza sativa
  ref <308>: DATABASE ACCESSION NUMBER: AK109726
  ref <309>: DATABASE ENTRY DATE: 2002-08-28
attcgggtgaaatccaattttgaggaccacgacgcgaaatcccaattttccccaccagccgccgccacctcggccaatgcgccgccgcgccggtgctgctctgcacggccaccgcgcgcgtgaaccgttgcctcgcctcgatcggtctcgcccgctccgctttcacgccgccacccgcaccttcgctcgatgagggttagagcctctccacctcccttcccccaatcccaatccgctctcgcgtctcactgcgcatcatggccggattggcggtggctggccgctcgcttgacgaggcgttcgaggtgaccagcgcggtggacaacatcggcgcctgggggtggctcgacgtgcagggatgtcggcggagtttgaagcggctgggcacccgatcgagcatgaggcgagcatggctggaccgcgccgtggactcggagggcaaggctcacgcgcgcgacatcgtccgggagatcatctcccgcggcacggatgattggatagtgcggcggtgaacatggagtggggcgatggccccgacgccatctccgccgccaccgacgagctcgaccaaagcgcgcttgggtggcggagcgcgacctgccccccaacccccacccacctcacctacatcgacggggcggcgtcgcgttcgtggccgctccacgccaggcagcacacggtggtcgccgccggctacgacgtccccacgggcgcgctcgaccatgcgtcctctcgccagccgccactcggcggcatgcgccgctatcacttcaagttcaagctgctatcgttcggggtcagagcggcggatgttccacctgtcgatgaagatggcggcgcctggggatgaacaagcatcgacggcgacggcggcggcggtggtggcggcggcggcggcggccgacgcggtgggggacagagagggtgtgggtgtgtggatcggctgagcgagcccaacatgctcgtttagcccggcccagttatcaagaagaggggcaccagatgcgcccaatcccaagacaaccatttttcccaaggaaaaaaaaaggaaaggaaaaaaaaaacaatcgtcttcaagcttcgggttcccgctcagcgcggcagcggaaccaagccgagggagctcgactcatcgacgatcacggtgtccagtactttggaagaatcagcctatcctgcccgcacccgccatctagtttctggaggatactattccgccgaggataatttgctgaccttgttgctgttggaggaagtatcttagtgttgataatgggcaggcgcaaaaagaaaacaccagctctcacaccgagggtatgatcgtcgatcactttttttctatctcctgtaatttacggtctgctaacgaattgatctaccc

SEQ ID NO: 12379 - DNA, 1935 bp, Oryza sativa
  ref <308>: DATABASE ACCESSION NUMBER: AK109727
  ref <309>: DATABASE ENTRY DATE: 2002-08-28
tctttatttctgcatctactacacatctctctcatcagagagcaagcatgcatccatccatgcatgcctagggtgacagttctgcatgtctgtgtcctgtactaccatttgtactgtgcttcttcagatttcaaactcccatgcaaatatatgcatgcagaaaaaaacactcatgcacagtagacactagcgaaaggcaaagacactgacagactagctaattaagcaggcaggcagctccaatctcttgtaagaacaaaacttgtgcattgcatgcatgcatatatgcagtataggatgatccaggtaggggacacaaataaaattaaacactgtgctacataatactggtagtactgatcaaggggggtcatgatgaacagggggacttttttctcctcctccaaacttgcagcaaagccagtcctcctgttgtgggtttttgatcagatccatatcaattgtccctctgatggccctatcaggggggttgcacaattgttggtggaatcttgcatacaacaactagaacaagacaagggcaacttcattggccttgaccagaggagaaaaaggctgccccttagcttaaatagtggcaagcatggacaagccacttggcagcaactagcacagttagactgatgtggccttggtttccaacagctctgtccatatacaagctagccagtccctccccattgatagtgtcatttctagctgctacctaactaaataaacttagctagattccaatcacttcatggttaaattaaattaatcatgttaataactatcttactggcatattatcttagtaaatgctcccttagctagactaccatttcatgacaatgtgctgcaatattgctactcatgtaacttgttaactatcttaatggcatcttatcttaatagcaaatacttaactggagtaccatttccatgtcaaatgtgatgctaatattgccaatggtaactagttaactatcttaatggcatcttatcttaattagcaaatacttaactgaaccaccatttcatgtcaaatgtgctagctaatattgctagtggtaactttgttaactattttaatggaatctgatcttattagcaaaaactccattcactagaccaaccattaatttcatgtaaaattttctactaattgattgctatgggtaattaactagtataacttgtttaactgacaagatgaagaatgcatcacatgcgcattgatttgtactgcaggaagtcccagtcaccaggagagcagcagctgcaggatcttcagagcggttggcctcctcattacctcgcatcatctgaatctgatcacctcctgatggagcaaaggttaatgcaggagatatggaagggtgcagcagcagcagcagcacacgatcaccatgatcaagaagcagccaccgccgctgctctccatcacgatcagcacgtccgccgtctcgaccacatcgtcgccggccggccaccgccgccgccggcgtcgagcagcagcggcggcggcggcgacacgatggccagctccctcgactggctgctggcgtcgcggcggcaggagcagcacaagtacggtgaccgccactacgacgacgacgacggcggctactacacggcggctcaccgtggtcaagctgcggcggccatgtcggcggcggcggcggcggcgagcggcgtagtgaaggatcgtcgaccgagcctggagatgagcctggggaggcaggggtgggagatcagcatggagcagcgaagcagcgtggagtactcttccaaggagctaaccctcctcaagtgcttgtgaaattgaattgattgattggttataaatcttatggcttttcacttaattattattattattattactattattagtggttgaattaaattaatggtcagtgtagtgcagtc

SEQ ID NO: 12380 - DNA, 2206 bp, Oryza sativa
  ref <308>: DATABASE ACCESSION NUMBER: AK109728
  ref <309>: DATABASE ENTRY DATE: 2002-08-28
aactacctttcgctggtggtggtggtggttggggaggaattgcccccgtgctttgctcctcctcccatggagaccccgccccccgaccccgtctcgcctccgccgcccgccgccgacgagggctcgccgggaggcgacgacggggcggaggacgcgggggggttcagcgccgggctggattcgctgtggacggccctgttcggctccccggaggagctggagcccatgtggtccccgccgagggggttcggcgtgggggccgagttcgccgcggcggaggtggagcccgagatcatggacgtcgcggggggcccatgggacggcgcgccctggaggtcctccggggtcgtcgccggcgagggcgcggccaccgcgctcgttccccccacggccgccgcggggttcgcggagttcgagcccgcggcgccgatcgattcgtatccggcgggggcggcggcggcttcgttgggcgacgttcctgaggtgagtgcgctcgattccggcgttgattgttcgcctgacccgccgccatcgtcgtctcctccggtggattttgatgcgcgggggtttgaccccgtcgccgactccgccccggcgatggagtctccactaccgccgtctgtcgcttcctcggaagccaatttagacgggagaatgctcgattgtacgctcaactccgtgccatcgccacctcttgcttccccatatgaggtcggtttgggggctgaggatcctatcaaggattcttccccttcggttgcttggggaacaaccatggatgcgaaggatcccgaggtggatgctacttgtgcaaatggtacagctctgcggagatcacggaggatcatgaaaatcaagtcagcggcgagctccatgcctttgaatcagaatggagactcatctagagcttccaagcgacgagttgcggattcaaggaagagtagaagcagtgaagggagcaaactccctgcgttcacagggccaatttcagtaaacacagttgatttgattaacggggtgaaggttcaaggattgcaagaaattgttgccgtggaaaacgtaagttcctcttacgacaataatcagaaagcaggtggtctctacaatcaggttgtggtggctttaccagcagcgagtaatagtttgttgaaagacaaaggagcttctgttcttcctcgaaggaagactaggttagcctcaaaggtattggtgaattcagacagggtgtcagctatatcaccagtggtaaatggtggacctcctgtgcagaaatcagatgtttgtatacctactaaaaagcataagcttgctgttgaagagtgcttgacaagtctggatggagtggatggtggtggtattgtgttgtgcaactcaaagttgaaaagtgcaaaatcacgggtggtcagcaagacgcctcaagggagaggaagaagatcccctcaacctccaaagacacagagggccaggacgttgtcggttaaatacttggaaaaattaaagagggcagaaaacaataataataatggctcaatgtccaaatcaccaagagttccaatgataccagaaaataatggctcaatgtccaaatcaccaagagttccaataataccagaactgagcactaagcacgaacttgttttggacaagcacatggttgattcagtgatgttggaaacggacgatggttcctgtttctttgtgggggatgcagttcctgatgatgaggctaggaagcagtggcctcaccgttacgaaataaatgatcaaatcatgaaaaaggtatgcacgtgatttggctggtttgctgctctctgcatgacttcatcgccatatttctgtagcaatataacaataagatgtggactattgcagattagttaaatagatatacaagtagatcatcttcatatttccctaggagtaggagttctctttgaaatatctattcatgtctttgtcacggaagtacatgcaatacaatagtgagaactgctgattcgtgcagatacaattcagggagtagtttgtattcctaacaataatgttcaagcatggaaggaagtgtcagaaagcatagatgtgaaatgggtaaacatgtaattgtttgcacattcattttactatagtacatgttagaacataaaaattgtatggtggatataaatacaagtatatgactatattaataaacttgtttccatcgatc

SEQ ID NO: 12381 - DNA, 1495 bp, Oryza sativa
  ref <308>: DATABASE ACCESSION NUMBER: AK109729
  ref <309>: DATABASE ENTRY DATE: 2002-08-28
aaatcgtgagaagtgaacataagtttactagctggctctggtacagaaactagagatttaccttgggtgtcgcctggctaatcacgaaatattgtgttttttgcactttaaactggcctgttcaacggcttttcttgttttgacaccgtttgttgccatatggggcctaaaaacaaatgtgaggctctactgtgagcgctgtactttttgtatgaagtgaagcaagatacggagaacaactttcatactgatgatgatgttcatcgagaccacttgccacacacagtacatcacgagagctgctgcagattcatccatcagaacatccatcaccatcagtacagaggtgcaagcttgaccatcaccagacacactgtttgccaccaggtccagcaagagcaaaagcagaggccaccaggttatagctggttcagttcatcagttcaggtgtgctgctcccgagtccaaagtccaaacacatacggcaggtagcccgaggaggtcagcgcagaagcacgaagcgaccacgcacccgacggaggacatgcacggtcatcgtcggccgccggctccagcgtcgccggcggtttccgccgccgctggccgcggcgtccaccatcgtgagctcgaagaggcagacgtcgtgggcgacgagacgattgtcgccggcgaactgacgccagccggcgccgtagaagccgcgggtgttctgccggtgcacgaacgggacgtgccactcccctcccctgctcgccctctccagcaccacctccctctccaccgcccccagatacttacccgcgaactccggcgacaccccctgacatcaaaacaaaagcagcaccaatttaaattttccctatttcagccaagaaatgaaactgcaatgttgcaatgcaatgccatttggtatgtgcagtgtgtgcaggaggaggagacacgagcggcagctatagccggagatttaaccttgatgaagctgttcctgtggagcgtcatctccaggtggtggcgatggccattatcgccgtcgacgatcggcggcgtgcggcggccgtttctgcctccttgttcagctccggcggagttctccgctctcccgaatccatggctcccgacgaaatgcggcgacgccttctcgcagccggacggatcaaagatgagcacatcgaaggaggaggagacgccgctgtacctgaagagcaggcagtctccttcctcgatgccgttgccatccacgaactctttccagccaggctgaagaactagttcaccggcgtcgctgttggctactccaatgctccaggtttcgccgctaggagatctcagattcacttcctctgagatgtgcccgttgaaattgtttgcaaatctagcaggcacggtctgcagcaatagcaggttgactgattcaggtttttttttttttcatacttcagttctttctgaggtacacagtgatatgaatagagagattcgtgcatgaatttacttt

SEQ ID NO: 12382 - DNA, 1918 bp, Oryza sativa
  ref <308>: DATABASE ACCESSION NUMBER: AK109730
  ref <309>: DATABASE ENTRY DATE: 2002-08-28
tgctccgcccgcttcttcgccgccggcttcctcccacccgcaacccaacgccggcgcggcggccgtggttggttaccctacctacgctactacacgcctcaggggcaatggaggctagagcggggctggcgatgcagtcgcgggcggctgtcggggtcggagctggccccggcgtggggcggcggggccgcgccgtgatccgcgtggggaagcggccaaccgcggcgagcctgcgggtcggaggccccgccggaccggcggcggccaagcccctcgccccgctgtactgcctcaaggcgtccagaggtgattcatctgttttttttttcttcttttttttttaactcccttgcagcgggcgattccggggttgtgctcgtgcgagcacggtgtcgttagggttaactttggcgcgattttgtccgggattttttttctcttcgagcggatgcggatccctctggtatggtattcagtgtggatatatgggttcgtcgtggtagccagatttttgcagttttttaattggattgggggaagtggtcactttcgtggtgatctggagtaaatgtgacaacttatgtgttggaaatggagttgttcagggtaggtgatggctttgctgggtcaaataggaaagttggatggggcaatttcaatgaagctctctctctctctttgttaggtgggttggaaggggttaaatttcagtttgtagaagtgtgtattgttacatgtttttcttggtatcaacctgctatttacttcaaaaatggtcaacattttgtaacaaatacactactacaaataacctctgatgatcacaccaacgttggattgtctatgcaccttgtatcatttcttgttgtgatttcttacccgatgtagtcttctattttaggtagttgcctgacgagatgtatatgctaaattttgcttgtgttcagctgaaataactttctttgtaatcttgtatcgtacaggccacgacagcttgcataactcagttgatgaagccctcctgttaaagaggaaatcagaagaagttctattctacttgaacggacggtgtatttatttagttggaatgatgggctcagggaagagtacagttgcaaagatattagccgaagttttgggttattcattctttgacagtgataagttggttgaacaagcagttggaatgccttctgttgcccaaatattcaaggagcacagtgaagcgtttttcagagataatgagagtagtgtcttgagggacttgtcctcaatgcgacgattagttgttgcaactggaggtggtgccgttattcggccagttaactggaaatatatgaagaaaggtctatctgtctggctggatgtgcctttggatgcacttgcaaggcgtattgctcaagtgggtactgcctctcgtcctcttctggatcagccatcgagtgatccatacacagcggccttctcaaaactcagcatgcttgcagagcaaagaggcgatgcttatgcaaatgctgatgctcgagtttctcttgaagaaattgcaactaaacaaggccatgacgatgtctccaaactaacaccgaccgatattgctattgaggccttactcaagattgagaatttcgtcaccgagcattccacatcaagtggcccagttggggacttaatagttgattcccagaatcgaaggacaaaggccttgtagaattttgccctctttttttcttcttttggtgtatcctgtatttgtagcatgtgctgtttaacattatattgatttattctttatatatccaaaagagagataaggcaaagcttgttccccttgtaaaaatagaataacgaatggagctgacgcgagatgttccacaaattttcgttctggaaataagaatcgttgcaatatcgtttgccc

SEQ ID NO: 12383 - DNA, 1516 bp, Oryza sativa
  ref <308>: DATABASE ACCESSION NUMBER: AK109731
  ref <309>: DATABASE ENTRY DATE: 2002-08-28
acgcctcctagctagttcgagcatcccacgtcgagtcgccgaggccgcgcgcgtcctctcaagcggctaacccccgcgcgcgccggcgcttctccccttcccgggcctcttcaaaaatccccgcgccgcgtagccgatcacttgtcgcaccaacatggaggaggacggcggcagcgacgcgcgggtggtggagtccatgcagcggctgctcgacgcggtgccgcccggtgccgacgacccgtacaccatcttccgcctccccgcggccgtgcgggagcggcaccgcgacctgtacgagccaaagctcgtgtccgtggggccgtactaccacggccgcgacgggctcggcgccgcgcagcgccacaagtggcgcctcctccgcgacttcctgtcgcggcagagcgacgacaaggccgggctcggagcctacgtgcgcgccgcgcgggcggtcgaggccgacgcgcggcagtgctacgcggaggggttcgacgacgtgggcgccgacgagttcgccgagatgctggtgctcgacggttgcttcctgctcgagttcttcctgaggaagagcgaggggcagctcgcggcgcccgggggcgccaagtgggcgtggcagcacatgtaccacgacgtcctcctcctggagaatcagataccgttcttcgtcgtcgagaggctgcacggcgtcgcctttgccggggacgatgatggcgccgccgaccgtgacgcgctcctcgacatcttctgcaaggcgttcgccggcgacctgccttcgagccgcgtcatacggccgccgagcgacaagaccatccaccacctgctgcacctgcactacgagtgcaacgtccgcaacccggccgcggacagcgacaaggcgcgcaacggcggggacgccgccaacggcggcgcgtcgtcgctggccatctggaagcagccgcccgtcccgtccccgcgctccagcgacggcgccatcaaagggcggatgacgtcgatgatcccgccggcggccaagatggaggaggccggcgtgacgttcaagcggaaggccaccccgcgcgacgtgttcgacatgagcttccggtacggcgtgctgcacatgccggcgttcgtggtggacgagggcgccaaggtgctcctcgcgaacctggtggcgttcgagcagggcggcggccgcgcggcgcggaagctggaagggggcaacctggcgacggggttcgtggcgctgctgggttcgctggtgaactcgcggcgggacgtggaggtgctccgccgctgcgggatcctgcactgcatggtcaccgacgaggaggccgtggcgtacttcagccacgtggtgcagtacacgaccatggactacgaccggcacctgctggcttgcctgttccgggacatccgggagcactgccactggaaccgatgatttgggtgtttcatcccaatgctgcttggctggttgctatacgattgtcttcatagatttccttttactgaacgatacctcgatcataatttgcctttt

SEQ ID NO: 12384 - DNA, 1258 bp, Oryza sativa
  ref <308>: DATABASE ACCESSION NUMBER: AK109732
  ref <309>: DATABASE ENTRY DATE: 2002-08-28
cccctcccttgccctagctggctagcctcttctcctccacacacgcgccgcgacgccagcgacaccgcgccgctacatgatcgatcgacctcgagctcgtgcctccctacttgcacaaaccaacaagccgcgcgccaccacacagcccaggactccaggagtggtggtggtgctaggtagctagctagtagtagtttttctttagctagctagcttgggcgcgcgcgcgcgcggcggcatgtcggcggcgtcgggcgccgcgtgcggggtgtgtgggggaggggtgggggagtgcgggtgcctgctgcatcagcggcgtgggggaggcggtggtggtggaggtggaggggtgaggtgcgggatcgcggcggacctgaaccgggggtttccggcgatctttcagggggtgggggtggaggagacggcggtggaaggggatggaggagcccagccggcggccgggctgcaggagttccagttcttcggccacgacgaccacgacagcgtcgcgtggctcttcaacgacccggcgccgcccggcgggacggaccaccagcttcaccgccaaaccgcgcccatggcggtcggcaacggcgcggcggcggcgcagcagcggcaggcgttcgacgcgtacgcgcagtaccagccggggcacgggctcacgttcgacgtgccgctcacccgaggcgaggccgccgccgcggtgctcgaggccagcctcggcctcggcggcgccggcgccggcggcaggaacccggcgacgtcgagcagcacaatcatgtccttctgtgggagcacgttcactgacgccgtgagctccatcccgaaagatcacgcggcggcggcggcggtcgttgccaacggcggcctgagcggcggcggcggcgacccggcgatggaccgggaggcgaaggtgatgcggtacaaggagaagaggaagcggaggcgatacgagaagcagatccggtacgcctcgcgcaaggcctacgccgagatgcggccgcgcgtgaagggccgcttcgccaaggtgcccgacggcgagctggacggcgcgacaccgccgccgccgtcctccgccgccggcggcggctacgagcccggccggctcgacctcggatggttccgttcgtagctagcagcctagcactataatagcagatcattatttctctctttgtatacgtactctacgtacataggccaagcatgcattgactagctaggctattggttgaaaagtttaaggtttaattaaggt

SEQ ID NO: 12385 - DNA, 1791 bp, Oryza sativa
  ref <308>: DATABASE ACCESSION NUMBER: AK109733
  ref <309>: DATABASE ENTRY DATE: 2002-08-28
aaagcaacagcagcagaagtgcacttttgcattctatttccaatcaatccaagaggctagagctagcggccaagatcatcgtcaccggcggcatggactcgtcgacggtgggcgctccggggagctcgctgcacggcgtgacggggcgcgagccggcgttcgcgttctcgacggaggtgggcggcgaggacgcggcggcggcgagcaagttcgacttgccggtggactcggagcacaaggcgaagacgatcaggttgctgtcgttcgcgaacccgcatatgaggacgttccacctatcatggatctccttcttctcctgcttcgtctccaccttcgccgccgcccctctcgtccccatcatccgcgacaacctcaacctcaccaaggccgacatcggcaacgccggcgtcgcctccgtctccggctccatcttctccaggctcgccatgggcgccatctgcgacatgctcggcccgcgctacggctgcgccttcctcatcatgctcgccgcgcccaccgtcttctgcatgtcgctcatcgactccgccgcggggtacatcgccgtgcgcttcctcatcggcttctccctcgccaccttcgtgtcatgccagtactggatgagcaccatgttcaacagcaagatcatcggcctcgtcaacggcctcgccgccgggtggggaaacatgggcggcggcgcgacgcagctcatcatgccgctcgtctacgacgtgatccgcaagtgcggcgcgacgccgttcacggcgtggaggctggcctacttcgtgccggggacgctgcacgtggtgatgggcgtgctggtgctgacgctggggcaggacctccccgacggcaacctgcgcagcctgcagaagaagggtgacgtcaacagggacagcttctccagggtgctctggtacgccgtcaccaactaccgcacctggatcttcgtcctcctctacggctactccatgggcgtcgagctcaccaccgacaacgtcatcgccgagtacttctacgatcgcttcgacctcgacctccgcgtcgccggcatcatcgccgcatccttcggcatggccaacatcgtcgcgcgccccaccggcggcctcctctcggacctcggcgcgcgctacttcggcatgcgcgcccgcctctggaacatttggatcctccagaccgccggcggcgcgttctgcctcctgctcggccgcgcatccaccctccccacctccgtcgtctgcatggtcctcttctccttctgcgcgcaggccgcctgcggcgccatcttcggcgtcatccccttcgtctcccgccgctcgctcggcatcatctccggcatgaccggcgccggcggcaacttcggcgccgggctcacgcagctgctcttcttcacgtcgtcgaggtactccacgggcacggggctggagtacatgggcatcatgatcatggcgtgcacgctgccggtggtgctcgtccatttcccgcagtggggctccatgttcctcccgcccaacgccggcgccgaggaggagcactactacggctccgagtggagcgaacaggagaagagcaagggcctccacggtgcaagtctcaagttcgccgagaactcccgctccgagcgtggccgccgcaacgtcatcaacgccgccgccgccgccgccacgccgcccaacaactcgccggagcacgcctaattaagaggccaagttaattaattatgcatgcatgtataaactgttgaacgttttgttaccgttttctttatactatctagagtatgtcgtcatggag

SEQ ID NO: 12386 - DNA, 1535 bp, Oryza sativa
  ref <308>: DATABASE ACCESSION NUMBER: AK109734
  ref <309>: DATABASE ENTRY DATE: 2002-08-28
gtgtctcgacgtagttggctctgagctgctcgccgaatggacgtaggtcgtcggggacgaggagctcgtcgtagagtgcggcgatgccggggtcgcccttggcgaagaccatctcgaggaggtcgatggtgacgcggaagaagggccactcgtcgtacatctcgcggagcgtggcgaggccgccaccggcgtcgctctgctgcatggcgtgcctgaacgcggcgccgaagcccagccacacggggaggtggaaccgcgtctgcgtccacgcgaagatccacgggatggcgcgcagcgactcgatgccgccgccgggcttccgcttcgacggccggctgccgatgttcatccgcccgtactccgtctccggcgtggcggcgcggaagtactccacgaagcgcggctcctggaacacgatggagcggtactcgtcagtggccaccgtcgccatgtcgtcgagcaggcggcgccactcgggcttcggggacaccggcgggttcatgccgtgctccagggtcgccgccgtgaacctctgcagcgtccggaagcagaggttctcctcgccgaacgacttctcgatgacctcgccctggacagtcacgcggagcgagccattgacggtgttcggcggctgggacaggatggcgaggtggctcggcccgccgccgcgccccacggtgccgccccggccgtggaagatggtcagcttcacgccgtgccgctccgccacgccgacgatctcctcctgggccttgtacagctgccacgccgcggacagccggccggcgtccttgccggagtcggagtacccgatcatgatctcctgcttcccgtcgatccgctccttgtaccagtcgacggagaagaggagctccatggtggcgcgcgcctgctgaaggtcggcgagcttcttgaacagcgggacgaccctcaggggcttcttgacgccgcactcccgctgcagcagctcgacggcgagcacgtcggacggcgcggtggccatggagataatgtacgcgccgaagctgtcggcggggagctcggcgatgacccggaacgcgccgagcacgtcggcgacctcctcggactgcggcaggtcggggccgaagagcgggcgcctgccgcggagctcggagacgagccactcctggcgccgctcctcgggccactcccggtaggagccgatgccgaggtgcgtggtgatcgcgtccatggcgtcggtgtggcgctccgactcctgccggatgtcgagcttgacgagggagaggccgaaggtggagacctgccgcattaagtcgagcagtctgccgtcggcgatcagcttgtcgccgcagtcgcacagcgatcggtagcacagctcaagcggctccaagaactgcagcaaagttcaccaagtataaacttcatatggtttagagaagtcacatttagaatgcggggaattttttccccgatcaataaagaaactaaactactttctgtatattttacagagaaaatcctgagtttcaaacactgtgatagtttttgagctt

SEQ ID NO: 12387 - DNA, 1622 bp, Oryza sativa
  ref <308>: DATABASE ACCESSION NUMBER: AK109735
  ref <309>: DATABASE ENTRY DATE: 2002-08-28
atcatctccccggcacgcgccacacgcgtatgtaacgcaacgcaccgcggggactcgcgcggctcgaccacatcagtcccaacgacccccccccccgggcctcggcagcggcgcgggcagggatggcaacggccgcctccgcctccgcctccgcctcccccgccgcggcgttcggcgccaaaacccgacgcccgggccccagccccagccccagcccgagccccgcatccgcattcgcgaggccttccccccgcgcctcggccgccggcaggctccacgcaagcctccacctcggcggcgcgagcgccacgggcagcagcatcgtcagcaacgccagcggcatccacctggcggcccccgtgctcgcgccgttggccgtgccgaagatgaccggcgccgtcggggcgcacaagaacgtcctgctcttccactgcgaggagatgcgggagctcgccgagcaggtggtcgcccggaacgacgacatcgagctgcgctccatctcatggaggacatttgccgatgggtttccaaatttattcatctcgaatgcccacacaatccgcggacaacatgttgctttcttagcatcatttagttcgccaagtgtcatatttgagcaactatcaattatatatgctctgccaaagctgtttatttcgtcattcactcttatactcccatttttccctactgggacgtctgagcggatggaagatgaaggagatgttgccacagccttcacacttgctagaattttgtcaaatataccaatatcaagaggcggtccttcaagtctagtgatctttgatattcatgctttgcaagagagattctactttggagactcagtcttgccatgttttgagagtggcattcccctactcaaaagtaggcttcaggaactacctgattctgacaatataaccatagcttttcctgatgacggtgcatggaaacggttctataagcaacttcaacatttcccaatggttgtatgcaacaaagttagagaaggggaacagagaatagtacggataaaagagggggatcctagaggccgccatgttgttatagttgatgacttggtacagtcaggtggtacattgattgaatgccagaaagtattggcagagcatggagcagcaaaggttagtgcatacgtgacacatggcattttccccaacaagtcgtgggagaaatttcagcctgataatggagagggtccgggtcatgggctaagccacttctggattactgattcatgccctctcactgtcaatgcggtcaaggacaggcagccgtttgaaattctcagtctggcaggacctattgcttctgctcttcagatttagcaaattcactatgtttgcttggccaaccgggatattgtttagttcattcttcccccacattttcaggctcttggatttttttctctttctagaaaggatatgttcttaatgtttattgaaacctcaggtgaaaattccatgaattggttaaacggcaaggatattcataggatagtttgcttaataatctgactgaaaagaagtcaacgagtcgagctatgttctataaataaaactgtccaataaactttctgctgagttttctcttgc

SEQ ID NO: 12388 - DNA, 1563 bp, Oryza sativa
  ref <308>: DATABASE ACCESSION NUMBER: AK109736
  ref <309>: DATABASE ENTRY DATE: 2002-08-28
atctctccggcgcgcggctgaggatcccgacgtggtgcacaatgccgcacggttcttggctcctgcagacgtgctcgccgtcggccgcgctcgcgtcgctggccgtcgtcacgactagcctgctgatcatcggctacgcgtcgagctccttcttcctcggcgcgccggcgtacgagtacgacgatgttgtcgaggcggcggcggccgtgccgaggcgggggcccgggtacccgccggtgctggcgtactacatctccggcgggcacggggacagcgtgcggatgacgcggctgctcaaggccgtgtaccacccgaggaaccggtacctgctgcacctggacgccggcgcgggcgcgtacgagcgggcgaggctggcggggtatgcccggtcggagcgggcgttcctcgagtacgggaacgtgcacgtcgtcggcaagggcgaccccgtcgacggccgcggtccgtccgccgtcgccgccgtgctccgcggcgccgctgtcctgctgagggtcggcgccgagtgggactggctcgtcacgcttggcgcgtcggactacccactcgtcacgccggacgaccttctctacgccttctcctccgtgcggagggggctcagcttcatcgaccacaggatggattccggcggcgccgaggcggtcgtcgtcgaccagaacctcctgcagagcaccaacgccgagatatcgttctcgtcggggcaacgagcaaagcctgacgcgttcgagctcttcagaggctcgccaaggccgatcttgagccgggacttcgtcgagtactgcgtggtggcgccggacaacctcccaaggacgctgctcctgtacttcagcaactccctgagccccatggagttctacttccagacggtcatggccaactccgcccagttccggaacagcaccgtcaaccacaacctccggcacacggtggcgcaggacggcggcgcgccgacgtcgcagggcgcggatgggcagcaggcgtcgcggtacgacgcgatggtcggcagcggggcggccttcgccggggcgttcggcgacgacgacgacgcgctgctgcagaggatagacgaggaggtgctgcggcgtccgctcgatggcgtcacgccgggcgagtggtgcgtggccgacggtgaggagggcacagacaacgagtgctcggtcggaggcgacattgacgtggtcaggcacggcgccaagggacggaagctggcgaccttggtggttgacctcgttggggcctgaccgtgtgacgggtccaacagttcagagaaaacgagcaatgagatgacagatgagcggcagaggaacagtttgatgtttcactgctcaaagaacaactagtgcaggccaagtgcccctaaaatgcctcttcaggccagcagcccggtggttgcgtcatactttattattcacatgtacgaatgtaccatggatccaacgcatattgcattggacaaaaaatgtgtggcaaagtgttcgagacttatacaagaatacaaatcgcggctgtgctcaacttggcaggccgccatttggaaaaaaaaaaaag

SEQ ID NO: 12389 - DNA, 2008 bp, Oryza sativa
  ref <308>: DATABASE ACCESSION NUMBER: AK109737
  ref <309>: DATABASE ENTRY DATE: 2002-08-28
gcgcctaatccacaccaggtgcccgacatgtgttcgacggtttgcccgtgagacgacgcgcgtcggccatggcgctcgccctcctctccccctcatcagcgagtgcccaccgtctgccgcgccccatcagctccccgccgctcgggcgcgccgcctcggccaccagcatcggttcctccttcttccccctctgctcctcccctccgtcctccggctcttgctccttgcggagggccagctccgcgggcggcgcaagcgagccagaagcgtcgggggccacctccctcgacgccgacttgctcaggcgtgtcgccggcgccgcggacgccggcgaggcgctggacatcgtcgcggagtcggcgggaggcacgggcggtctggacgcgtccgactgtaacgcgatcgtcgcggcggcgcttgaccggggcaacgtggagctagcgctctcggtgttcgaggcgatgcgatccggctttgcacgaggtgagggcatcgtatcactccttacgttttttcttttatcacgaaatgtagtgaattatgttttggattgagcgtactgagtccctgtggtgtggagtgccggcttgcagctggggcctggaggtgggcgaggccagacgtgcggacgtacgcattgcttgtccagcgattggcagctgctctgcgtgtttctgatgctcttaggataatcgattatgtatctcgcgcaggcatttcttcggcagaggaggtgagctttggcgtcgcagactagcatgtctgacgatgtgtatggtgctttgctgtttggtttgcatgcatgatgtttggatgttttagtggcatttgacaaatgatggaagctttttattcttgctttaaaaccttgatctgcaaacatgatttgtcacctaccggtacctcatcatttgtccaattactggtttcatttgtccaaggcaattcaagcttaattctaactagaaccgaatttgcagaggaatagtactaaacgtagatttctggagataggtaagtacaatcagttcatctacggaaatcctatttattatcaaaacaattagtgcaaaaggtcccaacaaggatagtcttgccatagcaatatcagtgcccctccaacgaaactcccttttggtttgatgtaacatataactttgaataatctagtcccattaatatccacaagcctggcaacaatccttatggttctgatcctgtctcaaagtattgataattctggtgcatcatactttaattttaaaaatttacataagagtgtcttgttgaatggaagtatatttgatgtagagaaaacttgagacacttctaaaggaaaacacagtgaatgaatgtcactacacttctaaatgatagattttacttgttacaggtcccatttgggatgattattcgctgtccaagctgcatggtagcagtcgcagttgcacagccccagcatggaactcaggtttgatgctgtacaagtatcttgtacctctaatctaattgtttaagctactcacttagctcgcatgatgcgatttatgaaacaaaattttacagtttgagcaaatttttagagatgacatcttaggaaaatatagattatttttaatgctgtaatggaaatcttagcattattttattactttacagactgtttcttgttcaaaatgccgatatcagtacgaactattttctggagatatcatgagcatcgagtctgaagaagttaggttagttcttggagcagttgcttggagttgtaaactgtcaatgctatgccatgatcttattcttttttcggttatatttgtagctatggattatggtgttgtttctagtaacttttggagcaatgttcttctaaaacaggtgtcctgccattaactgtggagggactccagtactaacttattttgttagaacttagaagatactccctccgttccattttaagtgcagttgtgagtttccgtgtccaacatttgacagcccgtcttat

SEQ ID NO: 12390 - DNA, 1663 bp, Oryza sativa
  ref <308>: DATABASE ACCESSION NUMBER: AK109738
  ref <309>: DATABASE ENTRY DATE: 2002-08-28
gaaagaactctctcgaagtgtctcaacagtctggctggccccgtggttctcggggatcaacattcccttcaagactcactagaactgcatacccaaggccagcatttcctggtgctatgcgtgggcgtctaccactcagaggtggtgctcggagcttacaatggatcgctcgccagagttgcccaccccctctcgtctgctccttgcccttgccattcgagggcgatcggtgctccctccgcctccggaccgccgccgccgccgccggagccctctccggggcgtccctgagattgtgtgcgccaatggcgcctcaccacattaatggccttgctgacgttcgtgcagttgcggaaatgtcacctacacttcctaccatgattattagagtaccttgtgagcagtcagccaatattcacaggctactggaatttgttgaggatcgtctggatcacggtgctcacgacttgattaaggcagaggacattccccgacttcgagctatcgcccagggaaaccttacaagtgctgatgctccccagttttgtttgtcattgctcaacgagtcccagatctacctgcgggttcaactgttctcgtcgaagtggatgattgggtgcggccacccatcgactcacgggtagtatcggcagtggctagtgcgtttcatcttccccaggatggggtgctgccttttgatctcaactcaacgacagtggccccagatggtccaggtgcaggtcgtattcatgctgaacttctgatgccaccaggcagcttgcctttaccgcctcctgttgttgtcacagtgtcagggtgtgaaccactgaatgatgcgcgggaactttatcagtacctggaggagtacgtgaatcaagagggctggatagttgatgacacacagcttgcggggcttgcagagctggctgaagctagggacgagttggtaggagctcgcgataagctcactacacttgcatcagatattggagatgatcttttattgggaggagcggtcactgatgatgtaccgttgttatctggggacttcaaagcagctttggccagggtattgaagcttcctgaaggtatggagcttcccaaggactttgaatcacctcttcttgtccctgccattgctgggagggagagaattcatggtgaactcatcaatctccgagctgacctggctgctttgaagcagcatgttgaggagcagtggctcccatgggctaatgatcgtctatcatccgctggagtcatcggagaccagattctactagacatggagtgacacgggctaataatgttcgtctcacatctctgatacattctacaagacatggactgagtcagattctacaagacatggagtgacacgggctaataatgctcgtctcacctctctgatacattctacaagacttggactgagtcgttccgtataggccacacaagaagtgagaaagacgatgtacatttcctgctgatttctaaggatcaaaccatagctgttataggagatctcccagaactgaaacctcaattgctattacatagttctatacttgcagaatgattacgatggatgcccttccaaaatttatgtggcaatagaagatgctttttagtggttagaccgaaaattaataatgttcagtgc

SEQ ID NO: 12391 - DNA, 1739 bp, Oryza sativa
  ref <308>: DATABASE ACCESSION NUMBER: AK109739
  ref <309>: DATABASE ENTRY DATE: 2002-08-28
ctctcgattgatcggttgccatggccgccgtcgcctcctcggccgaggtccacgagggcacccggagctgcgtcctgctcaacgtccgcggctacagggcggcccgccgcgacgccaccaccgccacgtcctacacgagcaacggccatcccatcgaggtcagcttccgcgccgccctcccgccggtcctctccgacttctacgtctactgccccgccctgcagctgcaagaaccagccgattatccctccatggtgcccaaggccatcgccgtcgacggcgacctcttcctcttccgtatcccgatcgaccgcgtcggcaccatgtccctcacccacaacgactacttcgtctacatggcgcggtctccccctcaccgcccgagactggatctgctcccgaacccgtcgcacgataccctgggagacaaggagatcgccatactgagctgtgccgatggcggcgagcagtacgtggtgaccgccctcaggaccatccccggcagtaaaaccatccacaggctgcatctgtaccgctccaaaccgaacggcgagcaagggagatggacttcgcagatggtgtctgtggagggaccactgatgagggacttggtgtgccccatccctgagacggtgcacaggcaagtgcaccacgtgacgagcaaggtgatcaggctgggaacaggtgcaaatggcatggtagggtgggtggatatctggcgcggcatcctcctctgcgacgtgctccaggagagccccaagctccatgacatgccgctgcctctgccggccaagagcaacagccacagggccttcctcaacaccaccgaccagtactgcggcgacgtcgccgtcagccgagacaagagcttcatcaagtacgtcgagatggagatcgtcacgcccaagatcgtgagcgccacgccaccaggtgactgtgatcctgacccgttcctcgaatggctgcgccgtcgagaatgcaaggacctgaaacgcaccttggtccatggccgctggaaggccaccacatggaggatgccgatcccggtcacctcatgggacgattggtgccgcgactgcgctgttgaatctgccgagctcagcactgacaacccaaaggcttatgagttgctgtgtgctgtgagcaaagaaagtcttaaagaggatgatgatgataaggccatggaggcggcaacgacaaccacgacgaggttgccattgggacgcctgggcatggcttaccctgccatgagcatcgatgacgatgtcatttacgtgctgacaaaacccgtcatggggaatggcaaggcggcatttctgactgctgttgatgtgaggaggaagaaggtgctggcagtggccaagcttgatagcgccgttttcatgcgttactaccttgccgttgggatctccaaacattttttcagcgctccaggtacaagagaatcacttggacaagctgaagatcatgggcagaagtcagcaagaagaagaagaagaagacgtggaaagcggcaagagtgatgctgtccagcagtgagatgccaatggtagaatattatcggcttgagtctgttgctttcatatggataatggatttgctactgctatgtgcagttctgtaacaaattctagaaccttatcatcttggtactttttttgttctttttcccttcttgcaagcttcttggagaaaacctctacaatagcttggctataaatttcagttaactatggctc

SEQ ID NO: 12392 - DNA, 1873 bp, Oryza sativa
  ref <308>: DATABASE ACCESSION NUMBER: AK109740
  ref <309>: DATABASE ENTRY DATE: 2002-08-28
cccgactccccgccgccgccggtgatggggatctccgagtccgatgagctccgggcattcgaggccaccggaatctaccgtctcgccgaatccggcgctgctttcctcgaccccgtccgcatcctcaacgcgtcctaccgccgcttccgcctcgtcccttctgcgtactactcccgaagcttcggcacgtcgcgtcagggaggcgaagcggaaaccgaacgaactggggaggcgtctccagaacggaagaagcggaagcggaagcggcagcggcagccgaagcccagggaactgaacgaagtggagcggatggcagaagctcggcaccaggaagcaaggcctttgctatcgagcgcacacaaatcactgcttaaggctaaagatctactggagttccttccgaggatgatcaaggaagatgtgcgcatgcttgatgtggaaagtaatttggagaagaatcttgttgaacttgggagctcatggcgagcgcctttatgtgagatgactctttgctttcagaagtcttctggtgaggatagtgaggaaggtatctgccataagacatccactccactgtttaatagtacaatcagtatcgaagaaaatgatgacgcagaaggagaatttcaggatagacgttatattttaccaagacgatgttgtttcttgatgactgacctcaaacatgtccgtggtctaattcctgataattacaatcaaggttacaaccttatagttgttgatccaccttgggagaatggatgtgttcgtcagaaagtagcgtaccctacacttcccaacagacatttcttgtaccttccagtacaagaacttgcccatccagctggagctcttctagttttgtggattacaaatcgggagaaactttggaagtttgttgaggaggagttatttcctgcttggggagtgaaagatcatactgtgttctattggctgaaggtgaagccagatggttcgctgattggcaatctagacttgctccatcacaggccttatgagtgcctccttgttggctacataaatcttaacaaagaggccgtacgaggttcaaaattcaagtttttggaagaaaggcgggtaattatgagtgtaccaggtgctcactcaaggaaacctcccctccagaaattactttcagaatatataccaggtcctaaacctgcaaggtgcattgagctttttgccagagagttggtttctggttggacctcttggggaaatgagccactccgttttcaggatgcaatgtacttttttaataagcaagagcatgatgtgcacagctgagtgattgctgcaagcccgcgaggtgacgactacaatccacgctttgaatacctggaggcatgctcttctctggaagtgatttttttttctcaaagtttacccatggtggaggtggatagggtgaatagatgaaggggtgaagagaactgaaatcatcaacttgttacatgaaggagatataaaggggtggaggagaaaattaacttccaggaagagatcacatgccggtctcaatacatgacggtgggatcatcggttttcaggttatgacgaagaccacaagctgaactcgtggaatacagttgctgcgctgcagtttgacctctcagatttgtactactgacgcaggcagacagagtctcagagacagtagcatatacagataacagattggtaatgaccaaaattccatccaccgctgggtttcagctcaaatacctcaccactagttcttgagcccctattctggatttggatccatcctgtaccaaacattcccgtgtcaattggtacaaaatcttgatagaatataatggtgtctatggccaaggctatttctcgtgtc

SEQ ID NO: 12393 - DNA, 1536 bp, Oryza sativa
  ref <308>: DATABASE ACCESSION NUMBER: AK109741
  ref <309>: DATABASE ENTRY DATE: 2002-08-28
ttgactcctccccctacctctcacctcccccacctcgccgtcgccggccgccgccgcctcccacctcacctcctcttcgccctctcccctcccaccccaccaccactccggcgagccatcgcggccctccgccaaaaaccctagggcaacagcgatcgccggtgcgcgggggcggcggagtcggagtcggagtcgggggccatggccatggacggcggcgcggcggcggtgctgcgcgaggcccaccgcctgacggggcacaccgaccgcgtgtggtccctcgcgtggaacccttcccccggcgccggcgccggccccgtcctcgcctcctgcggcggcgacaaggccgtccggatctggaagcgcgccgccgacggcgcatggcagtgctcggatgtgctggaggacacgcacaaccgcacggtgaggtcgtgcgcatggtcccccgacgggaagctgctggccaccgcgagcttcgactccaccaccgcgatatgggagtactccggcggcgacttcgagtgcgtcgccaccttggagggccatgagaatgaggtgaagagcgtgtcgtggagcgcgtccgggtcgctgctcgcgacgtgcagccgggacaagtcggtgtggatatgggagatgcagccaggaaacgaatacgagtgtgtctcggtgcagcaaggccacacacaagacgtgaagatggtgcagtggcaccctatccttgatgtcctggtttctgtcagctacgacaattcaatcagagtctgggctgatgacggtgatgatgagtggcactgtgtacagacattaactgaagctaataactgtggtcactcgtcaacagtatgggcattatcttttaaccagaaaggtgataggatggtcacatgcagtgatgaccatacattgaaaatatgggacacaagtgctgatttgtctcaaccaaaaactagtgacaaccaggaatcatggcgacatctttctactctcacgggatatcataaccggaccattttttcagcccattggtcaagcgaggatattatagccagtggcgcaggtgatgatgcaatctgcttatttgctgaggacaagagtagtatggttgagggaccttcatacagattaattttaaagaaagagaaggcacatgacatggatataaactgtgtccgctggtgtcctcaggacccgaggatgttggcatcagcaagtgatgatggcacagtgaaattgtgggagctgagggggaatgcactggattgaattttgttctgtttactgtattataattatagttctaggtttgtgaacgaaatgaggcgtctcctttgggtttttgttttgcttaacaatgctctgtagttgttaatacttctatcatgaacttgcgtggtgattgtcttttaacagattttccatgcaaagctatgagcatctgttatccagccataacatgaagaaattgcttgtgtatacattatggaacaacgcaagtgtgctcatatcatttacaaataagctattgaacattttgtt

SEQ ID NO: 12394 - DNA, 1801 bp, Oryza sativa
  ref <308>: DATABASE ACCESSION NUMBER: AK109742
  ref <309>: DATABASE ENTRY DATE: 2002-08-28
ctactgtggaggcgtggaaaaatacatctcgcatggaggagacgagaaggcagcggcggcgacgcaagcgcgagtgcgagtgtcaaccgcgtgacagcgcgacggcaacactgcgctctccccggcggcggcgctctcccctccgctggccaccttcccaccggtgagtatctcttcattcccctctcttctccctgtactacctagggtttggaactttggatcttggttcttgaagcctagggttcttggttctcaccggaccgtctcctacctaggattctgtcgccgcctccgtcgccgtcctcgccgtcttggaggtcgccgtcatatccgccgtcccctcgaactccgcggctgatgcctgttcttttttgttttttcgcaaaattccttttcatctttcgctgcttaattctgcttgttatgcgtatgaatcaggaatccacagattctctttaatgtcaactagtatagttggttccaatcttcaagaatcaccatttctacttgtatgtttctcagcatgctgatgttgttattagggaggtgattctgtgacggctcagtagaactctattgtgcatatgttcttctattttgatgaatcaccaatgattattttgtgtgccataaaactctattgacaaatcaccaataatacttccaatgcttttttctttggtaaaaaccacaaatgaaggtcccttggactaattaccatattacttcaatttataatataaatggaatatgcattatttgttttattatagtactttccttggttatttttctatagttcatcttcaggaatgctagatctattgttgctgcgtatggggtgaaataaaggaaatgcaatgcattgctgactttgtggggaatgggaggaagtcctgatgttttttttattaagataatatatgcaaatgtgtgcactgatattatgttagacccttgcatttgatttctctagactcctacagaacttatattattgctagtgtcagaatttgaaaagccacgcaatataaaaaatgcacataaaaatttctttgtacatgtacaggtaatctaggagccaaccatatgctcatatagaccgtgtttagttccactcaaacttcctctcaactcccaactttccataacatcacatcacatccaaaactttcctacacacataaactcctaactttttttccaaactaccaactttccccaaacttctccccaatttcaggaactaaacacagccctaattgacctgctagtaatttgctttaaaattggtacaactatatgaactggaaactttagtagtactatatactgctctaactattactggtttttagacctatatatgtgcacgctccatatccatatgtactctcattgtttcttgatatactagttaggaggacgattacaggcacatatgattctttcccccaattcagaagtacttgatattgtcctattcatatgcatgctcttgtattagaactttaggagcaggaaaagaaaaggcaagtcactgttttatttttgttagccatccaacttacagtcagcaaatatttcctatgtcatttttttgtcttaatgttattctatttcctacatgtgaacttttcaatagtatagtattgatttgatatatgcatcaatgttcttggccatcagcaattaagcaagtatatttttttctgattttttatcatcaatcacaccaaaattagaagtttggttgaaattagaacgatgtgatagaaaaattgaaagttcatgtgtc

SEQ ID NO: 12395 - DNA, 1640 bp, Oryza sativa
  ref <308>: DATABASE ACCESSION NUMBER: AK109743
  ref <309>: DATABASE ENTRY DATE: 2002-08-28
atgcacacacgattgtacacttcgccggacacgtaccacgtcggcctaattaagcagtccaagaacgtatatactcaccacttcaccagcacatttgattctgcacatgaagatcaccgtgcactcatccaaggccgtcaagccggcatacggccccggcgagttccccaccaccaccggcgacgtcgtcccgctcaaagtgttcgacaaggcgaactttgacacgtacatctcggtgatatacgcctaccgcccaccggctccggccaacgccgccctcgaggcggggctcgccaaggcgctgatcgagtaccgcgagtgggcagggcgcctcggcgtggacggcgacggcaaccgcgccatcctgctcaacgacgggggcgcgcggttcgtcgaggcgacggccgacgtgacgctggacagcgtgatgccgctgaagccgacggcggaggtgctgagcctgcacccgagcggcgacgacgcggtggagctgatgctcatccaggtcacgcggttcgcgtgcggctccctcgtcgtgggcttcaccacgcagcacatcgtggcagacggccgcgccaccaacaacttcttcctcgcgtggagccaggccacccgcggcgccgccttccaccctgtccccgtgcacgaccgcgtctccttcttcgcgccgcgcgacactcccaaggtcgagttcgagcaccgtggcgtggagttcaagccgtacgacgacgacgaggatgtccatgcgtccggcggcggcggcgacgacgacgaggtggtgataaacaaggtgcacttgagccgggaattcatctcgaagctcaagtcgcaggcgtcggctggcgcgcaccggccgtacagcacgctgcagtgcgtggtggcgcacctgtggcgatgcatgacgaaggcacgcgggctcgacgggcgcgagtccaccagcgtgtgcatcgccgtcgacgggcgcgcgcggatgagcccgccggtgccggacggctacacgggcaatgtcgtgctctgggcgcggccaaccgcgacggccggtgagctggtgaccaggccgctgaagcacgccgtggagctcatcaaccgggaggtgatccggatcaacgacggctacttcaagtcgttcatcgacttcgccaactccggtgcggtggaggaggagcggctggtggcgtcggccgacgcggcggagatggtgctgagcccgaacatcgaggtggacagctggctgcggatcccgttctacgacctcgacttcggcggcgggcggccattcttcttcatgcccagctacctgccggtggaaggtttgctcatcctgctgccgtctttcttcggcgacgggagcgttgacgcgtacgtgccactcttcagccgcgacatggacgtcttcaagaactgctgctactcattcgacaaagaccaaactactagccttgcatgaactatattattgaaaaacaagacatgcagttaatgctagatcacttgattgagactagttagctaattagtatttgtttgatgttgttgattcaattattatgaattgaattaattacgcgagatgttctgccgatgaaagttgaattgaataaataaagttatctgtaaaaaaaaacttgaaatattgtagt

SEQ ID NO: 12396 - DNA, 1767 bp, Oryza sativa
  ref <308>: DATABASE ACCESSION NUMBER: AK109744
  ref <309>: DATABASE ENTRY DATE: 2002-08-28
aataatctcgccgtcaccctccgcggcggcgtgcgctgctccgcttcactcccttccatccatccccggtcgccgtcgtctccgcccaggccagcactgacttgtccgttttatccgcctccgcttctcttccactgaccccttcttggcctttttgggtgtctctcatccatgagagtgattagttggaggttaccagctgtaagtacaccaacaagccctaataatagcgaggctcgtcagttgggaggagggagtggcgggaaggaggaggggaagttgctgggccagcgttgtggcggcggcggccggagtcgtcggacgccatggaggccgtccagccgccggtgttgagtgacagattgaacccgttgatccaccacagatcagcttttccagccagtgttgtgcagcctcaagatcatggtgacagcgttccgggcttgtgcagtggatcttttattgacaccaggggcaggcttagcagtggatcaatgacatctgaagattcaccggcactgacgccgagatggttgtccatcaagtccaactccagctctgacaactgctttgaaggatcgaaaagagcggtatcgtggtcagaccggcatgttttcaatccaaatgggcaggtcaactatgcagaattcatggatttgatggaacaggagcttgatacccaacttgataggctcaagggggatgtaactgggctggaaaactttgcgttgccggataatgggtatataattggtacacacctgggcatgtctcttgatgtgatgctgattgagattgatgagaggttcaatgccttgaagttactgctggccacagtgtttcggaaggctagggagatggacagctcgtcggtgtctgatctgcagtgggagcatgagttgcaattggaggtcatcaacattacaataggagaattcatcagtggcttgcaagaggagatggagaggaagctgtatgagcaaatttctatgacaaactccatgagtaaaaattggcaggatgccatagctcaatttgccagcatgcgcgatgatctgggtgctctttctaagctattgttgccctcactacaagaatcacatatttctcacagcaagcatgaaacttcaagcaacaggagcaataggtggaagtacaacatctttggaaagaaaaacaaggaggatcattcatctcgcgcggaggaaaataagagtttcaggaaacagaagtccatggttgtcttggaaaaatctgacttccgtcacctgaatggtatgagtaaagaggagatcataacttattttaagtccgaaatgagcaaattgaagaggatgcatgaattggatttgcaggagaagaccgaggagctcttcaaattcaaacgggagaagggattgcttactctcaagaatgatgtggaatttgagccgttaagaaagaaaattccacagattatttctagaatggaccaaatcatttcgaagaacataaagatgccttcactttgcatgactaatgatggactggatgaaagatgcatatcagcaaaaagaatcgattctttatattacgaaaatcagcatcttagaggtttgcttgcagataatatgaaggatgtcaaggaattatcatctcagctatctgaagccagtaaagaaatgtctattcagttgtcatcagaagacgatctcctgagacaaattgccaaaattaaagagtatggagtttgtttcaacctattggtatgaatctgtttgattctgt

SEQ ID NO: 12397 - DNA, 1448 bp, Oryza sativa
  ref <308>: DATABASE ACCESSION NUMBER: AK109745
  ref <309>: DATABASE ENTRY DATE: 2002-08-28
ctggtgcactacgatcagatcgcttgatttcatagtctaatttggctatggcgggaacgtcgacgatggcgccgtggtccgacctcccgtctgatctgctgggcctcgtcatcgcccgcctgcccttccccgccgaccgcgcgcgcttccgcgctgtgtgccgcgcctggcactccgccctgcgccgccacgtcgccgccccgccgcagctcccgtggatcgtgctcccggaaggcaccttcgtcacggtctccgacggcggcgtccaccgcatggctttccccgagagcaacaccgtctgcattggctccaccgacggctggctcgccctccaccgcaccgacaacgatgacgatgacagcgtcgatggcgccaggacgacgaagacgaggcacacgttcctcctgcacaaccctttcaccggcgccaccgtgccgctcgccgagctgggcgacatcctcgacgacgacttctttgaggagttcagagtctgcaaggtgatcatccggtcccaccccaatggcggcggtcacctcgtcgccgtcatgaccaaccactgggactgccctttgatcctgtgccagccagggaagggcatctggacgcctgattcttgcacgatgccattcgtccgtgtcgtcgacattgccttcttcgcggacaagctttatctaattacaaaagccgaggacctcttcgccgtcgacctcgccgacgacaaagacggcaagcccaccgtcaccagcgtcgagcgcatcatcagacaaccgagaagccctgatggcgtaatcgacgcgtttaggtggagcgacgatgaagacgacgacgacggcgacgcacaagacaatgacggtgacgcatcgaccaacgaccatgatgagtcattaaaccaagagggagacagcgagaacgatagcgaaattgagcccgtcggtgatgatggcatcgacgacgtcggccatcagtggcagtacctcaccggtgaggatctcatttggaagactacaaagtacgagttagagggggacgactacgcagttaacggtagctggcacctcctggagtcgtctggccggttgctcatggtgagacgggagtgtttaatcgcggccttcgtcaaggacgccgaccacacccgcagcgtggatgtctctaaggccgacatggacgccggcacatgggttccggtcaccggcggcggtctaggtggccaagcaatcttcctcagtgaactcttcaacaagtccatgcctgctcccgcacacggcgaggttttagaggacacgatgtatttcgtcgacacaccggacgtgtgggacttgaaatccggtactaggaggccgtttacacgaagcatcgggttctttgatttggacagaacgtgggtttttcctccagagttgattgtttaatgaatgtggaacaacgaaaagaaatttaatacatgc

SEQ ID NO: 12398 - DNA, 1739 bp, Oryza sativa
  ref <308>: DATABASE ACCESSION NUMBER: AK109746
  ref <309>: DATABASE ENTRY DATE: 2002-08-28
aaggccaacatttgaacttacgttcaatagctttgatataactaggtgcaaagccaaacaaccaaaagccatggcgctgtccttcgccgtgcgccgccgcgcgacggagctcgtcgcccccgccgcgccgacgccccgcgagacgaagcgcctctccgacgtagacgatccggagtcgctgcggtggcaggtccccgtcgtcttcgtctaccgcccatcagccgcggccgctgatcccgtggacaccatccgccgggcgctcgccgccgcgctggtgccgtactacccgttcgccgggcggctcagggaggttgaaggccggaagctcgtcgtcgactgcaccggcgagggcgtgatgttcgtcgaggcggacgccgacgtccgcgtcgtcgagctcgaggccgccgggctcagggcgccgttcccgtgcatggatcagctgctcttcgacgtggacggctccgccgcggtgctcggcacgccattactgctgatccaggtgacccgtctcctctgcggaggattcgtcctcgggatacgcctcaaccacgccatgtgcgacgcctcgggtatcgtgcagttcatggacgccgtcgccgatctcgcccgcggtgcccgtgaaccggccgtctcgccggcgtggtcacgcgagcttctggacgcgcgcaagcctcccaagctggcgttccgtctccgcgagtacaacgacttcgccgccgcgcccccggcggcgccgtccgtgggcgccctcggcgacatggtcatgcgcaccttctctttcagccccggcgacgtcgccgcgctcaagggtgctctcccgccgcacctccgcggccgcgcgacgagcttcgacgtgctcgcgtcgttcgtctggcgcgcccgcgccagggcgctcgagacccccgccggcgaggacgcgcggctggcgatcatcgtcagcttcaggaacaacggcgagctccgcctgccccgcggctactacggcaacgtgtgcgtgccggtgacggtggcgatgcccgccgaggcgctgcggcggcgcggctcgctcgccgacgtggtcgagcaggtgcgcgaggcgaagaagacggtgaacgccgagtacgtccggtccgtggccgacacgctggtgatgcgtgggcggccggccatcgacacggcgaacctgctcctcctctccgacgtccggctcgccggcttccaccgcgtggacttcgggtggggcgagccggtgtacggcgggccctcgcacgcttggtatggagtgagctacttgatcgccgtcaagaacggcgccggggaagatggtgtggccgtgccggtcgtgctgccggcggcggccatggagcggttcacgtcggagattgaaaggctgcgcaagggtcagcagcgtggacactttcgggttcaaacaactagccgcatttagtttttgaccaaaatatccttgcatatgtcgcagtttgcatttttctaatagctacttctaccatattatattatatttgttgtcatatttttctaaaatatacctcgttcacatggcaaatgtcgcaatagaagttgcatctgtcgggttttaaaaactagccgaatttagttgtttgaccaaaataagcttgcatctgtcgccttgtgaaatttcaatgtcgaatactttttttaatagtcccattagaaattactactccctcgtgttttgaaaagttgttcgtttcataaatatatatacatattggagg

SEQ ID NO: 12399 - DNA, 1672 bp, Oryza sativa
  ref <308>: DATABASE ACCESSION NUMBER: AK109747
  ref <309>: DATABASE ENTRY DATE: 2002-08-28
ctctccgcttccgcaaccaaaacctccacagctcgccgcggcgctggcgcggccgcgcaggatgaacctaggacgcggtacagtccaggttcatacgatgcggcgccctataagagcacccgcgcggctcgcacgcgcggcggtcagtttacaagcgccgtccaccgagagatcgagctccaagaatcggaattggtgggatgggtttaggaagctcgattcctcgccgcccgtgaaggcattggtcaattggcccccccaagaaccgttgcttagcggcctaggaggctaggaccccgggcctggaacaatctgagaaatggcttctgatgttcctcaagatgacgtgcaatgccatttttgtggcacctacttaaggccaagaagttttaggaagcatcagcagcgttgcaagtacaatccggatgcgcttacgcgacagaatttgtccgcaagttcgataccaacatctgctacaagagcgacgcattcagaaatggcttctgatgttcctcaaggttacgtgcaatgtcatttttgtgacacctacttaaggccaagaagtttaaggaagcatcagcagcgttgcatgtacaatccggatgcgcttacgcgacagaatttgtccgcaagttcgataccaacatctgctagaagagcgacgcattcagaaatggcttctgatggtcctcaagagaactgtcagtgcagtttttgtcacaaggacttcgagggtagaagttcttgtgcagagcatgagctgcagtgcaagaacaatcccgacgtgcattcgcaaacagaaccttcaggcaatgctcagggtggcataggcagcttggatgttcatgtaccaaggcgaaagcgaacagccagaaatcagccgctgccagaacaacatctgaagaagccagcttctgattatgctcagggtggcaccagtgatgcaccagagactccaccgaagccaacaacaagtgaagtgaaagtggattctgctgtcaatgctcctgatatcactattcctgacaacaaagatccttctgtgatgcagaaacaaaagaagaagcttgatctcaatctgcaacctcacagtgacagttcagatcaggaggaacaggccgacaatttcagctctatcaatgatctcagtacaattgatacaaattcagacaagaagaaaaataccatcactggtgttgctgataccaatattcctgaccacaaagatccttctaggatgcagatgcaaatcaagcttgatctcaatctgccacctcacgacgacagttccagctctatggatgatctcaaaactctggctcccactgataccaattcagataaggagacgaacaccggcaatggtggtgttgataccaatattcctgaccacagtgatccttctgcgatgcagacgaaaaacaagcttgatttcaatcttccgcctcgcaatgacagttcagattcattagtctgaaatgaaagacttgattttcgtctactggtagatagttacaggctatgatactcatacgactttctgtttcagaagcaacaagtgtacaaacctcttctgaatggcaaagtccatacttctgtattctttgcactcttgcttcgatagtgaagcagtgttattcagttacatgcaatggatgaacattttactact

SEQ ID NO: 12400 - DNA, 2462 bp, Oryza sativa
  ref <308>: DATABASE ACCESSION NUMBER: AK109748
  ref <309>: DATABASE ENTRY DATE: 2002-08-28
atcaacgaagaggctcccagacctgttgcgctttgcgcctcgccacaatccaccactgtgccctctatcgctcacgcggtcacgcccatcgcgccgcgcggctcccgagatggcacggcacgcgaagacggactccgacgtgacgagcctggcgccgtcctcgccgccgcggtcgccgcgccggtcggcctactacgtgctcagccccgccgcctcccacccggacgtcgtggtggcctcgggcggcgcaggcggcggcggcggaggcgtggccgcggccgagaagatgtcgttcgcgggttctaccccggccgagtcgccgctgcactaccactaccaccactccggcgccgccgtgcaccactcccgggagtcttccaccggccgcctcctcttctccgaccagctccgctccggcgccgctgccggcgtcccctggcgacgccttgcgcagggcagcggcgccggcagcgtcggggacgacgacgacgacgaaggaggactcgccggggccgcctcgcagtggaggtgctacgccctcggggcgttcgccttcgtggccgtgttcgccttcttcctgctcgtgctctggggcgccagcaagtcatacaagccccacgtcgtcgtcaagagtgtggtgttcgagacgtaccacatccagggcggcacggaccggacgggcgtcccgaccaagatgatgtccgtcaacgcgacggtcaggctgcgcttccgcaaccggggcaccttcttcagcctgcacgtcacctccacgccgttccacctcttctacgacgacctcaccgtcgccaccggccacgtacgtgccctttccaccaccccaaccctcgcctttctgctcgtacttctacctgaatttgcctatgccatcctcgttacgtttggtgaatctgaatggattgggtaggtgatgcggacgtttccgtgcctgattaggctggcgtaaatcgatggtagttattgctagttactgcgtaacaactcacaaacaaacgggtgaatcaagagttggatctgggctctgtacaatggatcagtagggttgtcccgattattcgtactgtgctcttcattactaacatgagttctatcacgactatagtggagtactaatctcctatgccattccgaccgtgatgccagcagtccgtggaatttttgccggtttagatcagcttttgagcatccccatgaacatcatagtgtggtggagtatactaacctactgcctaggtgcgggagaaagctaaacctaacagcacggttcccttcttatttgtctctgtccttgattagttttttcggcagctcttcactcggaagacagaacaaagttgcgttttaaaaaaccggctcctccattgtcatcctcgaaccggggatagcttgcagccttgcattgccatttgcttcctcgacggagtggatcatctcagatgagacttcgcagccatgcattggggctattctgaggcgctgttggacttaagcatgatagtgcattgttttgagaatttgagtgtgcagcagcttgcattcggccattcaggcaggacttggatttagcgttttacacacagaacctcttagcgtttacacacacacagacggtgagctcgtgagtcgttccgcagtaacaaaaatatcatctgtcaagttacccgctcggctaactgcagcgattttctttcactagaatactggtgagtctggtagtactgtgcaaagtgggggcgaagtgcatgtgatcaagtaacaaatactcctactactactagtactacacagaaccagcaaaaaggggacctggaatggaaacgcaataacacccagaggcaagcagtggcgtcattggctatcggtgggcatggtgttcacgtgactcgagtcagggatgccatcgcttgccatttgccgatatgagcagattttttgttcttgtcacggcacaaagaccagccggtaactgatgtaaggactgaccggttgagaacgactactcttcagcctccctctgctatagtttttttagaggaaaaagacaacacttccctgatgactgtcttgccgctgctgcatgcgctaccactggatactccgttgcatagtacaggcaaagagccaatgtgatatgtcaggcctttgttccatcttcaacgtcaacactcaaaaggattgccttttggcaagtactataagcacctttatataagcccttttatgttgcccctaaatttaccacgtagattaggtgatgagtcggaggagaggagttaggagagagagaatgagccacccctcatgcaaggggcaatctccacacaatctccaagaaaaatataagatgatgtgtgagagtaaactaatattggggtttgtgtactagaggtgacatgttgtaattgttatctcttaattaatgaaaagatgacatggtttaaatt

SEQ ID NO: 12401 - DNA, 1260 bp, Oryza sativa
  ref <308>: DATABASE ACCESSION NUMBER: AK109749
  ref <309>: DATABASE ENTRY DATE: 2002-08-28
accaccctctcgttctcctcctcctccccgcgccgccacgcgctcgcatcgcatccaccagcgcccaaaaaccctacacctgcaaaccctagccgcccgcggtaatggccggcgtcctgcggctcgccggcgccgcgcggtccccactggcccgcgcgctggcccccgccgcacggaggatgggggcgtcggcggcggcggctatggaggacgaggcgtactggaccgagtgggaggaggaggaggagaaggcgagggcgcgggagtccgcgcccgtcgcggagatgtgccccaccggcggcggcggcggtggcccgcagtgggtggtgatggggaggcccgggccgcagaagcacgcccacgccgcccgcctcgccgaggtgctcgccgtgccgtacatctccatggggacgctcgtcaggcaggagctcagcccggcgtcctctctctacaagaagattgcaaattcggtgaatgaagggaaacttgtgcccgaggacattatatttggattgctgacgaagcgtcttgaggagggatacaataagggtgaaactggattcatccttgatgggatcccacgcactcatatgcaggcggagattctcgatgagattgtggatatcgacttggttctgaacttcaaatgtgctgataactgttttatgaagaggcggtttggtggtgacatctgcccccactgtggacagctttttgattttagcaaaactgcgtcttcagaccgtaatccgagccttgggagctgtacatggccttctcaggtgcaacatgctgcagttttaggtctggaggactcgagaatggagaagatgcgtgcttatgctgaacagaccaagctactggaagactactacaggaaacagagaaaacttatggaattgaagacatcagctcgccctggagaaacatggcagggacttgtcgctgccctacatctccagcatctggatgcatccccgacgccgcacaaactcactatgtaaatatcgtttgtgtgttgtctgagaaagatcaaagaacttgagtctaaggatctagattgtgatcctagcctgcaacatatgtagtattcctatcctatgtttgtggattctgacttctgaggagtcagccggctgtcatttttgtctctctgttttcatagatataaatgtaagcgattttgcggacgcacttatatgtttgtaatgaagaatactggacttgcgagtgcaagtataccagcttgttttcctcctt

SEQ ID NO: 12402 - DNA, 1592 bp, Oryza sativa
  ref <308>: DATABASE ACCESSION NUMBER: AK109750
  ref <309>: DATABASE ENTRY DATE: 2002-08-28
aaagcggtgggtgcagagggccagaggctagcaacgcgaggcgggaaagtggagggcggccggcggcgcgacggtggccggtgcccgacggcggctgctatagcgggaaacacggcgacgcggcggccccaacggtgatgtcatcgactgcgtgccgacgcacctgcagccatccggttcgggatgaagcagccacgcgccgccgacatcgtccgccccgactccaccaacgatggctgcaactcctgctcgcgcatgccgaggcggcctctgtgctggcgctcctcctgcgcgcgttcggctgcccttggcgagcggcgcacaccttggcctcagcctctgcttcgcgggggccgcgccgtaggccgtggacgtgccgcggctggtgctccacttcgacagcgctgggtcatggagtagcagagctcgagcacggggcagtgctacagagctcggggattacgtcgtagttgaacccgaacccgagatccacgcaccccttcagctcctctaggtcgtcgttgactcgtcggtcaagctcggcgcgtgccgccgccgccgtcacccccgctcctcgccgtacacgcgccgccgccgaagacgacgacgccgcagggctcctccttggcgaccaccaccggcttcgtcccccgtggtcacgccgcctcccgctgtacaccgcaccacacgtcttcggcctcgacctcggccgccgcttccgctccgctcgtggcctgctaccgtcgtcgccccgctactccgcccgcccttccgcgttccaacacggcgagccatgcccggcggcgagaggaccatcgccgcggccgtgcaaatccggcagctgagcggcgggatccatacggcagcggcggaggaggaggagaccgggagattggccgccgcacgctgctcctctcccgcgagccgccgcgcgccgctcctcttccacaggccgtcgcgcgccgctgcctcctcgtcggtgaagactcggaggaaatagaggtagagaggggagaggtggacgccgccccgctgcacaccgccgccttgccgctcctgctcgcccgccgccatcctcgccgcggtcgtttccccatccgccatgccgcgccgcttccccatccgccaccccactgcgcgtcgccgccccttcgctggccgttgcctgtctcctccccatgccttcgatgccgcccaactccaaggcttcccccaccggccgtgcgaggagctcggccgggctgctgccgccgtcggccgccgtcgtggcgccgccctcctctcccgcctcaccccgccaaccggcctacaggcacagagagagagagaaagaggagtaactgaggaagagaagagagggagagtgacttagcctgacatgtggggcccacgtggggtcccatgctgactcagccgccacgtaggataaaaccggggttaaaaccacttaaggttctattgtgaccggttttgattaattaagggatgccggatatctggtttgcggtttggggacaattttgtaactcgatgacaagttgagggaccttcggtgtactttttctaaacttaataaggtttattttggctat

SEQ ID NO: 12403 - DNA, 1840 bp, Oryza sativa
  ref <308>: DATABASE ACCESSION NUMBER: AK109751
  ref <309>: DATABASE ENTRY DATE: 2002-08-28
tgtgagaagttgccgttgcgcctcggcttttccgtcagagtcagggcatccaatgctctcgatccctctttcttcctcctctcgctgttgcttccgcggtcgtcgatgcgacgcaggcctggcggagaatccctctttcttcccctccgctgcaggctcccgtcctcccctttcgactgtggcttgcaggcccgtgcccccccccccccaatcgattctcgtccgcgcgtcgtcttgcggcagcggtcggttcaaggtgctcaaaatcggggggaagtggaagagctccacgcctgtcgagctgtctgcgtcgtcctcgaggggagtaaaagctggccggcgtgctcgctgtgaagtagcaagcagtctggctgcctgtgtgctcgtcctctctgcctctcgggtcagacagtgctggcctgaagagtctcatcaaggcatccaagctggcggatttgaggagtctctatttcaggccgagcgtgtgcgtggtccgatggagacgacagcgaagaagcggaagcgagagcgggatctattgtcgatccaagaggaggggacgattgttcaatcccctcaaacaggggagatctctgtccgcggcgccgatctggagtccggcgaggactcctccgactctgtcacctccgacgctggcagcgccaaggctgctcccgacgacgtgcttcatatcgcgcatgccctctgcaaagtttgcgccaagtctcctagagccgtcatcgactttgttcgaagagtgagccctgccaccgtcggccgttcgattgattgggacgtcgtccgcgaggaagagtcatctaaggtattggtttgtattaatttgttcatttccgattcaattttatttgacttgcacggagtagatgggcgatggccgtagccggtggaccgatatggaggttcgtgtgtttcttgagagctgcttggaggagatggcagcgttcaccatcacctccaactcccccaagccgcaggcatggcagaacctaatacacaagatgtacaccaagtgcaagaagaaggtgaacaaggctcaattggagtacatttgggggcagtgtaagaagcggtacaacaggtgggtgtggctagaatcgcatgcaagcgggctgggtcgtgatccccatacatcagccattgttgccgatgatgagtggtgggaaagcaagaatgcgcaaaataaaggtgtcttaagcttcaggaatgatcctctgaagcacattgaccttcaccacacggtattcagtgggcacacagttgtcggaaaccactccgccgtcgcaggggcagccccacaggcaccgcaaggagcagttcagtggcagaccatcgacatggcgcagctcgctgctgcttatagaccaccacctccaactccacccccaacggcagcagaccggggcaagggaaagaggccagcagcaaacactactgcctcagggagttcttccaagaagtcacgaagcgactccgctggactggctttggagaggattgcagacatccgagagcagagctaccagagtcgtgttgctcagatggaagcagagaagtctatgggccttgatgcgtgcatggagttggtggaaaatgatggccatgaaattggaggaagtgtgtggtatgctgcttgtgcgctattccgtgacccattcaactgcaaatgctttgttcgaatcaaggacgccgctaggcgcttggaatttatacgcactggtggtactggacagtcatctggtggcacctggtagtttgtgcactgtactttactttgagttgtgatgggcgatgtttttcaaataaaccattatttatgttt

SEQ ID NO: 12404 - DNA, 1578 bp, Oryza sativa
  ref <308>: DATABASE ACCESSION NUMBER: AK109752
  ref <309>: DATABASE ENTRY DATE: 2002-08-28
tagagctaggaatattggcagattcatgatgagatcgatgggtgatggaagagaagggaaggcattattgagtgcagcgttgatgaacctgccggccggctaaattaattagcaagaaagtctgaaactggctcaaaggttcaccagcactgcacccaatcacgcctttgctctctctgaggggaaattaattagtttgtgctagttcatcagatgcacacacaatccatatccatatccataaatcttatagtactattagttttcaattctcattgtagattcgacaaagttcatatgagaaccaggggatggatgcagggatgcatttggtaagttagctctcttcactctcacaagatgcgttcttgtcccaggtttgtagctttatcacatcccttcttgtcttcaaatactgtcatctcgatttggtaattagacatgacaaaactgaaattaaggcgctcttgacttgattagtactcctttcacctcaaaacataaacataagacgtaactattttttcagatgtcttataatacaagcatgtatatatccatgcaattaactaacatattctctttctctttaatttggttttttaagtccagtctcaagatctcaagatggtactgatttttttttccaaaattagtaaatgagaaaatggagggctacaaggactccagtctactctcgtacgaagttgattttattttcggaacagagggaataggaggctagctagatctccatgcataaggatgaagatacatgtaagcggcagaacattttcacaaacgggtcgaatctgcacgaaactgaacatgcagatcacagagacggaggatggagcaatcaagcaagcgatcgatcgagatgcaacacagctaaaagagaagagaagagcactacactgcacagagatcagaggaagacgacgagacgagtggcatatgttcttcaggaagatgtgagatgagtatatataatataaatcagttggggccccagcagacgaggtggtggaccttgcgcagcctcacgtcggcggcctcctccgccggcggccgcgcggcggcggcggcggtgttggagaggggggaacgcagcctgggcgaggaggcggcggcgcggaggtagagggagcggagggcgtagtcccagcggcagaggcccgcctggtccttgagcgcctcgacggcgcccatgctcgccgccaccaccagcgacggcgccgccgccttcgccccgcagatcgccatcccgagttcccgacccggctactccgcctccgcctccgctcggtcacagtgcgcggcgcttgcgcttgctagtgatgcggaggtggtggaggcgtggtggtcaggggagacgccatgtttttatacgcgagatgagcggaaagcggcgaaacggggagcgcgtcgccgccggttttggacgctcactctgtttccaaggatgctgggcggtgcgagcctcactgcgaggacacggggattattgtttgttttcgtctgtccagaaatataaacaatttttaaataattgaaatatattttaatattgcgaat

SEQ ID NO: 12405 - DNA, 1675 bp, Oryza sativa
  ref <308>: DATABASE ACCESSION NUMBER: AK109753
  ref <309>: DATABASE ENTRY DATE: 2002-08-28
agaccccctcctcgctctctctctcgctaacccttcctcgccgccgccgccgccgccgccgctatcccaccggcggagtcaccgcccgtcctcctctggagccgcgggacgcaggttctcaccgcgcgcatcgccgtcgcttcgtccgccccctccctaccacacaggtttatctcgaagggaggcgggtggtcgcggattttttttttatttggggggggtcggccaaaccctaggcgggcggggcgtccgccatgtttccgccgaaagggtccaatccctatgggcagcagcaaagttacggagggcagcaatcctatggccaaatccctggcagcagtggattttcgtcctcggcagcaacgggtggtgctgatggtagtcgatttggcgcccgtgtcgggcagggtgcagctgggcagtatggagggtcttacgcttcagtgtacggcacacagcaggttggtggacttggtggcaaaggtccggcttcttctagtattcctaatttgcctgagccatccaagttctcgtctggatctgtagggtccagcatagcaagaccaaatgatgactatatggctgtgcgtggttatggacaaaagctagaccagtatggtagtgattatacattagagagaagaatgtatggtgatcactcagctaatcttggcaggagagatgggcttactgatttggatagaagatatcccgagcatgtttctggaggccatcagggttcatcaatgcgccatccacagctgctgaaaccccaactgcagtctggatctgatataagacaagccgattactttgcaggaaggtctgctccaatccatcaaggatcgcaggatattggtgcatatggaagagttgaagctgatcatcgcaacttgtccattcttgggaccgccccatatggaggacaacagtcagcttcgttgttgggaggagctcctaggacaaacattgatagcctctcctatgggcaagggtcatcaagcagcggttatgggatgggtctgccccctggacgggactatgcctcagggaaaggtcttctccatccttcttcggattctgattaccgagatagcattttatcccgtgtacatccaggcatctccatggttgatgaacgtgctgttgatcgggttggttatcgtcgtgaactggatctaagagatgaagaacgtcgaagggacctattactggaaagagaaaaggaacgtgaccgtgaacgggaacgagagctgcgagacctacgagatcgtgaaagagagcgtgaaagggaaagggaccgtgaaagactaagagaacgtgaaagagaaagggaacttgaacgtgaaagagaacgtcttcgtgaacgtcgcatgaaggagagggaacgggataggaagcaccctgctgattcaaggagggagcacactccacctagaactcctggtgatcggcggcgttcttcttctgttagagctgagaagcctttgcggcgaccttcacctcggcgtgatgctgtgcataggtggacctccatgttttctctgtagctttgtggatgcaataggttgctgcttcgtctttcgtgcagctttttaaactaacgctttcgtttgttctcctgaaggcatcgttcacctgttaaagaaataaagagagaatatatttgcaaggt

SEQ ID NO: 12406 - DNA, 1719 bp, Oryza sativa
  ref <308>: DATABASE ACCESSION NUMBER: AK109754
  ref <309>: DATABASE ENTRY DATE: 2002-08-28
atagatgcaaagaagattgagagattgagagaagtgaggacggtcttacggcgtccatgagatccctgatctcagcctccctgaggttggagccgtatctgcggagtccttccttgagctcgtcgaaggtgatggcgccgctggcgtcggtgtccatggccttgaacatctccttgaggccagcgagctcctcctcggagaggttccgggcgatgacacgcagcgccatcttcttgagcctgttcatggcggagaactgcttgaggcgggagaggacggcgggggcgagggggcggtcgggggcgacgccgtcgtcgcagacccaggggtggcaaagcacctggtgggcggtgaggcgttccctgggcggggagcggagcatgcggcggatgaggtccttggcgctgtcggagatggtgggccatgggtcggagtcgaagtcgagggatccccggaggacggcgtcgaagatgccctgctgcgtctccgcccagaaggggggcaccccgctgaggaggatgtagacgatgacgcccgccgtccacacgtccgcctcggggccgtagtgcttgcacagcacctccggcgccacgtagtaggggctccccaccacgtcgctgaacacctgcccgggcttgaagaagacggagaggccgaagtcgatggccttgagcgaggaggaggaggattccttgaggaggaagttctcgggcttgaggtcgcggtgcatgacgcccagggagtggcacgcctccaccaccccgacgatgacgcgcgtgatctccgcggccttgcgctccgagaagtagccgcgctccacgatgcggtcgaacagctccccgccctcgcacagctccatcacgatgtgcacgtacaggttgtcctcgtacgcgccctggatggtcaccacgctcccgtgccccgccaggtggtgcattatctgtatctcccgccgcacgtcctccacgtcctccgggctcagcagcttcctcttcgcgatcgacttgcacgcgtactccgcccccgtcgacacctgcgtgcacaggtacgtcgtcccgaactgcccctgccccagcttccgccccaccgtgtacacctcccgcagcgccggcgtctcgtgccccagcaccgccgtcggggacgacagcctctgctggtggctgcggatcggcatcctccccccgctacttgttgctgtgcttgtactactgcaactgcttggataccgatgatagcagtagtagtagtcgaccaaggacggtgaggtcgggctggacgtggacgaggcgccgcacgagtagtagttgcccatgcaacgaaacgacgatcctcaagagatgctgtttctctttcagcccagccgccgccgcatcatcgtcgacgacgatcctctctcttcccctctgtttccttccgtcaagcggaggcgtcgatcggagtcgatctgcagatgaacgcatgcagatggcagggaattaaggagaaagaggtgccgggaaacagggccgcacgctccttccaaccttggcgagcgagtggtgtgcgccgcgctacccttccttggaccgacgtgcgcgcatgcctcctcccttccttccctcactggcgatcaatgattgattacacaagctttacctacctgcaaactgtaatgcaatataattcaaaggccttccacaacatactgtactcgtacaatacaaacctcaattcagcttc

SEQ ID NO: 12407 - DNA, 1546 bp, Oryza sativa
  ref <308>: DATABASE ACCESSION NUMBER: AK109755
  ref <309>: DATABASE ENTRY DATE: 2002-08-28
ctccgagctcgaggcgacatctcacctcctcggccgccggccatggcgacaatctccgcgactctctccatctccttcctcccttcatcaattcgcttcgccgtcgccaccacctccacctccactacctcctcctcctcctcctggcgtatcaagcgacccgcgcggttcagatgctgcgcggagccctcttcaccggagcaggagaacccctcgactccggccccgccaccagtgaagcctcctgcgtcgccgtcgtccctgtggggcatttccacgagcacctggtctgcgggtgtcgccgggctggggtttctggagaccgcctacctcagttatatcaagctcacgggctccgaggcgttctgcccggttagcggcgggggctgcggcgacgtgctccaaagcgactactctgtcgtcttcgggattcctcttccactacttggtctggtggcatatggtttggttttaacgctctctcttcaagaaaatgggaagaagttcctccctggaattgatgatctggatattcgtttaacattacttctgatctctacttcaatggccactgcaagttcttatttcctatatattctaaacactagatttattgggacgtcttgttcatactgcttgttgtctgcatttctctccttcactttattttccatcagagttaaggacctcggtttggaacgtgtccagaagtttgttggtcttcaattatcagtagcaattattgttgctcttgctctgacaaattcctacagttcagctacaacacagttaaacggcacagatgattttgttttagaacgatatgatacagagataacaaccgaatcaaccccatttgctattgcacttgcaaaacatttgcactctgttggcgctaagatgtatggagcattctggtgttctcattgtaacgaacaaaaacagatttttggtcgagaagctacaaaaattctggactatgttgaatgttttcctaatggagctggcaagggaaagaaaatggctcctgaatgtgcagctgctggtatagaaggttttccgacatggattatcaacggcaaggttttgggtggcgaccaggaacttccaatccttgctgaagaatctggtttcactgttgagggaaccgagcaatcataaggtcagacacgagagcaagtttcattcaattgaaggcgagtgttttatggttttagtgaagaactcaggttgtgaaggctgactacaacaattccgcatgacataccgtcacaccgagggaaggttttcgttccacggttgcatagcctacctaatacagcccctaaccactgtaataatcagtaaaagctgctcttctctcatacggagattgggagatgatagaagaagcccaaatgagaggtgttgtataatcattttgtagtatgtagattgtgatgtaaaatgtaaaagggcgcattgcttctcttcctaggtacataatgtaatgtataataccttgcaatgtgatatttgtacagaaaagtgtattgttcagtctttt

SEQ ID NO: 12408 - DNA, 1986 bp, Oryza sativa
  ref <308>: DATABASE ACCESSION NUMBER: AK109756
  ref <309>: DATABASE ENTRY DATE: 2002-08-28
aaaaagggaagggatagtacgtactttgctgaagagatggcagctcctttgttgttatcaacaatcattttggctctagtggtggtagcatcctctactcatggtaccatggccaatggggtattccaggtgcgccgcaaattccatatcgtggacggtgtgtacaaggggagcgacataggtgcattacaaacccatgatgagaaccgccatcgtcgccgtaaccttatggctgcagagctcccacttggtggcttcaacatcccatacggcactgggctatactacacggatatagggatcgggacacccgccgtgaagtactatgtgcagttggacaccggtagtaaggcattttgggttaatggcatctcctgcaagcaatgccctcacgagagcgacatattgagaaagctgacattttatgaccctaggagctcagtaagttcaaaagaggtgaaatgtgacgatacaatatgcacttcgcgaccaccatgcaacatgaccttacgttgtccgtacatcacggggtacgctgatggtggcttaacaatgggcatccttttcactgatcttctgcactatcatcaactgtatgggaatgggcagactcagccaaccagcaccagtgtcacatttgggtgtggtttacaacaatctggaagtttaaacaattcagcagtagcgattgatggaattattggttttggcaattctaatcagactgcgctatcacaattggctgcagcagggaagacaaagaaaatattttctcattgccttgattccacaaatggaggtggaattttcgctataggagaagtggtggagccaaaagtaaaaacaacacctatagtaaagaataatgaggtatatcaccttgtgaacctcaagtcgatcaatgttgctggcacaacacttcagcttcctgccaatatttttggaacgaccaaaacaaagggtacattcattgatagcggttcaaccttggtgtaccttccagagattatatattcagaactaatacttgcggtatttgccaagcatccggacataaccatgggtgctatgtataattttcaatgttttcattttcttggaagtgttgatgataaatttccaaagataactttccattttgagaatgatcttaccctggacgtgtatccatatgattaccttcttgaatatgagggtaaccagtattgctttggattccaagatgctggaatacatggatacaaggatatgatcattttgggagacatggtcatctcaaataaggtggtcgtctatgacatggaaaagcaagccattggctggacagagcacaactaacgggtagtccttgtgttcaccatctgaagcagaagacgagaagagaaatagggaaggagaaaaacagttactagggaacctcattacttttttatttattgttcaactgtaattgttctgctctggtttaaaacacactaaaaaatccttaagtagaacgtcataccataggcacatggtatcgactatcaactaaaccccacaagcaaacacacctaaacacaaaaatctaccaagcaatgagtaaacaaaacggtaaactagggtagcaagcctaatgcttggaacagctcctatgatcggcagagacgacatcgtcttcttcatcaccactcgaactgctgctactagagattgacacgatccacttcactgcatcactaactgttgcggctttggcggcggagagcatcggcaactgcgaagacgcgcgaactgggacgggaacgggatcgacggctaggacatcgactggggcgggacgccaactgcatgcgaatgggagctgtagacctcttcctcgacattgtccggattttggctcttcttggtgctggacgaccttggagcattgcgctctcgaccttgagacgatcaacctcatcttgcaaacgagctatttgaataagcttcttgtcgttcaacgtc

SEQ ID NO: 12409 - DNA, 1642 bp, Oryza sativa
  ref <308>: DATABASE ACCESSION NUMBER: AK109757
  ref <309>: DATABASE ENTRY DATE: 2002-08-28
aacgagatcgtctgacgtttcttccccatctctcgggcagcgtgaggcgagatgggtggcgcgcggcggccgacgggagaggagcggcgtagcggccggcggaggccgcgtccccgtggccccctccgccgctccccccgttgtcctcgcttcttcccccgggccgacgccgctgccgccctcccaccgtcgcgtccgccatcgccgattccttccgtgacctgttcctcctgtcccgccactgggcatggcggagcgggacgtgttcgcgtacacggccatgatctcggggctgtcggaccacagccgatgcgtgaaggccatcgaactgttcgagcggatgcaggaggaacggggagggcagggctcatcggccaggcaagggagatcttcgggagcatggcggcgaagtacggcatggagcccggcgtggagaactatggcagcctggtggatgtgctggcggggatggtggaggaggcggaggatgccgatgaggcccgactagtgcgtgctgggggcgctgctgaatgcgtgaatggcgcgcggcgacactgaggccgggaaggaggtggcggcgatgatggcggagctggggctggacgaccacagcggggtgcaggtgcagctgtcgaacctgtatgtggggcgggggaagttgggggaggtggcgggtgttccacctccatgatccatcggccagcgacatggcgacctcagcgtggtgacggcgtccaagtactccaaggttcctcaacccgtaggagttaggacacgccccatcgcgccaccgccgacctccctctcgtcgtcttcagcaacgtgcactggggccgcttccaggaggccgtcctcgagctcaggcatgacgtcgccgaggcatggccgcatgggcggcgctgtggagggacgacgccacgaggttcgcggccgccgtcacgtcccagtgcagggccgagaaggatctctgttgcctcgccgccgctgccctcaagcactcgtcgcgcctcggcttcggctccatcgcggaggaaaccgagatggccgccgcggcgccgtgctcatggacatccgccgctgtgttcatggctgccgtattcatgtcattgccgcggcatcctcctgcaagaagacgccagcgtttgtggccttctaccagaaggcctcgccggagacggacgaggtggctcttgagtcttggcaggttcgaggcgttggaacaatgcatcgacgagtccaatagcagctactccaatgtgttcaggagcattcttcagacaagggttgcgctgctcaatattcagacaaggattggaacttggaagcaatgtattcctcccaaggagattttgttccaacccggagatgattggagttgcttcttactgatgattggagtactagattatcagtggcttcttttcactgatgattgaatatactgcaatgagattttttttccttcgtcacaaagagtactcctaatgaagattggcacaattgtgaattgggagaactatgtggggggtctgtaatgtgaatgtccaagccaatatgtaatgtgcggagtgtgcattgtatctgtgaccacttgaattatgagcaggtgaataaaaccaagaagatgcagatgccatcaatc

SEQ ID NO: 12410 - DNA, 2620 bp, Oryza sativa
  ref <308>: DATABASE ACCESSION NUMBER: AK109758
  ref <309>: DATABASE ENTRY DATE: 2002-08-28
aactaaaacctcgtggaatgggggagccgccggggaagaccgggcgacgtgacgcgggcgggacggcgccggcggtggaagaccggtggacgcagctcccgccggagctcctcccgctcatctgcaagaagctgccggactcggccgacttcgtgcgcttccggacggtatgcagcgcgtggcgcgacgccgccccgttgtccgacgtcccgccgcagctgccgtgggtcgtcgagcgccgcgggtccgcgttccaggcgagggcccatttccgcttctactcgcctagctccgggaggacgtacggcgtccgtggctacggcggccgctcctggctcgtcatgggcggcgcgtgccaggagcacctcgtcaccaccgtggacctctccacgacggcgctgtacaacccgctcaccggggagcgcctcgcgctgccccccgcgccgtacccgcagtggcgccacggcgtcgtccacgtcgtggccgccggccgccgccgcggcggcgctcccctggtggtgaacgcatccacgaggacggggcacttcgggtactgccgccagggggataccaagtggaccctggtcgacgggcgccaggacatgggccaccgcgcgtaccacggcgggcggttctacgtcaacacaaacgcgcaggagacgctggtgatcgacgcctccaccggcgccgtcgagtccgtcctgccgccgccgccacgctcggccgacgccggtgccggcgtctcctgcggggactacctggtggagtcgcgcgggaagctgatcagggccgtgctgttcccgcgcgacggcgtggtgaccacgtcggccgaggactactacctcaacgtgtatcagctgcaggaggacgggaaggccgccgccgcgtgggccaaggtggagagcgtcggggatagcgtgctctttttcgacaagcacgggcacgggttctcgctggagcccaacggcgccgcggagctgaagcgggattgcgtctacttcatgcacgagaagcggacatggctggacgccggggagtacaggttcctttgtcggtataacatggagaccggagaggtcgatagagttgtgtcgctgcccgacacgttcggggacacctgggttgtccccggattgtgcccctctgaataagatgtgtcccggcgatgttgttggtttttcggtgtttcttgtagttttttctccttgaattttcattgaaaaattaaatagatgcatttagttgctctgggtgaatgattggtctttgaaaaatgagagaggtcttgggttgtgtgtgtcacacaatcacatgcattttccattatgtttaataaaatttaatttgtgtgtctaactttttgtggctttaacatatttttattggtctgataaaaaaaatgatgtttgcaaatagtggtggtcgtggtataaaaaacaacttttttatggtgcacatttttaccaaacaaattatagctcgtgtacttaccatgttttatctgtgagctagttgagaaaatataatttgtgtcatgcttttaaagatatttcacttcacacacatgaatctgtcaaaagtgctagtgttgttagtgtgacaacttacctatcagttcattactccctctgtttcacaatgtaaatcattttagcatttcccacattcatattgatgttaatgaatctagacatatatatccatctagattcattaacatcaatatgaatatgaaaaatgctagaatgacttacattgtaaaaccgaggaagtaataagctaatcccaagaaagcaaataactttcgtgtatattcgatcggttcatattatacttaggctcatacaatgtatcgaccaattatattgttggtgttgtagtagaaatatgtttctgtcagtttcactttgcttgtgttgttcgtggtatcaacctagctattttgtgttggtattatagcaaaaatatgtttttaccaattttgctttacatgtgttgtttctttgtactgaacccacgtgccaatgcattctactagaatgtgatgaagaaatttcaatatcatgaataggtttctctcacaatacatcaatgtgtactaactagaggaacacaggaaggccaccacggtgtgggccaaggtggggagcattgaggaccgcgtgctattcctagacaagtaggggcatgggttctcgctagagcccaacggcgcgtcgggactaaggcaggattgcgtctactttatgcatggacgtggctggattccgaggagtacaagttcctttatcggtatagcatggaggacagaaaggttgatagagttgtgtcgctagtccacacgtttagggacacctgggttgtccctagattgtgtccctccaaataagatgcgtcccgacagcgtcgttggtttttgcggtgctccttgtagttttttctccttgaatttccattcaaaaattaggaggatgtgcttagttgctccgggtgaatgattgtcctaacaaacatggataaattttgggttttgtgtgtcacacaacaataagcatcaaattacatgtatttcccattgtgttgaataaaatttgatttgtgtgtctttttttgcagtatt

SEQ ID NO: 12411 - DNA, 1023 bp, Oryza sativa
  ref <308>: DATABASE ACCESSION NUMBER: AK109759
  ref <309>: DATABASE ENTRY DATE: 2002-08-28
gctgaaaaaacgctaacctccgccatccccacgccgcgccgcccgcctgacctcagccacgcacacgctgccctccccacgccgccgcgccgcccgccgtccccatgccaccgcgctgcccgccgtctaccgccaccgccccgcgcgcgcacctgccggagccgctcgctctaccccaccacttcctcacacgcggccgtcgccgcctcggatctgtgtgtcgccgctgtctactccccagccccgcgactactccgccgtccacggttcgtcgctgtcgcccgtcgtccgtggccacatagccgtgtgatcccccatccctatatccccgtcgcgccgcctcgccatatccagatcaccacgacgattcctccagaacgaagagctgctctcctttctcggctcctccgttgggatcgagaagctattcggacaacctccactccaaccaagcaccgccagagaggacagagctggggctgaggtggggagaagaggagccagccgccggtcggcccgtccgtcgctgcccccgtgctcccacctcctgctttcacgccgactgccactgctcttccggactggcagagcccaagcagtaggaggcaccgatgaaggtgatgaggacttgagatgaggcagtatgcaggcttgcagagatgcaaattaggcgttaatttcttcaggtcccttcttgcagcaggaattgctcaaatcaggtaccttcctacacctgacagtgtgccccctgttccagcggcggttacaaagatatcaactttgccggctgtatccttccagatctcaggtcctgacattttcagaaaatgaacatgtgtatcatataaagcaaagttatggacagtagatgataaaacattgttgtgaggctgtgtttagttcacactgaagtttggaagtttgattgaaagttttctatcacgatgtgatagaaaagttgtgtgtgtatgaaaggtttgatgtgatggaaagttggaagtttggaaaaaaactttgcatatc

SEQ ID NO: 12412 - DNA, 1898 bp, Oryza sativa
  ref <308>: DATABASE ACCESSION NUMBER: AK109760
  ref <309>: DATABASE ENTRY DATE: 2002-08-28
acggcgaatcggagaagaagcacgcagtgagagagagtgcgcatgtccgcaattggtgactccatcccggccatcttcctccctctcctttcatcttccaataaaataaaatgccggtggccgactgcgaaagcggtctctcgccggcagatgtcaccggtgcaggtgccgcaaacgggaacccgggtcactggaggagctactacaggcatgtgctgctgctggcgtaccagagctgcggcgtggtgtacggcgacctgagcacgtcgccgctgtacgtgtacaagagcaccttcatcatcgggtcgctccggcggttccaggacgaggagatcgtgttcggcgtcttctccctagtgttctggacgctgaccctcatcccgctcctcaagtacgtcttcatcgtgctcgccgccgacgacaacggcgagggcggcacgttcgcgctctactcgctgctggtgcgccacgccaagttcagcctcatgccaaaccaggaggccgccgacgaggagctcacctcctactaccgccccggctacgccccccaggagacccccatcctcaccgcgctccgtcggttcctcgagaaccaccgcaagtcccgcaccttcctcctcgtcaccgtcctcttcggcgcctccctcgtcatcggcgacggcgtcctcacgccgcccatgtccgtgctgtcgtccttctctgggctgcaagtgcactcgaccgcgctgacgagcggggaggtggagatcctgtcgtgcacggtgctggtgtgcctgttcatggtgcagcactggggcacgcacagggtggcgttcctgttcgcgccggtggtcatcgtctggctcctcctcctcggggcgctcggcgtctacaacatcgtggtgtggaaccccagggtgctgcgcgccctctccccttactacctcgtcaggttcttccagcacaccggcaaggacggctggatctccctcgggggaattctcctctccatgacagggaccgaagccatgtgtgcggatcttggccacttcacagctgcatccataagggttgcgttcgtggggctcatctacccgtgcttggtgctgcagtacatggggcaggcggccttcctgtccaaatcaccccactgcgacatccacttcgtattcttcgagtccattccaacgggcatcttctggccggtgctggtgatcgcgacgctggcggcgatcgtgggcagccaggcggtgatatcggcgaccttctccatcgtgcggcagtgcacggcgctgggctgcttcccgcgcgtgaagatcgtgcacacgtcgcggcggatccacgggcagatctacagcccggagatcaactggatcctgatgctgctgtgcatcgccgtcaccatggggctccgcgacaccaccctcatcggcaacgcctacgggatggcgtgcgcgggggtgatgctggtcaccacgctgctcatggcgctcgtcatcgtcttcgtctggcagtacagctgcctggtggcggcgctcttcctggtggcgttcggcgtcgtcgaggcggtgtacctgtcggcggcgctgatgaaggtgccccagggcgggtggctgccgctggtgctgtcgctggtgttcgtcgccgtcatgtacgtgtggcactacggcacgcggcggaagcaccagttcgacgtgcagaacaaggtgtcgctcaggtggatccacgcgctcggccccagcctgggcatcgtgcgcgtcccggggatcggcatcatctactccgagctggccaccggcgtgccggccatcttctcgcacttcgtcaccaacctgccggcgttccaccaggtgctcgtcttcatctgcgtcaaggccgtgccggtgccgcacgtccgcgacgaggagcgccacctcgtc

SEQ ID NO: 12413 - DNA, 1385 bp, Oryza sativa
  ref <308>: DATABASE ACCESSION NUMBER: AK109761
  ref <309>: DATABASE ENTRY DATE: 2002-08-28
atcgagtatagctacctcccagttgccgtccagatcggcttgctaagctatccaaggcagcagagccgcgaggaggactacagggtcctcgaactgtacaaatggcgctgcgtcggtagcctcatcgggaggcaccaccttctccaagagccaacccggacaccggagcttctgcgccggtgcctgagcgccatcaacggcttcctgccacgtatcctggcgtcctacaattttgacgcggaggcgctcgacgtcggccagagacatgtagtcctgggcatcatgctgctggacgggtgcttcatcctccgccgcctgctcaagttcgcgcgcattgccagtgaagaacaatcaggagctaaagcttcctcctctagttctcgttccggcaccggcgggcaagatgacgacgaggaccgggccgtgctgtttgggaggtgctgggtgtggtcgttcgtcacgtgcgacctgctgcttctggagaaccagatcccgttctgtgtcgtccagaagctgttccatcagctccggacggacgccgacgacaccagcgacgtcctcgtcgctggtgccctgcggctattcggctccctccgaccacgcaagctctactcctcgcccatctcctgccgcgatgtgcatgtgcaccacctcctgcacctcttctacctctccgtcggcttcccaccaccaccggacgccgccgcggcgccggacgacgaccctagcgagcacttggtgccgccgtctgagctcccgcagtggataccatgcgccagggagctggaggaggccggcgtcacgttccggcccaggaaggatgcgacgagcttcctcgacgtcaggttcgccggccacggcggcgtcctggagatcccggagctgcagctgtacgactacagcgagccgctcttccgcaacctcatcgccttcgagcagacctacccctacacgcgcggccacgtcaccgcctacgccgtcttcatggactgcctcgtcacctcgccggaggacatgaggctgctgcacctcagcggcgtgctggtgaaccacatgaaccgcgaccgggaccccacggggttcttcagccggctctgcagcgaggcccacctggctgccgaccgtaactacctcgccggcgtgatcggtgaggtgaatcggtaccggcggtccaggtggccgcggtggcgcgccgccctggtgcgcaactacttcagcaacccatgggtggccacgtcccttgccgcagcagtgatcctgctcgcactcaccatgatgcagagcttctttgcggcttatgcatacttcaagccacctaagcagtaataactggtacaacacatatattttgtggaaaaacataaataaatgagctagtttcattc

SEQ ID NO: 12414 - DNA, 1040 bp, Oryza sativa
  ref <308>: DATABASE ACCESSION NUMBER: AK109762
  ref <309>: DATABASE ENTRY DATE: 2002-08-28
acgcgaacccaccacccatggcgtccaggctctccttgctcctgctcctcgccctcgtcctcccggcttccggcgatgacgccgcggcggcggaggcggcgccgccgccggcgccggcgggcggcgcgtcgttcaacgtgacggagatcctcggccggttcccggagttcgggctgttcagctacctgatcagcaagacgcacgtcgaccgcgacatcaacagccgcaacacggtgaccgtgctggtgccggacaactccgccgtggactggctcctccgccgcagcgccaggctgccgcgggcggcgctcgtcgagctcctctccgtccacgtcgtgctcgactacttcgacgccgcgaagatcgccgcgctgccgccggggaagcccaccgtgtccaccaccctgttccagaccaccgggaacgcgcgccgccgcaccgggttcctcgccatcaccccgacggccaagggcggcgccgtcttcgcctccgccgcgcccggcgcgctggtgaacgccacgctcaagagggtggtcgccgccgtgccgtacaacatctccgtgctccagatcagcaacttcgtcctgccgctgccgaggatgaagccgatggcgatcgcgccgaccccggcgccggtgccggccccgacaaagatggtgccgatcccgccgagtttgccgctgacggatccggccgatgaggacggcgacgaggcgccggccgccgcgccggcgccgtcgcatggcaacgcggtgaaggtgatgagttggtggtcaggccttggcgtgctcgtggggacgatggcatgcgtgttcggttatttgtaggttaactaattaatctgctctattttaccggttacgttatataattaatctacaggtgcatcctacgtttttagcgcatatgatcgtagtagttgaatttgaagaaacagttctctttttttttgtcccattttttgttgttgtggagtagagacttgtaatcgccggagaaaataattagcaaagcaagagttaaatacttgacgatggttc

SEQ ID NO: 12415 - DNA, 1859 bp, Oryza sativa
  ref <308>: DATABASE ACCESSION NUMBER: AK109763
  ref <309>: DATABASE ENTRY DATE: 2002-08-28
cacaggttgcagcagtagttgtaaacaggttcacttgtcgcacagggataggacaccatgcgtcagagagacgagcctctcctctcttctccctcgcacagaaacgcctacccatgcaaacttctatcgttcacgctgctctctttagccaccgtgctctgcctctgcgcgggcgccgccttcctcctactctccccgacggccacgaacctctgcgcgagctcccctgacccggcctcgtgccaagccatcgtcgccgacgccgtcctagcgtccccgcactcccacccgagccgcccggcgcacgtcctccgcgccatccttgccacgtctctcgatcggcatgacgcggccgcggaagcggtggcgggcatgcgccggcgcgccagcgacccgaggcaccgcgcggccctggaggactgcgtccagctgatggggctcgcgcgcgaccgtctcgccgacgcggcgggcgcgcccgacgtcgacgtcgacgtcgacgacgcgaggacgtggctcagcgccgtgctcaccgaccacgtgacgtgcctggacggcctcgacgacgggccgctgcgcgactccgtgggggcgcacctggagccgctcaagtccctcgcgagcgcgtcgctcgccgtgctcagcgccgccggccgcggcgctcgggacgtgctcgcggaggccgtggacaggttcccgtcgtggctgacggcgagagaccgcacgctcctcgacgcgggcgcgggcgccgtgcaggcggacgtggtggtggccaaagacgggagcggcaagtacacgacgataaaggaggcggtggacgcggcccccgacggcggcaagagccggtacgtgatctacgtgaagaagggggtgtacaaggagaacctcgaggtggggaagacgaagcgggtgctgatgatcgtcggcgacggcatggaccagacggtcatcaccggcagccgcaaggtggtcgacggctccacaactttcaactccgccacgctagccttgtcgggcgacgggatcatcctccaggacctcaaggtggagaacacggcgggcgccgagaagcagcaggcggtggccctccgcgtgagcgccgaccgcgccgtgatcaaccgctgccgcctggacggctaccaggacaccctgtacgcgcaccagctccgccagttctaccgcgactgcgccgtctccggcacggtggacttcgtgttcggcaacgccgcggcggtgctccagggctgcgtgctcacggcgcggcgccccgcgcaggcgcagaagaacgcggtcacggcgcagggccggaccgacccgaaccagaacaccgggacgtccatccaccggtgccgcgtcgtcccggcgcccgacctggcgcccgccgcgaagcagttcccgacgttcctgggccggccgtggaaggagtactcgcggacggtgtacatgctgtcctacctggactcgcacgtcgacccgaggggttggctcgagtggaacggcgccgacttcgcgctcaagacgctcttctacggcgagtaccagaaccagggccccggcgccagcacggccggccgcgtcaactggcccgggtaccacgtcatcacggaccagagcgtcgccatgcagttcaccgtggggcagttcatccagggcggaaactggctcaaggccaccggcgtcaactacaacgaggggctctgattagaagggtagagattattgatctgccatcttgtacgagttgccatgttcgcatgcaccctgttggttccaatacggagtactaatcatcgtcatcatcaggaaataaaagcaataaagcatgctaatggcgcagatcagatcaatctgatcggaggtgc

SEQ ID NO: 12416 - DNA, 2546 bp, Oryza sativa
  ref <308>: DATABASE ACCESSION NUMBER: AK109764
  ref <309>: DATABASE ENTRY DATE: 2002-08-28
catgctcaacaccgatctccacaacccacaagtaggggtgcaagtgggcttgtccgcaaacccgcttatagacaaaattagtacgatttgaccagcgagttatctattatttgacatattaatatgtttatggatcgacccacttgtatatctaaatgggtttatcatttatttgacttacttacaagtgaactcacgggttggccggcttgcatccttacccacaggtgaagaaaaagatgtcggaggacgacttcatccgcaacaaccgtgccatcaacgccggcaaggacctccccagggagtacctctccgagctcttccactccatctccggcaacgccatcaccgtcttcagccaggcctccgccgccgccgagatgacgcccaccagatgggccgacctcgtcaagcgctcccgcgccatcgaccccttcaccccctgcgacttcaagcacaagctcacccgcgaggtgttcgtcaccgtctccggccccgccgtcgccaccctcgccgccatcttcgactacaccgacgacgaggacatcctcaaccagtgcgtcgagggcctcatctccgtcgcccggatcgcgcgctacggcctcgaggacgtcctcgacgagctcctctgctgcctctgcaagttcaccacgctgctcaacccctacgccaccaccgaggagacgctcttcaccttcagcaatgagctcaagcccaggatggccacgctcgcgctcttcaccatcaccaaccgcttcggcgagtcggtgcgcggcgcgtggaagaacgtcgtcgactgcctgctcaagctcaagcgcctcaagctgctgccgccgtcgctggtcgaccaggagggcggcgccggcgccgccgtgagcacggagcggctgggacaccgggccaagtcggagtccggcgtcatcttcccgtcgtcgcaccgtggcgccgggacgagcaggcacgtgtccggcatgatcgggcggttctcgcagttcctgtcgctggacgccggcggcgagtcgctgctgtcggtggggagcgagttcgagaacaacctcaagatcatccagcaatgccggatcgggagcatcttcacggagagcgggaagctgccggacgagtcggtgcagaacctggggcgggcgctcatcttcgccgccggcggcaaggggcagaagttcagcacgccggtggaggaggaggagacggtgggcttctgctgggacctcatcgcggtcgtctcgtcggcgaacgtgcaccgcttcaccacgttctggccgcagctgcacgactgcttcgccgccgtgtcccagctgccgctcttctcgccgtgcccgttcgccgagaaggcgatcgtggcgctgttcagggtcgccgtgaggctgctctccggcggcggcggggaccggatggcggaggagctggtgttcaagtcgatcaacctgatgtggaagctggacaaggagatcctggacacctgctgcgaaggcatctcggagtgcatcgtgaagctgctgatggagtacgccagcaacgtgcagacgccgatcgggtggaagacggtgcttcacctgctgtccgtcaccgggcggcacccggagacgttcgaccagtcggtggccgccatgatcaagctcatgaacgacggcgcgcaggtggtgacgcggttcaactacgcggcgtgcatcgaggccgccttcgggttcgcggcgctcaagatcagcccgctcgacatcagcaccaggatcctccagctcatggccgactccgtcaactggctcattttatggcacaagtccggctactccgacccgggcaacgcctggagcagctcaagctcgtcgtcgtcggcggcggcgatgatgatgatggaggacgcgtcgcggatgggcaacctggcgacgagcatgttcatcaagctcgcggaggcgctgcgcaagacgagcctagtccggcgagaggagatacggaaccaggcggtggcggagctgggccgagcgttcgccctggccgccgccggcgagctcgagctgggcccgacggggtcgctggcgtgcttcaacctggtcatcttcgccatggtggacgacctgcacgagaagacgctggagtactcgaggagggagggggcggagagggagacccggagcatggaggggacgctggcggcggcgacggagctgctcgccgacgtgttcgtgctgttcctggcgtgatgcaggagctggtgccgaggatgctgaagcggatgatcgtggagatgaaggacaagggggtgctggtcgccatggaaggagacgagctgtgggagatcacccacatccagatccagtggatcgctccagctgtcatggaggagctcttccctgattgattactcacttactcactgcagttaattactagtgttattaagttagaggttactctgataaccaatgtcatatattaaaaaacggagacagtattattgttcagtctttctttttattctaactaggaatgtacacattacctctataaccatctacgaaagactatggctt

SEQ ID NO: 12417 - DNA, 2070 bp, Oryza sativa
  ref <308>: DATABASE ACCESSION NUMBER: AK109765
  ref <309>: DATABASE ENTRY DATE: 2002-08-28
gagttcggccattctccaacccgcacaccgcagcctctgccgccgccggcgctcgggctccttcctcgccgccgccgcgcgccgccgactccaccggccgtccgccgtgccggacaggtgatttgatttcatctgctgaaggtgggattgggaaatgccgcttcatgttcgcataagggagaagacgagcatagcgagtttgttgagttcccggaggaactggagtggtggtggggttgatggtggaaagaagagtggcaaaagagaaggtgctaaaacgaaaggaaccaggacaactggtaggaacaagagtgagaagagagaagagcacaaggaggcacggggaaatgccggacagaggaggaggtggagcgacacaaatggtcaatcagatgcgaagaagaacgcatcacaggctgtgaggaggaaaaggaagggtgatcatgactcatggaatggtgatcacagtgacacgccgtattctaaatcaaagctgaccagaaatggcccttccaccatgacccgtggaaaggcttctgctagaaaaggtgatagatttaggtctgaaactttggatgaggatgatttgcattcaaggaaaaggggtaacagtatggtttccagtgtaagtagagggggaaggagtaacagcatggtttctggtataactagagagggaaagagtcaatcagtgttcagtaggaatgcagaagcatcatccaaagggaagaagtttgatacacctaccagagtcagtcgccaaaaagaggctgctacagatgccaacttggatgatcatggcgccgaaagcaagaagtcggatgattctggccagattgctgatgagaagccccgccctcgtcgtactcgagttctggacaagactgggaaaaaaaattagggttgcaaacaaggatccagtttctgacattgaggaaacccttcctcccaagaagaggaagcggatgaaactggatccctatgacacatcaaacaaaagacttgaggattctactgccaaacaggatgtttgtagtccagagaagattcctgaaaaaagtccgcctgaagagactgagacgtctataaatgctaaattccgtgctatacagccaagttcctcaatcatttcatatgtggaagacaatctcctaggtcgtaggcgcctaaatgagataaaaaatgctggctacaatgttaagctctctgcccctttggataatgttcccttctcaaccagccctgaacgtgagcgcatagaagaaaatgtgttcagaaataagttggagttctttgctgcagcaaaaatttcgtcatcatttcctcctcctacgctcccagagatagcatttgcaggggtatcaaatgttgggaaatcatcactactgaatgcacttacaaggcaatggggtgttgtgcgaacatcggataagccaggacttactcagacaataaatttcttccggcttgcatcaaagctatgccttgtcgatctgcctggatatggttttgcttatgcaaaggatgaagttaaagactcatggcaagaacttgtgaaggagtatgtttcaaccagggtcggcctagaaagagtgtgccttcttgtgcacactaaacgtggaatgaaaccattggactacgagcttgtagacctaatggaaaggtccaagacgccatatcagattgtattgaccaagactgatttggttttccctattgacgttgctcgccgtgctgtggagatccaagagagcctgaaaaagaacaagtcagtggtcagaccggtgatgatggtgagctctaaaacgggagctggtgtgcgcaacctgagaggggtgcttgggaagattgctcgcttcatcaaaccataacaagaaggttcaaattagtttggggagtttggagagttttagctcttaagcaattttcaagctagcttagaacttgaggccatatcgtagcatgagcaaaagttttctgggattttggaggcgtcttccatctaagacgtttgtgtcgcgcagacagaaaaacatcctgattctacataatttatggcatgttaggcct

SEQ ID NO: 12418 - DNA, 1832 bp, Oryza sativa
  ref <308>: DATABASE ACCESSION NUMBER: AK109766
  ref <309>: DATABASE ENTRY DATE: 2002-08-28
ctcaagcacaactgaactgcccataggtacaaatcattccatccagccatggcacctccttcccggccgttttacctcgtgtacgtcgtaatatttgtggccgtctcactctcggccacggctgccactgccaccgcggcggcggtattgcccagaggagccctgccgaccaagtcgggctacctccccatcccaccggcggcgaacgcttcgctctacttcgccttctacgaggcaaccgagccggtgacaccgctggccacgacgccgcttctcgtctggctagagggcggccccggctgctccggcttcctcagcaacttcctccagatcggcccttaccttttcgccggcggctcactgtctcccaaccccttcgcgtggaaccgccgctttggtctcctcttcatcgacagcccgcttggcaccggcttcagcgtcgcgccttcccccgccaacatccccaccaaccagtccgtcgtcgccgaccacgtcctcgccgcgctccagtcgtttctctctctcgaaccgagcttccgtgcccgccctctgtacctcaccggcgagagctacgccggcaagaccatccccgcggccggcgcgctcatagtagcaacaaacccgacgttgccggagcagaagaggattaacctgcgcggcgtggccatcggcaacggcatgacgcaccccgtcgcggaggtgacgacgcacgcggacatcgcctacttcatgggcctgatcaacgcgaagtagaagcgcgcggccgaggcgatgcaggcggaggcagtggcgctgacgagggaggagaggtggcgcgaggcgtccgccgcgcgtgcgcggctgatgtcgtggctggagaacgccacgggcgtcgtgacgctgctcgacgtggaagttcagcagtcggtggcggtgatggccgcggggctcgcggacttcctcagcaccgccgaggtgaaggcggcggtgggcgcccgcccctcgtcgcgtgggaggcgtgctccgcggcggtgggcgcggcgcaggaggaggacgtgatgaagagcgcgaagcgtgacgtggaggcgctgctgcaccgcggggcgtcgccgacggcgacgccgacgccgacccgcgtgctgctgtacgaggggatccgcgacgtggggaacgggccggtgtgcgcggaggcgtggctgcgggagctggagtgggacggcctcgccgcgttccaggacgccggccgcgccgtgtggcgaagcggaggcgggctcgccgggtacgtgcagcgccatgacgcgctcgtgcatgtggccgtgtatggtgccgggcacttcgtgccgtattctcaggggcgcgtggcgcaggagatgatcgaggattgggtgttcagaaagggattattcagcgcgggcaccgtctagaacctgaacatcatttcaaggcatatataagtaaataaataaataataaaggggctagctatatttgtggaattagatttgaaaatatactttttatttattttttcacgaatattccggatgcaaaatttttgacgaaaatatatcgtcgatctcgtacaaccattatacgaaaattacgtaagcgagatgtcgcagacggtatcacgccaggaaagtgcgagaccgcgcgggcgaaagtcgttgaaacaatcagcgacagtgtcaaccggctccatttatttggtgattaagtacataattactattaactaataataattagtgattaattaataattaattaatcgctaattaggatagttaatcactaattgattcggtggcagtcaggtatcgaaaaaattttgaaaatatccgttttttatt

SEQ ID NO: 12419 - DNA, 1686 bp, Oryza sativa
  ref <308>: DATABASE ACCESSION NUMBER: AK109767
  ref <309>: DATABASE ENTRY DATE: 2002-08-28
gtcgaggtctcagaatcggccagtgcgcagcagcaagcgccggcggcggacgcccgctgacgcctctgccgccacccgcgatgatccatcaccgtgggagtctctgcacgaggatctactggagctgatcgcgtggcgggtgctggccggcgacggcgacctgctggactacgtccgcttccgcgccgtctgcccccactggcggtccagcacgtcctgcccgcgcggccgcggcatcgtagaccggcgattccaccgcggcggtggatgctgctccccgagggccacggcctctacccgggccacggcaagctgcgcggtttcgtccgcttcttcaacctctccaccggcgccttcgtccgcgtccacctcccgctcttcagggaccactgcgtcctcgactccgtcgacggcatcctcctcctccagcgcgaccacgacaccgccatccgcctcctccaccccttcaccggcgacatcctggacttgccgccattggagaccctcctcaggtacgtgagctccaagctggtgggagacaagtggaactatctcagacgcatcggtgctgcatccatcaacgtgagcgccgatcaagtcgtgtcgctcatgatgtggtcacccggtatggtccaggtagcatttgcgacctccggggaacagcaatggagggcttctagctggtacttcaaccaaattttcagtccattggcattccaaggcaagctatacatggtgcggcatgaactaacttatggtgaaccagagattctacagctcgatccacctgagctggaagggatggaaccctggctgccaccaccaacgttgattgccaaatgtccagcaaacacagtaaacacatccgacagccggttctaccatctggtagaatgcgactcggaggttctggtgatcgccttaagcgctggcattcataggaaaatctcagtttacagactagctgactttatgctgggaagaaggactctccgggtgacatgcatcggtggcaatgctctcttcattggccagaggaatctgtgtgtcagctccaaggcgttccctaccgttgtgggtgacaccattgtctttcaccattaccagcaaggttatcttgctcaataccacctccgcagcggcacattggagccagcatcagatggaacgattgcagaatatgctataccaagccctacttgcatcatttaccatatctacacatgttgctttcgtgaacaatggaacaagggacatataaggtttcaggggttattaacgattaactggcgggtgaagcgaaaatggagatctggggcgtaaacgggtcatgtaccatggtggagtacgtaggtggtgcctggttttccttcctctacagctctatccatcttgttatccttgctctgtcgctatgacagagatgctttcctgcacttttaaattattactcctatgtactccaggagtatgtttgttaggcaaccttttcatgttcgaacaacattgttcttttgaaacctagccagcacagctggtgctgtattaaggacacatatgtacaatgtgtcgtcagtttagaacaggaaagagaagcactctacagcctggatgctatttaaggggatatgtatgcttgctaaagattttgcaccacgcaaattaagtccagagtttcatcccctc

SEQ ID NO: 12420 - DNA, 1931 bp, Oryza sativa
  ref <308>: DATABASE ACCESSION NUMBER: AK109768
  ref <309>: DATABASE ENTRY DATE: 2002-08-28
gcttgcttctctcccgctcgatcaatctcacttcttccttgctctgatctctcaattaagcctctagctactgatcagtcctaagctagcagcaggtaggtgtcagaaaggtggtggctagctttcatggcgagcaatggcgaggcgacgacggagagcgagacggcggcgccggcgccggtgccggagccgaccccgccgccgtgccaggggaggctcatcaccgtgctgagcatcgacggcggcagcatccgcggcctcgtcccggccaccatcctcgcctgcctcgaggccaagctccaggtatatacgtagcaagaacacacacacactgctgctagctcatcagctgatcagctcagctcagctatggtaaaatcaaatgctgatctgcaaggaagggaacaatcacctcactactatagaaagacatattcaggacggtatcataggtgtcgaaatagataaaattggtatctataatatttttcacacctccatatgttgaaaaaaaaaactaaaacatttaagcgactatatatatcggttctatagaaaaaccgacacctatactaagtaccggttttttgtccttatcttatcgtagctgttaattaattaaataaccggcacctataataattgttggttttaaaaaatatcgatacccgtaaaaacaaagccgagctgactgcccttccttatcctcccaagtagataaagacctcactcccgcgcctctctctctctctcctcatgcgtggcggcggtgggaggggaaccagcaacaggggcacctctctccctacccaggcaacggcggtgccctcccttccaccaaatcaggcgggaggggaggcggcggcaacaaaggttggtagagggaggggaacttgcagcagggatgatgccctcccctccgtcaaatccgacaggaggggaggcggcggcggtaggggcacctcccctccgacagatccggtgggaggggaggcagtgccagctatgagcaatggcagaaggggagtcggctgtgatagcagcagcgccctccctgacttcagcccattctttatgttatgagtgttcttagtgttggacttttttagtgtttggtattcttgagttcttggttgttcttgtgttttttgattaaatgttatatacaattttgattcgagccgatgcatcgagttgggtattttttttatttgtagaaccttaaaagtgtcggttcctaaaccggcaacagaacctaaatccgacacctttgtggggtttccaaccgacatcaattaaagttttttagtagtacacgttcaagggcgagacgaaagatcatgcgggaggtggcggagcttacggccatgaaagccgcgctacaatgcgagataggagtgcccatctaagtggtgtacctaagtggtgtacgtactcggtcgtccctggagttgcgagagatcaaccttcgaaaaaaacaagatcgattttctttttctatatgtacatatagctgctagtacactacctatatgaatcatctaaatctctgatcttaatacaaatgatacacattttatgtattcgcgaaaaaatcatgatgattaattcaggagctggacgggccggaggcgaggatcgcggactacttcgatgtgatcgccgggacgagcaccggggcgctgatcacgtcgatgctggcggcgccggacgacaaccggcaaccgctcttcgccgccgacgacctcaccaagttctacctcgagaacgggcccaagatcttcccgcaacagaggtgcgtgtcaatctccgtcaattattttttttaaatataaagtgaattgtacaactttcttcgtcaccttaaatttttgagttgaaccagtcggtgcatgcaagtcaatatatttttcccgagaatcgattcgatc

SEQ ID NO: 12421 - DNA, 1787 bp, Oryza sativa
  ref <308>: DATABASE ACCESSION NUMBER: AK109769
  ref <309>: DATABASE ENTRY DATE: 2002-08-28
ctctctctcctcctcgcgacttgtcggcggcgacggcgacggcgacctcggcggcgcacggcctcgctccctccaccgccgcctccttccttcgccgccgcaccgcgcgtccccgctccatctccgatctccgcgggcggagctcccgggcgcggaggaggctgcgccgcgcgcgcggggaaggcgcacgagtgctattttcattctgaaggaaattgcacggttaatctgaatagattggtcagtggttgtctgcattctacatatgatccagatggtttggagatattcagtgtaatcaacaatgcagacacggaaaaagggtgctacgaaaaatgcacttggggatcctgccagtactaaaactagtaggcaacccagaagagcagctcaggcggcagcttctgaaaagaaagtgaatgatcttattacttcttctgccaagaagaagaagtctgttggagccccttcaaagaaaaaccgagcttctaaaggtggaaggaagttgatatccgcatgtgatgcagctaattctgaaaatgaagtttctcaggtggtctctggtataccacacgatcagaagtcagatgacaatgttgatgggaggccatgcaattccatattttcccctgcatatcaccttcagaaagaatgtggtgcgagtaacttcgccaaaggcttagaacataaaggtgatacattgggttcggttagctcagtagaagaaaggacaacacatgctcaaggtagaaaagaagttaccaccagcagatctgaatccactagccatgcagttaagacttgtgttgggagcgatcaccatacactaaatgcacaatcagctttctgtaacacaccgcttgaagaggatgaattcagtgaactcggaaacctttcttcagaagtgtcagcaatatatcttgccatgcagcagtccaagttggagtgcattgatgaacatagtcaagattcaatctcaacagaaggttatgttgatcctgaggacactgaggaatatgatgattttgatccatatgcttttatcaaggatttgcctgatttatcactagtggtccccaagtttcgccctgtcctactccccaagcaaactcggagttgtcctacaactaccctgaaacacttgtgcattcaactcttgaaccatgcgaggatgctgacttcgcatttccagtttattttaacttcagagaacacacaatatatgtccgatgccgtccctatctcaaagagttcttggagagggttgccaatttgtttgagacaatcattttcactgcaagtcaaagcatttatgcagaacagcttctcaatgttcttgatcctaaaagaaagttgttccgtcatcgtgtttaccgtgattcctgtgtttatgtggagggaaactacttaaaggatctaacagttcttggacgtgacttaactcgtataatgattgttgacaactctccacaggtatgcacttagctatctcaatttttgtgcgacaacatctgttcaatacttcaatctatgctaactttatcctggttttagtggtttgtattcacattgaaatgcctatttgtttcttggtggatataaattgtgttatagtggtggacgactacaaagataggtgtgcatcagttaccaggggttgtgaacttgtgattgaagctgtcaactttgctaggtgtctccagtaacttgctaattgttgtgacatatagtttccttactactttcagggtctcttaaagattatccgaaagttcactacctccagc

SEQ ID NO: 12422 - DNA, 1603 bp, Oryza sativa
  ref <308>: DATABASE ACCESSION NUMBER: AK109770
  ref <309>: DATABASE ENTRY DATE: 2002-08-28
gtagctggcgctggtgacggcatccatccaagaactgcctccttgatccatccattcccggcggacagatcacgccgccggccggctcttgtgtatatatatggacggcgagtggagcgacggggcggcggtgtcgtcgccgacgatgtccggcggcggcgggcgggagcagatgaagggcggggaggacgtcgctgcggcggattgcccggggtcgccggtgtcaccgtcaccggcagctgctcagcggtcggcggctggggcggcggcgtcgcctagcgggaggtcgaggcggtcggcgcagaagcgggtggtgaccgtgccgctggccgacgtgaccgggccgcggccgaagggcgtcggggagggcaacacgccgaccgactcgtgggcgtggcggaagtacggccagaagcccatcaaaggctcaccctttccaagggcttactaccggtgcagcagctcgaaggggtgcccggcgaggaagcaggtggagaggagccggaacgacccggacacggtgatcgtcacctactccttcgagcacaaccactccgccacggtgcccagggcgcagaaccggcaggcggcgccgcagaagcccaaggcgcaggcctgcagtccgccggagccggtggtggaagtggaacccgaggaaacgcaccagtacggcgtcaccgccgggcctgccaccggtggcggcggcggcgcggcggccatcgaggtgcgcgacgagttccggtggctctacgacgtcgtgtccgtcccagccacgtcgacctcgccctccgacatcgacgcggccgacgagatgcagctgtacgatcagccgatgttctttggcggcgccgtcgtcggcacggccgcgctcctccccgacgagttcggcgacgtcggcgggttaggcggggaggggctgggcgaggaggaggcgttgttcgaggggctcggcgagctgccggagtgcgccatggtgttccggcggcgcgccggcgacgggctggagatgggaggaggggttaagatcgagcagccggcggagagcacggccatgacatgatgctgacacagacaggtgggcccggtccggcctccaataagaccagacaagctcctgtagtttttggcttcttgttcacttgccaattgtcggttagtttttttccctcctcattttggttattctctacagtagcatacagaaaagaatcggtacaatattattattgcacactgttgattggagaaaggattgagagagacaagtcactttgtcaatggtttggttgaagatttttgttttctcctttggaaccatcaatggatacataaataaagattggaaaaaagaaacacagaaggattggaactccattttttgctctgaaaactctgcctatgtccttgtcatgttgcgcaaatggataacattgaattgttcattactacagaaaaaagttccacttaacgatttcgtgtcagacccaaattctgagcattgtctgcaatagaagggctgtctttgttcacgatctgatcgacggaacatcatgttatatatgaattgcaacgacagatgaatcaaataaaatgtaattttatt

SEQ ID NO: 12423 - DNA, 2017 bp, Oryza sativa
  ref <308>: DATABASE ACCESSION NUMBER: AK109771
  ref <309>: DATABASE ENTRY DATE: 2002-08-28
aacgaccgaaggaggccaagtccaaagatggcaacacaagcgattgcaccgatgcacgccgccgtcgtgcaccgccaccacgttctaccaccccgccgctgcgtgcgccgccgtggcgtcttcgtccgcgcctcggccgccgccgccgccgccgccgccgagacggacacgctgtccgcggccttctgggactacaacctcctcttccggtcgcagcgcgacgagtgcctcgactccatcccgctccgcgtcaccgagggcgcgatcccgcccgacttcccggccggcacctactacctcgccgggccgggcatcttctccgacgaccacggctccaccgtccaccccctcgacggccacggctacctccgctccttccgcttccggcccggcgaccgcaccatccactactccgcgcggttcgtggagacggcggcgaagagggaggagagccgggacggcgcgtcgtggcggttcacgcaccgggggcccttctccgtgctgcagggcgggaagaaggtgggcaatgtgaaggtgatgaagaacgtggccaacaccagcgtgctgcggtggggcggccggctgctctgcctctgggagggcggccagccgtacgaggttgacccccggacgctcgagaccgtcggcccgttcgacctgctcggcctcgccgccgccgacgacaacaaggcaacgaacgcgtctgcagcacgacggccgtggctgcaggaggccggcctcgacgccgccgcgcgcctgctgcgccctgttcttagcggggtgttcgacatgccgggcaagaggctgctggcgcactacaagatcgacccgcggcgggggcgtctgctgatggtcgcctgcaacgccgaggacatgctcctcccgcgatcccacttcactttctacgagttcgacgcccacttcgacctcgtccagaagcgtgagttcgtcgtgccggaccacctcatgatccacgactgggccttcaccgacacccactacatcctcctcggcaacaggatcaagctcgacatccccggatcgctgctggcattgacgggcactcacccgatgatcgcggcgctggccgtggacccgagaaggcagtcgacgccggtgtacctgcttccgcgctccccggagaccgaggcgggcggccgcgactggagcgtgccgatcgaggcgccgtcgcagatgtggtccgtgcacgtcggcaacgcgttcgaggaggcgaaccgccggggcggcctcgacgtccggctgcacatgtcaagctgctcctaccagtggttccatttccacaggatgtttggttacaattggcaccacaagaagctggacccgtcgttcatgaacgcggcgaagggaaaggagtggctgcctcgcctcgttcaggtggccatcgagctcgacaggacgggagagtgccggaggtgctcagtcaggaggctgtccgatcagcacgccaggccggcggacttcccggcgataaacccaagctacgccaaccagaggaaccggttcgtctacgccggcgccgcgtccggctcccgcagattcctcccgtacttcccgttcgacagcgtggtgaaggtcgacgtctccgatggatcggcgcggtggtggtctaccgacgggcgcaagttcgtcggcgagccggtcttcgtcccgaccggcggcggagaggatggtggctatgttcttcttgtagagtatgcagtctccaagcacagatgccgtctagtggtgctggatgcaaagaagatagggacagagaatgcacttgtggcaaaactagaggtgccaaagaacctcacttttccaatgggattccatggtttctggggagatgaatgagcatagagcaagcatcagatccagtctaactctggagagaaattgtcttgaaaaggcaagaattttgcctcgtgtattgataaaagagagttttgtgataatctgtacatggtggagaggaattatcaggggaaccaaataactactgtacatccagtct

SEQ ID NO: 12424 - DNA, 1533 bp, Oryza sativa
  ref <308>: DATABASE ACCESSION NUMBER: AK109772
  ref <309>: DATABASE ENTRY DATE: 2002-08-28
atcgatgaagaaatcaacagaactaaagccaaggcttcttcctcctccaatttcctctcatctctctgttcttccaatcctagtttctgttctcttattcccagtcccctgcttctcttcccaatctacattgctaattcctctcaattgtatccaaattacttgagtgattactgctatgaattatcggttgcttccggtgttgggcattgatcggtgggtgggttgaggatcgtgacagttaccgagcatggcaaccaactccgtcataagagaagggcagctcctactcagatgctcgaagccgtcgccggccatggcagctttcagattttctggagagctaaggaaatcaaagcacgcatttctcaggccatcacaatggtgctgctcagctagcgccaggacggtcgccaccgagctcacatcgatgcgctcgcatagcttctcctcgcacaccagcttgagcctctccatggcgtacctgtccgccgcgacgagcaggtgctggcacatggcgccttcgtctttctccttcatctccggcaacgagtcggtgtacgcgaagcggagcagcgccttgaacacctgcgcctccatgtcgacgacgcggacgacggccttcctgcggctctccttcattgagcctagcagctcggcgccgaacaccggcgaccgggccgcgagcacgcaccggtgagcggtgaaggtcttgccgccgaccttgaacaccacgtcggcgcccttcgccgaggaggagctcaccgagatgccggtgaagatcggacggcggcacgctgacgaagcttccagttcccctcgcaggggttcttcttctcgccgccgtcgcggtcgccgcctcgggcatatccttcgcgacgaactcggtgatgacgacgacgtcgcaccggacggtgaaggaattgcccttgagatgcctcgatttctccaattcctccttcttgatgaactttggttgcccccaactggcatggctgaagaacttgttcgcatccagcgacggcggcggcggcggcggcggtaatttgtcacccaactcgtcgtcgagcagacgaaactggagctgcgcgtacacttccctggttacttcctcgtcgagatgaaggaagagggatatgtaatcgccgcagttgggcgtgttgccgttggggtagtattggatgcgccatcgatggccgccgatggtgaaagcgcgggacttgagggcagtgctggtggggaagagatcccgggtgcgcgagtagtcgtcgatcttgaggaggtggtacccgctggccgtgccggcgacgatggtggaggcggatcgcgacgacgacgacgacggcgtcggcccgccgccgctgccggcggtggtgccagagcgtgcgggagacatggcgcactgacccatgattgctagtgctactcgcgacaagggtttgtagctttttaaaaaaaaaaatcaagaaatattagtaacaatgttcctttcttagattagattgatccgtgactatgcttcttcttttcttt

SEQ ID NO: 12425 - DNA, 1634 bp, Oryza sativa
  ref <308>: DATABASE ACCESSION NUMBER: AK109773
  ref <309>: DATABASE ENTRY DATE: 2002-08-28
agccgccagcgaccgtccgccaggctcattcccgacgatgccggagcgcttcgatcctgccggccgccggcgcaggggcattctcccgccgcccgtcggcgcaggggcatcgacgggcctccgacgccggcctcctgacgtccatatcgccggcacaggcgcatcggcggaacggtcggagcccgcgctgtcgcctcctgaccgacagatcgaggtccgaccgccggcgtccgacgtctcatcggtgtgccggcacaggcgcatcgacggaacggtcggagcccgcgccgtcgcctcctgaccgacatggtggtcttaacactccagaaaattgtgctataattcaaggtagagctaacagaaattgtgctataattcaaagtagagctaacagaagggatgatattctagacgagatggaagttgctgctttagcttctagaatcaattggacagagtatcagttagcttcaattgaagctgctgcgattggtaacataattagggatggaaaggtcattgaaattgctccaaactcgaaaggaggacctctacaggatgtgctgagaagtttgcttgaaaaaaatgaattgatgataaataaactgtgtgatgaggatgctccactggaaagtaccgcttcaaggccgctctcaggcttctttttcaacacattatgtaaggagcctgggtatctcgcatttgacaccatacgctgcggcaagcttctttaccctgagtcacgctttgctgcattaccagagcccgtatctttccttgcatccacgcgtggccttgtctgcgtctgtggaaagacaacaggcttgtactatgtaaccaacacgaccaccttcaagtgggttcagctaccacgccacagttgtgatcatggagaaccagcagttgtcatcacattcgaggaacccctgacatcctgcttcgacggtgctgttgagcattatcatgtcgtcgctgccttccacctcaagggcagcgtctggacatctgagtcatactcctccaggactgggaggtggactattgctaaagatgcccctcctgctgtggaggtgaaggcggagtctggtgttggtacactgggctgcgccttctggcgcacttcccttgggtctatcctctgctatgacccggggaaggacctccttaaagtcatccctgcccctcgagtggtaaaccaagataccgtatgggagcttgggcaaatggagggagatcttactgtgacctgcttcaaggatgttgacggtttcctcacattgggcgtgcttaaaataaacaagcgactgtttgatgataaggttgctgcactctggacagttgtcggctcattctccggggagaaggttggcaaaagggctatgttgctccgctcacaaggcgccgcagaggtcgttgtctgggaacccttggaggagcgcgtcgtcgccatggaccttgaaggcctcgttactggcaactttgggcccctaaccaatgaagggtgtactccatgttttgttccttacgttccatcgtctgtgagtatttgaaggactgacgatgatcaggaataaaccagatgtgattagcatacaattgtatagtataagaaatacacctccatgttacgtttt

SEQ ID NO: 12426 - DNA, 1667 bp, Oryza sativa
  ref <308>: DATABASE ACCESSION NUMBER: AK109774
  ref <309>: DATABASE ENTRY DATE: 2002-08-28
tattgtccaggaagaatcctcagaaaaggacgtctggtggggccctgtgaacaagcccatgacccaagatgtgtggcgcatcaaccgtgaacgtgccgttgactacctgaacactcgcaaccgcatctatgtcgtcgatggctttgctggatgggacgagcgctaccgcatccgcgtccgtgttgtctgtgcccgtgcctaccatgctcttttcatgcgtaacatgttgattcgcccaagccgcgaggagcttgagcacttccaccccgactatgtcatctacaacgccggctctttccccgccaaccgtttcactgagggtatgacctcggccacctccgtggccatcaacttcgccgagaaggagatggtcatcctgggtaccgagtacgctggtgagatgaagaagggtgttttcactgtcctctactacgagatgcccgttaagcacaacgtcctgactctgcactcttctgccaacgagggtgagaacggtgatgtcaccgtcttcttcggtctgtctggtaccggcaagaccaccttgtctgccgaccccaagcgtaagctcattggtgacgacgagcactgctggaccgacactggtgtcttcaacatcgagggtggctgctacgccaagtgcattggtctctccgccgagaaggagcccgatattttcaacgccatccgcttcggatccgtccttgagaacgtcgtcttcgaccccgtcagccgtgttgtcgactacgacgactccaccctgaccgagaacactcgctgcgcctaccccatcgagtacatcgacaacgccaagatcccctgcaagagcgaaaaccaccccaccaacatcatcctgctcacttgcgatgctcgcggtgttctgccccccatctccaagctcacccccgagcagaccatgttccacttcatctctggttacacctccaagatggccggtactgaggacggtgtcaccgagccccaggctaccttctcttcttgcttcgctcagcccttccttgctctgcaccccatgcgctacgcccacatgctcgcagagaagattaaggagcacaaggccaacgcctggttgctcaacaccggttgggtcggtgccggtgccaccactggtggcaagcgttgccctctcaagtacacccgcgccatcctcgacgccatccacaacggctcgctcgcaaacgccaactacgaggtctacgagaccttcaacctgcccgtccccaccgcttgccccggtgttcccgacgagctcctcaaccccaagaacagctggaccgcctccacctccttcaaggacgaggtcaccaagctggctaccctcttcaacgagaacttcaagaagtactctgacgaggctactcctgaagttctcgccgccgctcctcaggtctagaggatgtgaagatagttatgcgttgatggattaaaaatttggcatgtgttttcgttacccgggactgaacaagcgtccctttgcatggcgtgctgcgtttcttagggcttgatgaactcgttgcagctctcagcctcatttatgggtcttatttctttttcttactaccccgcactgttttgatcttatgactggctgaatcgttatttccttttttcgattccccctaacgatagccaatgaacggatatcttct

SEQ ID NO: 12427 - DNA, 1746 bp, Oryza sativa
  ref <308>: DATABASE ACCESSION NUMBER: AK109775
  ref <309>: DATABASE ENTRY DATE: 2002-08-28
agtgcccacgctgttcgtccaccgcgacgacatctacgagtggggctccgccgcgctgctgcgcgccggcggcgtgttcccgtaccgcggcacgtggggcgggggctcctccggcgtcataacctccgcgccggccaacgtcgagcacgtgctcagggccaacttcggcaactaccccaaggggccctactaccgggagcgcttcgtcgagctgctcggcggcggtatcttcaacgccgacggcgaggcgtggcgcgcccagcgccgggcggccaccgccgagatgcactcgtcgcggttcgtggagttctcggtgaggagcatcgagcagctggtgtacggccgcctcgtgccgctggccgagcggctgagtggcggcggcgccgccgtcgacctccaggaggtgctgctccggttcacgttcgacaacatctgcgccgtggcgttcggggtggacgccgggtgcctcgccgacggcctccccgacgtgccgttcgcgcgcgcgttcgagctcgccacggagctctcgctcctgcggttcgtcaccccgcccttcatctggaaggccaagcggctcctccgcgccggcagcgagcggcggctcgtcgaggccacgcgcgccgtccgcgagttcgccgagcgggcggtcgccgaccgccggaacgagatgcgcaaggtcgggagcctgcgcggccggtgcgacctcctgtcgcggctcatgtcatcggcgccgggcgccgactactccaacgagttcctccgcgacttctgcatcagcttcatcctcgcgggccgcgacacgagctccgtggggctcgcctggttcttctggctgctcgccggccaccccgacgtcgagtcccgcgtcgtcggcgacgtcctcgccgcgggcggcgacatcaagaggatggactacctccacgcggcgctcacggaggcgatgcggctgtacccgccggtgcccgtcgacttcaaggaggccctcgccgacgacgtgctcccggacggcacgccggtgcgagcgcggcagcgcgtgatctactacacctacgcgatcgggcgcgacccggcgtcgtggggcgacgacgcggccgcgttccggcccgagcggtggatgcgcggcggcgcgttcgccggcggcgagagcccgttcaagtacgcggtgttcaacgccggcccgaggctgtgcatcgggaagcggttcgcctacacgcagatgaagaccgcggcggcggcggtgctgtccaggttcgccgtcgaggtggtgcccgggcaggaggtgaagccgaagctgaccacgacgctgtacatgaagaacggcctcatggtgcgcttcaggaggaggtcgccgccgccaccgtcgccgccgccgcgccacgtcgtcgccgacgacgacgacgacgacgacgttgcagccggtcgccacgttgctgtcggaagctgcaacagtaaccatctctaaccaaccaaacagtctctgtcgttactccgcattgctaattaacaaactactcacacacattgctttcccgcgctaattgtcattagaaaatcgtaatctcgaggactggactgatcgctgtactgtgaaacagctcaagagtgaagagcagctggtgccgtctcgcgctggactacagtgtggcggaaaaagacgcgatcgatcaaatcatcagacatttctgcttactactccgtatatttttcttgcctgtgtgactgtgtatgtgtgttcatctctggtgt

SEQ ID NO: 12428 - DNA, 1893 bp, Oryza sativa
  ref <308>: DATABASE ACCESSION NUMBER: AK109776
  ref <309>: DATABASE ENTRY DATE: 2002-08-28
agtcactagctaagctgctagccttgctaccacgtgttggagatggaggctaagccggtggcgatggaggtggagggggtcgaggcggcggggggcaagccgcggttcaggatgccggtggactccgacctcaaggcgacggagttctggctcttctccttcgcgaggccacacatggcctccttccacatggcgtggttctccttcttctgctgcttcgtgtccacgttcgccgcgccgccgctgctgccgctcatccgcgacaccctcgggctcacggccacggacatcggcaacgccgggatcgcgtccgtgtcgggcgccgtgttcgcgcgtctggccatgggcacggcgtgcgacctggtcgggcccaggctggcctccgcgtctctgatcctcctcaccacaccggcggtgtactgctcctccatcatccagtccccgtcggggtacctcctcgtgcgcttcttcacgggcatctcgctggcgtcgttcgtgtcggcgcagttctggatgagctccatgttctcggcccccaaagtggggctggccaacggcgtggccggcggctggggcaacctcggcggcggcgccgtccagctgctcatgccgctcgtgtacgaggccatccacaagatcggtagcacgccgttcacggcgtggcgcatcgccttcttcatcccgggcctgatgcagacgttctcggccatcgccgtgctggcgttcgggcaggacatgcccggcggcaactacgggaagctccacaagactggcgacatgcacaaggacagcttcggcaacgtgctgcgccacgccctcaccaactaccgcggctggatcctggcgctcacctacggctacagcttcggcgtcgagctcaccatcgacaacgtcgtgcaccagtacttctacgaccgcttcgacgtcaacctccagaccgccgggctcatcgccgccagcttcgggatggccaacatcatctcccgccccggcggcgggctactctccgactggctctccagccggtacggcatgcgcggcaggctgtgggggctgtggactgtgcagaccatcggcggcgtcctctgcgtggtgctcggaatcgtcgacttctccttcgccgcgtccgtcgccgtgatggtgctcttctccttcttcgtccaggccgcgtgcgggctcaccttcggcatcgtgccgttcgtgtcgcggaggtcgctggggctcatctccgggatgaccggcggcgggggcaacgtgggcgccgtgctgacgcagtacatcttcttccacggcacaaagtacaagacggagaccgggatcaagtacatggggctcatgatcatcgcgtgcacgctgcccgtcatgctcatctacttcccgcagtggggcggcatgctcgtaggcccgaggaagggggccacggcggaggagtactacagccgggagtggtcggatcacgagcgcgagaagggtttcaacgcggccagcgtgcggttcgcggagaacagcgtgcgcgagggcgggaggtcgtcggcgaatggcggacagcccaggcacaccgtccccgtcgacgcgtcgccggccggggtgtgaagaatgccacggacaataaggtcgcggttgtagtacaactgtacaaattgatggtacgtgtcgtttgaccgcgcgcgcgcacagtgtgggtcgtggcctcgtgggcttagtggagtacagtgaggggtgtacgtgtgtcgtggcgcgcgcggtcacctcggtggccttgggattgggggggcactatacgctagtactccagatatatacgggtttgatttacttctgtggatcggcgcttgttggtggtttgctccctgtggtttttgtgatggtaatcatactcatactcaaacagtc

SEQ ID NO: 12429 - DNA, 2272 bp, Oryza sativa
  ref <308>: DATABASE ACCESSION NUMBER: AK109777
  ref <309>: DATABASE ENTRY DATE: 2002-08-28
actccaatgcaataacctcctcatcttcaagctctcatcagctagcaatccatattctcagcagagaaaaagatctgcattttcactgtgctttgcagagaaaaaggatggaggagacgtacaccgtgaaggtgggtgaagcaactccggccgccggcggcaagccgtcggccgggccagtctaccggagcatctactccaaggatggcctcatgaagctccctgaagatatcctgtccccttgggacttcttcagtggagcagtcaagcagtaccccaagaacaagatgctgggccagcgcaaagtttcagatggcaaggctggtgactatgtgtggctaacatatgaagaagtgtaccagaaggtcattaagattggatcagccatcagaagcttacgtgtcaagccgggtggtcactgtggcatatatggatcaaactgtccagaatgggttatggctatgcaggcttgcaacagccaaggaatatgctatgttccactgtatgacacccttggtgcaaatgcagttgaattcataatggatcatgctgagatctctatagcatttgtgcaggaaagcaagatacaatcagtattatctgtagtcaagaggtgcagagcccacatcaaagcaatagttagttttggagatgtgacaagtgaactgaaaagagaagctgaacagttaggagtatcttgcttttcttgggaagaattttcttcaatgggaaagcaaaactatgaacttcccaagaaacaaaaggatgacatttgcacaatcatgtatacaagtggaacaactggagacccgaagggtgtgataatcacaaacagagctctaattgccggtgttatgaccacagaacatcttctgaaagtgacagacaaagtggtggctgaagatgattcctacttttcctatctcccattagctcacatatttgatcaagtaattggaaactactgcatttctaaaggagcctccattggattctggcaagcggacattaggtatctcatggaggatgtgcaaatgatgaaaccaacggtattttgtggtgtccctcgtgtttatgatcgtatatacacaggtattaatcagaaaattcagtctggagggatgatagccaaaagccttttccagtatgcatacaactacaaacttggaaatttgcggaaagggttgaaacaggatgaagcctcgccattttttgacaaaatagttttcagtaaaataaaagaagggcttggaggccggatacgactccttctatcaggagcagcacctttgccaagacacgtcgaagaattcatgcgggttaccagctgcagtgtacttgtacaaggatatgggctaacagagagttgctcaggatgcttcacatcaatcgccaatgttttctcaatgattggatcagttggtcctcctgtgacgacaatcgaggcacggttagaatccattccagaaatggggtatgacgcactctcaaatgtgcctaggggtgagatctgcttgaggggtcacaccttgttctccgggtactacaagcgccctgacctcaccgaggaagtattctcagatggttggttccatacaggtgatatcggtgagtggcaaccagacggcacaatgaagatcatcgacagaaagaagaacattttcaagctgtcccaaggggagtatgtagcagtggaggtcctggaaagcgcatacgtgcagtctcctctcgttacatcagtttgggtctatggaaacagctttgagtccttccttgttgctgtggttgtccctgagaagcaggccattgaggattgggctgcacaaaacaacaagactggtaactttgcagaattgtgcaacgatccgaaggcaagaatgtacatacaggatgagctaaacaaaactggcaaaagactagggttgagaggatttgagatgctaaaggcaattcacctagagacaacgccattcagcatagagaaggacctggtgactccaacttttaagctcaagagaccccagctgctcaaatattacaaggattgcattgatcagctgtacaaggatgccaaggtgggaaataaacagtgatggtaaaacagaaccaagtggttattgaatttcatgattattcagaaggaatcatgtacatatcaataatcatgattcaagagttaaaggcctatctttttaagataaagagttaaagcctatctgttgtgtctctagatgtaagaactaatatacatatatatactattctgtcattc

SEQ ID NO: 12430 - DNA, 1432 bp, Oryza sativa
  ref <308>: DATABASE ACCESSION NUMBER: AK109778
  ref <309>: DATABASE ENTRY DATE: 2002-08-28
attggataaccccaacaaaaggaaaagcattggataagatgaacttcaatcaatttgcgggcaaaccttccatggagcaaagggatcgaacgaccgccggaaccccgtcgcacagacgacggcgtcggcgccacggatcgcatcgaccaacttgtctgtgccctccatgacgtcagccctcaccttcaattcagaccacacacatgcatttcgtgctatcatcaccaacaaatcaagaacaacagcacaagctgcacggaacggaacactagtactagtgtgtctctgcgcaactcacgagctggaggtttgggtcctggggcaggcttctgcgggcgcggcccacgtctgtcgtgccggcgaccacgccgaagcccctctccagaagcttctccacgacccgcttgccggtgcggcccgtcgagccggccacgaagacggtggtcgtcttcttggcgtccgacgaactagcgggcgcggagtctatggtggagaccgccgtggaggtgaggctaagctttctggtggcggggcgggggccggggcagaggcaagcgaacgcagcgagaggaaggcgggggcgggcggcggcgatggtgtggaaagcggtggccattagattcgtgtggctcctgttctttgctggttagagatgtttctactattttctactcctaatttctagtagtgctgtggtggtagtaataactaaaaaatgggctcgccttctaggtagcctgtgcatatgacttaaaaaaaaattaatcaatatagcctcttatattaatgagcttgtctatggtgctttctacaggtattctactacaagtagaaacgatctaaaccatccattttgaagggcatattaatacttacaaactatgtgcttaagggtaatttgggtatttgtattttccttttgttttagtctcgtattgctccgaccatctcgccgcatccatccgccgtccgttcctgcacagcccgattccggtggtggcgcccatttcgatcagccggcgttcatcctgccgccgccgttttatctcaccgtcggtgacctcgattatcctgccatcctccgcccctggtattcccgccatcgctgatccctgtctagccaccacggccgtgccaactgactccttgctggcgaccacgcacatctgcgccgatctcctccctatcgaccacggccacgccgatttcttctgccctgacgaccgcgtccacatccgcgttgacctcctcctccaactgaacagctagtatttattttcgattatcatggtacttgtgcgtttgctccaaatcgaatttgatttcttcgttgttgataagaagaggaacctgctactgctactgctgctagattgcatatagcgttgtatacaagttccaattcgatttattggatgtcaatttgatatgg

SEQ ID NO: 12431 - DNA, 1436 bp, Oryza sativa
  ref <308>: DATABASE ACCESSION NUMBER: AK109779
  ref <309>: DATABASE ENTRY DATE: 2002-08-28
cacaccgcgtcgcctgtcaccgaccgccgtcgcacgttcgtctccacgttcgtcgttggggccactgcagggccaggttgaaccagcagccggcggcgacgcggccgttcagcgtggcggtgcgggcggggctgaaggacacgctcttccccgatgacccgttccgcggctcggcgggatgccgcccgcgcagcgcgcgtggtgggtggcgaggtacttcgtgccggcgctggactgaggtgcggggtactccgcggcaagcttctggtacgacctcctcgccggtgtcaccatcgccaacctctccatcccgtagggcatcagctacgccaccctcgccggcatccctccggtcatcagcctctgttagatcacgccaaattaaccgttcatgtcgcggacgaacacctttgatggatgcgtttgtcgattgattgttgcgaacacagatttgtgcttcgtgccgccgctggtgtacgcggtgatggggagctcgaggaacctcggggtggggccggtggccacgtcgtcgctgctggtggcgtccatcgtcggcggcaaggtgagggcgtccgacgacccgcggctgtacacgcagctcgtcttcgtgtcggccttgttcaccggcgtcatgtaggctactcttggattcctcaggctgaggatcctgatggatttcatgtcgcggtcagcaatcaccgggttcatgggtggcacggcggtcgtgatcgtgctgcagcagctcaagggcttcctcggcatgacgcacttcaccaccaggaagtctccacgttcgtctccgcgttcgtcgtcggggccgtcgcgctcatcgccgcggcgttcgccatccctcctgcaacgtcgggcacgccattgccgagcgcgcggagcgtgacggcggccatagacggggagaggcggaggcggcccgcgaggcgggaaatcgctgggggagaagtgggacccgcggcggcggctaggacgcggaagtggaggaggagcgcgagcaccgggagggaggcgcggcgcagcgtggagagaggagaaaagcgtgcgagagagaggggaggggaaagagaggatgatgatgtggccacgctaacatgtggggcccacgtgggtctcacgttgactcagctgacacgtaggataaaaccggggtcaaaaccaccaaagaacctaaattgaacggtttttgcaagttgtgaacggtttttgcggttgggggacgattttgtaactggatgacaagttgagggaccttcggtgtactttttcctttttgggctggaatgataggctttgtctgaccaggcccgtctattgtgtatttggagcggcccgactaacttaaattctgggctggaatggttggcaactcatgtaagaaacactgcgtgtattttcccattgggaccacctatacatttgtcgac

SEQ ID NO: 12432 - DNA, 1580 bp, Oryza sativa
  ref <308>: DATABASE ACCESSION NUMBER: AK109780
  ref <309>: DATABASE ENTRY DATE: 2002-08-28
gatcaactatagcgtctgaggtaaccaacaagctcgtcgatgtagcgctcctcccgttcctggtctccaacgacatccttgatgcggttggcgttgctcgcgaacgcctccctctcgccgcccaccgcgacgcgccgcaccgccgccgcgacggcgtctcggtcgaacgagccgtcgctctcgtccctggcgatctccacgccgacgccccgctccgccatggcccgcgcgatgatgccctggtccaccaccaacggcagcatcaccagcggctgcccgagcgcgacgccctcgatggtggagccccacccgcagtgcgtcaggaacgcgcccaccgcgccgtgcgccagcacccgcacttgcgccacccaccgcccccacaccacgccgcgcccccgcgtccgctgctcgaacccgtcgggcaacacgccgccggcggtcgggctccggatcgcccacaggaaccgcacgccggcgagctccagcccgagcgcgagctcgtggaggtcgttggcgctcagtggcgcctcgctccccagcgcgacgtagatgacggacttgggaggctggccgtcgagccattgcaagacctcggagcggtcgtcgtcgtcgtcgtcgtcggtgacgaggttggtcgtcggcggcaggatccccgcggggacggtgggcttccggaagaggccggtgaggaagtcgaacagctgggggggctcgagctcgtggcagctgctgttgatgatgaggcggcaccgctcctcggttcgccagaagcgttcgacgtcgggcaggccggacgcgttgggcttgaaggcgccggcgatccacccgaactcgcggcggcggaaggcgatggtggaagggaaggggatccacttgggcggcacggtgaagtcctccggcgccgtgcggggataccgggcgttcgcccagcgcggcccgaacatggcgttcatggcggccgggatgatatggaacatggcgcatggcacgcagtgctcgtcggcgatgggcgggagccagtggtggcagaagtcgacgacgatccagtccggccgcttcgcacggccggcgaggaacgccgcgaacggggcggcgaggccgtcgcaggccttcttgacgagcccgtccttgtccggcgtcacgtcggccgtcgactcggcgccctcaggcagcccctccaccgtgtcggcatcggcagcggctggaggcggagacgatcggaaaggctcgccggcaccggcgggagcctggcgaggtttcgcggcgtggagaggaaggagacggcgtggcccctcgccgcgaggcgcttggacagctggaggaaggggatcatgtggccgaacgccagccaggggaacatcaccacgtccaggccgccgccgccgccttctcccatcgccgacgatctctcgctcgccggagtcgtcggagcgagtgcttgtgtgatcgatgaatccaagaggtcggttgatggcgatattattggcgagtgtgtgagctggcagcccggataatttttacgtaaagtcgaccgatttctgttcgaatttcggaatggaataagttcactatcgaaatct

SEQ ID NO: 12433 - DNA, 920 bp, Oryza sativa
  ref <308>: DATABASE ACCESSION NUMBER: AK109781
  ref <309>: DATABASE ENTRY DATE: 2002-08-28
gtcgggtcctcccccaacctccagccgctcgccgccgcgcccgcaaccgccgccgcacctcacgcccgcgcctcccgggccatgtcgtccacgtcgccctcgcgcccgcgcctcccgtgcccacttccccctctctcccgctcgcccgcgctcccgagacggccgggattcgattttcgaatcccgcctctctctcctctcccactcccccacttcggccggcgattcccgcctctcccggccacgtccggccccctctctccctatttaagctccgccgccaccccctctctcttttttcccatttcgccgaactctctcgtgctccccatcgctcccgcgccgtgcacccacccgccgccgcctttcccgccactccggccgcctctagccgccgctaggctcgccgccgcatcgcgccgtcgccgccgtcgggttcgcgtggccaaggtccaccccgtccgcccctcctccgtcgaggttcgccgccggagcgccattcccgccgtgcgccggtcgtcccggaccccgtccgccgcttgtcgacctccctctgtcgctcctcgtcgccggtcgtcgccgccccctccgattccgattcttccgacgctccggtgtacttcgagatagtcgccgaggttcctccagctgcagagcaagaatatgagtgtgtgtccgatggtggtttctccgaggagtaggcttcgtccgtgccatcgaggatgcctgtggagtggtgttcccgctgcagttcaagtcaaggcttagctcctgttatctttcgtttttccgctgcatttatgtaagacttttatgatgtttgtaagacgtggatctgaatgtcaacattgtcgtttgtataccccggccggtcctggacggggattttaatgcacattctgcttggaattctattcggg

SEQ ID NO: 12434 - DNA, 1730 bp, Oryza sativa
  ref <308>: DATABASE ACCESSION NUMBER: AK109782
  ref <309>: DATABASE ENTRY DATE: 2002-08-28
gcgatccaatcccctcctccttggtcatgtcttcgtcgttgattccccctccacttgccgattccgacggcgcctccccgccgccgcactgggttctcatcgacatatggtgctacatcggcgacctccccaacgccaccaccgccgagtccacaaccagcacaggcctccccatcaaggtcaccttccgcaccgcacgcccgccgctcctctcccacctctgcgtccactgcccgggcctcgacttcctccgcgccacgcccaaggtcatcgcctcccacgccgacctcctcctcctcgtcgtccccttcgatcccctcaccgccctctccagcgggacatgggattacttcgtctaccgcgcggccgaccctcctctgctccacctcatcccgcccccgccgcgctccatgcgcttcaacgactccgaggtcgccatcgtcagccacggcgacggcgagtacgccgtcgccgccctcgccttcgccggcactttcctctccgtaaacaaggatttccacctccacctctaccatggcggcaagcagcagcagggtgagtgggtctccaagctcttgacgctggaggatcagctgagagacaagcttgtgcctttgcccaaagcggctgcggagtacaggttttaccaggagacaaggaagacgatcgtgattggcggcgagcgcggtacggtcggctgggtagacctctggcgtggcatcatcttctgcgacgtgctcgacgaccaccccgtgctccgcgacatgcccctgcccctgccagcgagcggcaactgggatcgcctcctcaagcagactgaccccaactacatccgtgatgtcaccgtcagtctttgcagagactccatcaagtacatagagctggagatcgttgggacaggagagacccacaccactgtccagccaactgaatcttaccaggaatgggttcggcgaaagccaaggtacaccagctcagttgttctccgtcgtggctggaaggccaccatttgaaccatgccaattccggtggcttcatgggagcactggcgccgtgattgtcacctcaatgtcaaagacctcagcatcaatgtccgtgacccaagccacctgaagctgctgtctaagctgagtggatgtggccacagcaaagctgcattgcggagcgtagcaatggtattccccaccataagcatggatgatgatcatgtctacttcttttccatagccggaagcacggacaaattggaggccgtggttactgttgatgtaaggaataagaagatacaaggagttgctgagcttgatgtccgaaaatactatttcggtatgtccacctacatcgccagtgagatgtccacatatctgaagaaagtcactacaggcacaggcgaggtggcacatggacaaactgaaagtgcagcaattgaagtgaggcgcatgtgaaaggcgtgggggcccatataaagaagaagaaacattggaagaaagagcatcagtgtacagatggatagatggaagccagttggtgttgagattcaggatgctggtaacattgttggtggcggtttaggagttcatttgtcgtttgcagtatggaaactggcttggggtttatctgcgcctagagagataattgtaggatacgatttattgtgtactagtgaacttttactgcaagctgaagccattttatagaaatggggagctagtagtgataatttggcaagc

SEQ ID NO: 12435 - DNA, 1493 bp, Oryza sativa
  ref <308>: DATABASE ACCESSION NUMBER: AK109783
  ref <309>: DATABASE ENTRY DATE: 2002-08-28
ccgcaacaaaaaaaaaaaaaaaaaaggaaacggcgccgactcctctccctcgaccgccgcccctcctccgacttctctcaccccgtgacccgacgccgccgactcctccctcctccctcatcgcgccgaaaccctagacccgcaccgccctcgaccgccgcccctccgccgtcgtcgcatcctgcctcctccacaccatcaccgcccctcaatccatcctcgcgcctccctcgaccgccgcccctctgctgtcgtcgcatcccgcctcctccacaccatcgccgccccccaatccaccctcgcgactccccacatcgacgcgtcggcgcccccatcgtcaccgtcgaggattcgccatcgacgccctcctctctctcgcactcaccccgtgacccgacgccgccaactattcccaagggagttgaaggagttgtagttgtaccaatttctctccgttatttcccagccgatcccatcgcccatgaccatgttgcccgcctatcctccgtcgctgcctccacgagtcgcctcacgtctatctcctccgcgcaaccatcaatcccgcgtcgatctcctccgcgtcccccttctgcgagccccggccaccaacgacggcgccctctattgcggcaacctcctcctcagccggtgcaatgggaagtgttcgggctgccacaccattaggtgcagtgagactgaatcttggagataaattattgaagaactgaactctaattaagaagatatgcagcgcaattccagtaaccaaggttcagatcaactcagttgagggagaggcagtattgccgccgcctggctgcgctccctcgaagtcacctactacctcaccaggtcggtactacatgcagaccaaggttcagatcaactcagttgagggagaggcagtattgccgccgcctggctgcgctccctcagcatcacctactaccccgccaggtcggtactacatgcagcgacggccgccgtctccactcctagcatgcatgcagttgttcgcttcgcctggatgagtgatttgagtctcatgggtggcgttgtgcgcaccggggtggttgctttcaagcattgggcactggccatgccgtcgttgttgctggtggtggcagcgcaggggatggtgctctacatggcctccaactttctgctcctacttgcttggccactatctatgatgaatttgcctgcggcgtgtggtactgcaataggggaggataaacccatcgaggccatctcaattactggcatcctttgtgcttcacctaggcaatgtacagttagaggcaatagtaaaggtctgattctgcctataaattctaatcattagcctacggtcagtggaagggaaaatttaaaacagattctaaactgagacctaacattgattttatattatggacttaaatctgaaattgattttgcttgatggatttgaaataaaaaagtagcactgcatttgtaatcaatttgaattt

SEQ ID NO: 12436 - DNA, 1909 bp, Oryza sativa
  ref <308>: DATABASE ACCESSION NUMBER: AK109784
  ref <309>: DATABASE ENTRY DATE: 2002-08-28
ctcttaacaaaccagagataccagttcttctattaggtacagctgctgcagttgtagcaggtgttctcttcccaatgttaggtttgctgatctccagttccataaaatcgttctatgagccaccacatcaacttaagaaagatgcacggttctggacattgatgtatgtagcagctggaattgtttcccttgtttccttgccaatggaaaatttcctatttggagtggctggtgggaaattggtggagcgcattcgttctttatcttttaaaagaattgttcatcaagaagtcagttggtttgataatccctcaaatgcaagtggaacaattggtgcgaggctatctgttgatgcttcaaatattcggcgtcttgtaggagactcgttagcgttgattgttcgaagctctgttacaattattgctggatttatcattgcaatggttgcaaactggaggcttgtccttgttgccacggttgtgcttcctttgggaggtctccaggggttcttccagataaagtttttggagggattcagtgcagatgctaaggtaaagtatgaagaagcaactcaagtagcacatgatgctgtcagtagcatacggactgtcgcttcgttctgtgcggagaataggataatgaaggcttactacaaaaaatgtgaagctccggtgcgacaggggatacgtcaagggattgtcagtggcttgggtttcggcatatcattctttgtgctctattctacatatgccctttgtttctatgtaggagccaagttcatgcttgatggcaaggccacattcactgaaatattcagggtgttctttgctttgctcatggcaaccataggagtttcccagacaagtgcgatgggttcagattctgccaaggccaaggcgtcggcatcctcaatatttgccatgattgaccgtgaatcgaagatcgactcgagcagtgatgacggcatggtcttagctaatgtggctggtgagctcgaactccaccacgtctgtttctcatacccatcacgcccagacatacaaatattcagaaatctgtcactgagaataccatcaggaaagatggttgcccttgtcggagagagcggctgtggcaaatcaaccgtgatagcactactggaaagattttacgaccctgattcaggaacagtgacactagacggcgtcgacatcaagaacctcaaagtcgggtttctgcggcagcagatggggctggtgagccaagagcccgtcctgttcaacgacacggtccgcgccaacatcgcctacggcaaggaaggcgacgccacggaggaggagatcgtcgccgccgcgagggccgcgaacgcgcaccagttcatctcggcgctgcccgggggctacgacacctgcgccggcgagagggacgtccagctctccggcgggcagaagcagcgcgtggccatcgcgagggccatcctcaaggaccccaggatcctcctcctcgacgaggcgacgagcgcgctggacgccgagtcggagcgcgccgtccaggcggcgctggagtcggtgatggtcggccggacgacggtcgtggtggctcaccggctgtcgacgatcaggggcgccgacgtgatcgccgtcctcagggacggcgaggtcgtggccacggggaggcacgtggagctgatggcgaagaaggatggcgtgtacgcttcgttggtggagctccgcatgagctccgaacgcgccggtgactccaagccctcgtgaccatgagcacacggtggttgccgtcaccgtgctgctgcatgccaagactgtacataggattgggagtaaggctgcgttctttcttcttgtcaacagtgattacggaaaacggagcgatccattagcacatgattaattaagtatctgctattcttttt

SEQ ID NO: 12437 - DNA, 2041 bp, Oryza sativa
  ref <308>: DATABASE ACCESSION NUMBER: AK109785
  ref <309>: DATABASE ENTRY DATE: 2002-08-28
acatgcctaatgagaggaaaatatagaagagcgcgttgacaccgttgactttggattttccgtctccttcctccgaagtgcagagaagaaaaggaggagctgagctgagctgattgcttgattcctcgctcgttcaatctactctaatctatctctataggaagggaaacccaaaccataatgcaaagccgtctcgcagaggagttgcgagcgctgaagttcgaccgtgtttggcggccaagtcctcatcgctcggaatcggatggcggcagctgcagctaccgcaactcgatccagcgggtcgtcaccgcgtccgttgccgccgcgtccaccagcagcaccaccctcgtcttcccgtcgagtggctcggtcacgagctcgtcttcggcatcctttacctcctccgctcccggctcggaggcgcacggtactccaagctccgggcctgagagctacaggttgctgcgcggggaggcgttccggggcctcagcgagatcgcgagtcatatggtcagcgacaggtacaccgagaggctaataacggagttctcccggccgcggctggggagcggcagcggcggcggcggcggcggcgacgagatactgcagacctggttctccgaccttggcgttgactgggttctcagagtcgacgagatgaacctgcaggagaagccatggagcggcgtggaggagatgatcaaggggtggctcgccgcgctcaccgtcatggcggaagccctccgtctgacgaaggccaccctcagcagcggcgatggcgactccggcggtgtcattccggtgcttccgatcgagaagtacaggccacagatatctgcaccggcgtggatcgacgacgaccacgccggtgttacattacatgatgtaagtcctggctctggctcgtcgaatctcgaccaagaaagctcagatccggctccaaacacgagcaggagcaggagcattgccattgctacggtcaagcaagctataacagcgtattcccaagcggcgtcatcgaggtcctacaggtacgaccagcacggagctgcagggcctgaattccaattcgcgctcttcgccaaggcaagcctggtgaagatgatgtgcttcccggacgctatcgccgcgctgagcagatcgccggagaagatcctccgcgtgatcgacatgtacgcggtggtctcgggcgtctccccgagcctcctggcgctgctccccggagcgaccaaatggttggtttccgagaggatcacggccgtgctcaagacgctgagcggcatgatgaggggcatactccatgatctggagagtctgatccgagaggaggattcgtggcggacgacggcgcaggggaacgacatccacccggtcaatcaaatcgcgacgtgctggtccaggagggcgaggacgacgacggcgacgacgagctgttctccatcggggagctataccagctcgcggaggagaaatcgtcgctgacgagcaccgtcgccaggctgatcaactcggtggacgccatgatcgaggacaggtccaagatgtacgcagccgccggcgggcggatgcacatcttcctgctcaacaacgaccacttcatactgcagcaggcggagccttcgttgcagtcgttcatgggcgcctactggtacgcaaagcggaagcagcgggtcgatcggcgcatcaaggagtacctcgatctgtcctggggaaatgtcgtctcgtgcctggggtacgcagggcagagccgcaggaggtcgtcgcttttccgtagtgtctcggcgctggtggagttcaactccttgttgcagataacctaccacacggagaagctctggaagatcaatagccctcagctgcgaaccgtgctgcgcaattcggtgtgcgggaaggtaatctctgcttaccgagcctacctggagactcagggacagggcggccagttaggaacatcagccacgtatacccccgaggatctggaagatatgttgcaaaatctattcgaagggtgaacctttcttttccatatatatggagtttt

SEQ ID NO: 12438 - DNA, 1403 bp, Oryza sativa
  ref <308>: DATABASE ACCESSION NUMBER: AK109786
  ref <309>: DATABASE ENTRY DATE: 2002-08-28
aaagccacaagcaattcaacgagttacaccttccaccgtcaaccgaggagctttcagttgttgccggccatggcggcgaagctctccttgctacttcccgtcacctgcttcatcctcttcgttctgcatgctgttcatgtggaggcgcgtcccgatcctgccgctttcggcgactccgacaacgggttctacacgctgttcgtgttcggcgattcgttcgccgacaccggcaatctccccaagcgccgactgagcgagcagtcgcgcgaatggtactacccctacggccgtgaccgtggcaacaaccgcccaaccggccgcttctccaacgccatggtccagtccgatctcatcgcacggatgctggggcgtcatgaggcgcctccgacgtacaggagggtggacaactacgtgcacccgcacggcatgaacttcgccgccggcggctccggcgtgttcaagctgccgagcggcgcgccgacgctcgacaagcaggtcgaccacttcagggacctggtgcaggacggcaccatcacccgccggaacctccgtaactccatcgccctcgtcgccgtctccggcaacgactacgcccgcctcgccaacgtcaacgacactagcaagatgatcaagtttgtcgatgaggtgacgagcgagatcgcgaagcaggtgcacaggctgaagaacaacggggcgaggaagatcctggtgaacaacctgcaccccgtcggctgcacgccgtgggtaaccaggccgggcaactactccggctgcagctccaccggcaacatgggcgcctacctccacggcagcaacctccaacagaagctctcgcacctcgactacgtccaccatgtcgacctcaacactgccttctccaacatcgtcaatcccgaccaaggttcgaagcacaaggtgtcgagccagttcgagcacaagatgcagccgtgctgcgagagcttggacccgaacggcttctgcgggcagaagggacacgatggcaaggacctgttcagcgtgtgcaacgatccggagaagtacttctactgggacgatgtgcaccccacggaggctggatggaaggccgtcatgcagcagctggaaggtccaatcaagaaattccttcgaatcaactagaaattgagatgggcgttaattaggtttagagtgttttggtttagggttaattttttactatcagtttgtgagagttagttatatatgttagtaaattaggtaaagatcccgattggcttgatcggtggatattttgtttagctcgtgttttattgaacatctcgtttcgtcagtcctttgttagtttattattatactagctgggctgggactatatcgaccgaacatgtgaatttggcccacgtatctgatacttctatctgttc

SEQ ID NO: 12439 - DNA, 1627 bp, Oryza sativa
  ref <308>: DATABASE ACCESSION NUMBER: AK109787
  ref <309>: DATABASE ENTRY DATE: 2002-08-28
atgggtaaaattgggtaggattaccaactgcaaatgtctgtactccacagcggaaatcgcaaatcaaattaacgagcacaaaagacgaacagggatctacagtcaggacgaagcgaagcgccaggtatggaggatatcaactgcggtgagtgatgattgatgagagattgctcatgtacagtcgtcgtcctcctcttgcggctgatgccgttgacgctgttgctgccactcgaggatggccgagcggagcgccctgttcgggatgagctcgcggtgctcgagcgtcaggttcgtcatcggcgacgtgtcgtggccgctgtcgagccaccccttgatggcctcggcttcgtacgtgaacccgtccgccgcgatgaataatttaatcacggattttttgctacctgaaagatcgggcagacgaagtaggacggcggcggggagtcgtccggccgggccacgaacgacggcctcccggcggtcagcgacgcggccttcatgaggggctcgacgaccttccacacgtcggtcgcgagatccggccggcgcctccggctcatctcggcgcaccgcaggccgaggtgcgcgagctggttggcctgcacgaacggccagctccccgcggagggatcgaggatggagtgcagcccgccgctctcgatggcgtcctccacaacctcggcgatcttctggggaggcttcccggtcagcagccgcaggatgatgattccgagggagtacacgtcggagcgcggcgtcagctcgccggtggtgaggaactccgggtccatgtacgcgaaggtccccttcggtgtggtcgtccggtacaaccgggtggtggcggcggcggcggcgccggtgttcgtctgtatcaggagccggcagatgccgaagtcgcccagcttgctgacgaagttggcgtcgaggaggatgttcgccggcttcaggtcgccgtggacaatcgggtgcggcttgttcgagtggaggaagctcagcgccgagcacatctcgtagatgatcctggtgcgcacctgccatgtcaatggcggcgtgttgttcaggcaggccaggcggtcctcgaggctgcctttggggaggaattcgtacaccaagccaaatgcctccctgcaagagccgatcaaagtgacgaggtttggatgtcgtactctactgagaacagcaatctgcaataatggtgtcaattgcttggttagccatggttgccaacttgatttgatggagttatgtgagtgatctgatgaactggattacctcctggtcgaattctgattgaccttgcatgctatgtgggtgcagcagcttgatagccacagttgtgttgcggagtgtgcctttgtagacgctcccaaaaccgccctcgccgatcttgagttcttgatcgaagcctctggtcgcttgttcaagctcataagaggagaactcggtgtttagatcttcacccggcatggaaattctctgtttgttcttcaggcgcaagtcttgagattcacttactgcggcatctcgctcttgttgtagcttctctttatctgcttggagcacttggagtagatacttgctctctgcgagcttctcttcgcgttcttttaaaactgaacgaatttcagtt

SEQ ID NO: 12440 - DNA, 2846 bp, Oryza sativa
  ref <308>: DATABASE ACCESSION NUMBER: AK109788
  ref <309>: DATABASE ENTRY DATE: 2002-08-28
attttccccttctccatcttcttcctcctcctccccaactcgcgccaacaatggtcgtctccacaaactcctcctcctcctcctctcctccaacccaatgtctccacctcacctcctcctcctcctcctagccctcctcctctcgccgcccctcctcctcgcctcctcctccttccccctccccaccatcgccatcgccgccgtctccaactccagctccaacccctccaagcagcatctcgcgtgcgggctcgtgccggcggcggggggcgcggcggcggggtacaggatctcgtgcgccagcgtgtcgaacaggtcggcggcggcgccgcacgtgtacgcgtatggcggggacgggacgtgctcgccgtactcggcggtggtcgccggggacgggtacctgtgctcggctgcgccgacgtcgtcgccgccaatgtcgatgcggtggtgggatctgaacgaggccggggatgcgtcgaagcgggtgtacagggggcgggtgctctcggcggtgtccggcggcggggagtccgtgtgcgggctcgtcggggagaggatgcagtgctggaggtgcccgtggggggagggcgcgccggcgagggtggggttctcggcggtggcggtgggtggcgggttcgtgtgcgggttggtggtggggagcggggaggtgaggtgctatggtggaggggaggtggtggggagggagcccgcggggaggaggttcatgctgctcgccgccggcgagaggcacgcgtgcggcgtggatgatggcggggtggtgggttgctggggggaggcggcggcggtggcggccgcgtcgccgccgaggatcagccgcgcggtgtcgacggtggcggtgggcgacgcggtcacgtgcgtgctgtgggggaactggacggtctcgtgctggcccgagggggaggcgtcgccgccgccggcgctggcggggcagcagttcgtcgcgctggaggcgaaggggaaggtggtgtgcggggtgctcatgtccgactactcgctgcagtgctggggcgcaggcgtcgcgggcggggtgaggaaggtgttcgacaaggtgctcccgggtccgtgcgcgccgtcgaagtcgtgctcgtgcggcgtctggtcgggctccgcgcagctctgcgccggcagcggcgggggaggcggcggagacgtgtccgtttgttacccctgcggctacacccctcctccgatggcgctgtccccgacgtccaactcgtcgtcgtcgtcgagctctcaatcgaaggggaagcgtcgcccgagcaatctggcgatagcgttgatcagcgccggagctggatcggcgctcgtggcgctcctcgccgcgctcgcggcggtttactacctgcgccggcaccgtggcagcagctcgccggtctccgggcgcatccacgccgagccgacgggcacggcgccgcgcgtggagcggcggctcagcgcgctgctctccaagggcccgaacacgacggtcgagcagttcccgctggtggcgctccgcgccgccaccgactgcttctcgccggcgaagcgcatcggctccggcagcttcggcgcggtgtaccgcgcgtccctccccgacggccgcgaggtcgccatcaagcgcgccgagcgccgcgacacggggggcccttcctcctcctccgccgccgcggcgcggcgcgtcgaccacgaggcggcattcgtctccgagctcgcgctcctctcccgcgtcaaccacaagaacctggtccgcctcctcggcttctgcgccgacggcggcgagcgcatcctcgtctacgagttcatgcccaacggcaccctccacgaccacctccacaggcgtgcggcgtcggcggcggcgccgctctccccgccgctcgcctcctggccgtcccgcctccgcctcgcgctcggcgccgcccgcggcatcgagtacatgcacacctacgccgtcccgcccatcatccaccgcgacatcaagtcctccaacatcctcctcgactcctgctggaccgccaaggtctccgacttcggcctctccctcctcaacaccctggacggtgacaatgccgccgccggcgacggaggcaatgccggcgacggagacgacgaggagcggtgcgtgacggcggggacggtggggtacatggacccggagtactacaggctgcagcacctgacggacaagagcgacgtgtacagcttcggcgtcgtgctgctggagctgctgtccgggtgcaaggcaatccagaagtacgagggcagcggctcgcccaagaacgtggtggacatggccgtgccgcacatcgagggcgaccgggtgcaccgggtgctcgacgcgaggctgccgctgccgacgccgtgggagatggaggccgtcgcctacgtcggctacctggcggccgactgcgtcaggctggccggccgcgaccgccccaccatgagcgaggtcgtgggcgtgctcgagcgggccgtggcggcgtgcgacgagtacgaggaaggcggcgccggcgccggcggcgagcccgcgctgtcgcggtcgtgcaccgatgggtccacggcgacgtgacgtggcatgtcgtggaatggaatgcccccatttgcatggttggcctcccttgcgcaagaacaacggggaggagagttttcttttgaggattttttgtttgttttattgttattgcttagcattagtcacagaacattcattagtattttatagaaaagaatcaaaattttagtgtaaatggtcttctgacattgttttgatttgaaatatttttgggttttctccccccttttttgttcttttctggtcttaatatacatatattgaagtcttcctcgac

SEQ ID NO: 12441 - DNA, 1360 bp, Oryza sativa
  ref <308>: DATABASE ACCESSION NUMBER: AK109789
  ref <309>: DATABASE ENTRY DATE: 2002-08-28
aactaccgatcaatctgaatgatctgaccttagtttctgctagtcctgagctgcgtcagcttggtggccatggccggcatcgtcgacgaggggtcctgcttgccgcacttcctctccctgctgccaactctcgggctgccactgccactgccgctgtccgttcctaacccgatggacagcttgctcagagccttccgtgcgtcggtgcagtacttcttgctcgcgtcgagcagcgacgacacgccccatccacggcttgcggcctgccattcctcgcggctcctcttctcgccacgcggccgcggcaagtctcggccgccgctgccggtcttgttctcctcctgcattgcgtcgcgtagggtgacgaacctgcggctctgtgaggacgaagggttgctggcgccggcgagaggggacggcgcgtactgcgccggcgggctcctgaacccgcaaacggcgggcttggcgctccaggggaagaacaccatgagcccgcaggctctcggtgacatctgctcgtcgcggccgttgatgttgatgcgcggcaaaagctgcacctggacggggtggtcgttgctttgcctggccgtcggctgctgcccgtcgtgatcgcggcgcgtggtgcgtcgccgccagtgtttcgggcctctgcccgaggacgaggacggcgtggcgagggaggcttccgctggtgcacggcgggaggaccggtcattgacgaagctcgtggcgcggccgaggaagatgtcctcgaagcgcttggacgtgatccggtcgaacgagccgacccgctgatcgggcgtggagaccctgtccagggcgtcggagaacgacgcatcgtcgtcgtcgctgctcgcggcggtcgagttgccgtagccgcaccagttgctgccggggcactgcttccagcgcccaggcggcggcttcggcggcggcatgatctcctgcgccatgtgcatgcacgcgctgctcctcttgggcaccccaggggagctctcccaggaaaacggcacctgcgtgcgcagcggggaggcttcgcggcggcaccgcacgctggccgcgtccgccgaagcgcacgaccggcgcggcgtggggagcggcgagtcgagcagctgcgggagcttctcgccgtcggcgccattgcaccgcagcccctccttgtcccgcctggtgacgatttccatgggcattgcgccgactgactgtgtcggcagcatgcatcgtctcgggcgttcaacgtgtggaggggacgacgtataagagtacacgcgaagactgtaggtagaggtgcttttcccgcgaaaagtggcagtagcggcggttggacagtaaccttcgtgtatggttgtgtgttcatctc

SEQ ID NO: 12442 - DNA, 1393 bp, Oryza sativa
  ref <308>: DATABASE ACCESSION NUMBER: AK109790
  ref <309>: DATABASE ENTRY DATE: 2002-08-28
agatccagcatccaggcggctactcgattcaatccgcggcgagagtgaggatgggtggcagcgccgccgccgccgccgccgacgccgtcctccggcagcagcagccgccgtggcccttcgtcgcgttggtcatcgtcggcgccatccacgtcgcggcactcgccttccgcctcgcctcccacctctgcctctgcctgcgccgcccgcgcgacctccgccgccgctacggcgcctgggccgtcatcacggggccaacgtccggcatcgggcgctccgtggcgctggagctcgcccgccggggcctcaacctcgtcctcgtcggccgcgacccggccaagctccgcgacgtctcggaggccatctccaagctgggcgacggaggcgtggagaccaggagcgtggtgttcgacctggccctggcgtccaccgcggagggggacgaggcggtgcggcggctgcgggaggcggtggcggggctggacgtcggggtggtggtgaacaacgcgggcgtggcgcggccgtgcgcggtgtacctgcacgaggcggaggcggaggcgtgggtgaggatgatacgggtgaacctgtgggcggtgacggaggtgacggcggcggtgctgccggggatggtggcgcgggggaggggcgccgtcgtcaacatcggctccggctccacggaggccatcccttccttcccactctactccgtctacgccgccactaaacggtacgttgctgagttctcgaggagcctttacgtggaatacaagagcaaaggaatcgacgtgcaatgtcaggctccgctgttcgtggcgaccaacatgacctccggcgtcgcgaaggccggcggcggcggcgacgacgccgccgccaaggggagcaagcggcggcagcggcggtggctctcgccgctgttcgtgccgaccgcggacgcctacgcggcggcggcggcgcggtggatctggcacggcgcggtgtgcatgcccaacctctgccaccggctgcagtggtgcgtgtcccgcgccgtgccggacgccgtccacgaccgtgtccgcctccgggagaacctccgccagagggccctcttccagcggctgcgtcgccggccgccacctcctgatgatcaaccaaaggcaaagatcgatggttgattggtcattggtttagttagctcgttagctagcctcgcgcgctgcatatgtagctatagctatatagctagctcgttgggtgtttctgcctgagctctctgatgagtgatgactgattgagcagaggtgtaaaactagcgtaattataaaaaaaataaataagccgaacattaaaattgggcatggaaactcatgattgaaaccgaagtagtaggttctaatctgtgagtattaattaattagcc

SEQ ID NO: 12443 - DNA, 1855 bp, Oryza sativa
  ref <308>: DATABASE ACCESSION NUMBER: AK109791
  ref <309>: DATABASE ENTRY DATE: 2002-08-28
cgcaggtgttcgaccaagaaaaaaccgcagcagccgccgcccgccatggctgccacggcggcggagaccgccgccgccgccaccgccaccgccggcggctgcagggtcgtgcggtggcggcgctggacgttcgccagcctgggcgcgctgctgtccaacctcggcccggtgtggttcctcatcgcgccgctgctcgccgcgtacgcgccgcggcggctgctcctgacctacttcaacctcgtcctccgccgccgggcgcgccgcctgctcgccgccgtcgacccctacgtcaccgtcgacatccccgaccccggcgccgccgacgcgcaccagcagtactaccaccaccgctccaggctcggcggccgccgcgccggcgacaacgcgtacgaggaggtgaaggcgtacctgagcgccgcgtgctcgtcggaggcccgcgagctccgcgccgaggccgcggcggagggccgcggcctcgtcgtcagcatgcgcgacgggcaggacgtcgccgacgagttccgcggcgccaccatgtggtggtcgtcggtggacgaggagcagcagggcggcggcgcgcggcggcgcagccagcggctcacgttccaccagctccaccggcggctcgtcgtcgacgagtacctcccccacgtccgccgccgcggccgcgagctcctcttccacaaccgccgccgccgcctctacaccaacaacaagagcctcagctacagcagcgtctaccacaaggcgtggagctacgtcaacttcgaccacccgaccacgttcgagacgctggccatggagccggccaagaaggcggcgatcatggacgacctcgacgcgttccggcgaagcggggagttctaccgccgcgccggcaagccgtggaagagggggtacctcctgcacagcccgcccggcaccggcaagtccaccatgatcgcctccatggccaactacctcgactacgacatctacgacgtcgagctcaccatggtgagcgacaacaacgacctccgcaagctgctgatcgagacgacgagcaagtccatcgtcgtcatcgaggacatcgactgctccctcgacctcaccggagaccgcgccacgcggcgtcccggcgagatccgcggcggcggcagcatggtcaccctctccggcctgctcaacttcatcgacgggctctggtcggcgagcggcggcgagcgcgtcgtcgtgttcaccaccaaccacgtcgagaagctggacccggcgctcatccgccgcggccgcatggacatgcacatcgagatgtcctactgccgcgccgccgcgttcaggacgctggccaagaactacctcgacgtcgacgcccaccacctgttcgacgccgtggacgacatactggacaaggaggacatcacgccggccgacgtcgccgagtgcctcatggcggccaagcgctcctccgactccgacgtgacctcctccctcgagttcttggtcgacgagctcaacaagagagcaatggagaacgccaaggcggtggccgaagcgaaggcgagggcggaggcggaggcggaagccaaggcaatggctgacgacgactcggaggaagacgacgaccattattcggatgattacactgacgacgacgactacgacgacgattgattcaagctaagaactcaaaatgcacaagaagatacaaagaatcaacggtcaattctctgcgaaaactgatactgttgcactgactgatgtgtagctgttcgaacttcgaaacgaaatttaaatgtagctggtgtttggttcatttcctgtaaattcaaatgtaagatactaagatgaatctaattagtagggatgattgagttgatcc

SEQ ID NO: 12444 - DNA, 1662 bp, Oryza sativa
  ref <308>: DATABASE ACCESSION NUMBER: AK109792
  ref <309>: DATABASE ENTRY DATE: 2002-08-28
aatcaaaacctctcctcccctcttctgctgctgctactactactggtctactgcctctcgcctcgcctccctcacgttggatcccgtggagttgagatgattcgtagggaggcgtaggttgtggtcgttgttgcggtttggagttgcaccggcgagatcgagagaaaggggtggttcgtgggatggattccggcaacagcgggagtctccagtcgtcgagtggaggggacgacgagttcgactccagatgcggcggcggtggcgtggactcgtcgccgctctccgcgctgctgcggcagtcggcgtcggcgtcggggttcggtggtggcactggctcgttttatggcttgcaggagctcgcgtcgccgccgccccagctgccgcccttgtctcaggcggcggcgcatcagtggacggcgccgcttcccggtggaggtggagcggggggagcgtcgtcctcgccgccgtcgtcgtcgtcgccgcacggcgtgcaggtctctgccgagcaggtggtggcgcagcagggacagggggtcggcgcgccgccggcgagggggtcgaggaagcggacgcgggcgtcgcggcgcgcgccgacgacggtgctgaccaccgacacctccaacttccgcgccatggtgcaggagttcaccggcatcccctcgccgcccttcgccgggccacccgcgcgctcgcggttcgaccacctcttccccgccccctcctccctccgctccgccgctaccgccgccggcggcgggaacccgtcctcgctcccggcctacctcctccgcccgttcgcgcagaagcaccacccttccccgttcccgcctttcccctcgccctccacgtcctcgccgtcgccgtccaacattgccattgcaacctccaccgccgccgcaaccacggcggcggtggcggcacccggcgacaggtaccacctcgcgtcggcgccgtcgtcctctctcctagggatgcaggatcacggcggcagttacctctccttccagagccacctcggcggcgcccagctcggcgccagcgacgacgtcaagtacaccgcgcacaccatgttcgacgctcccggcagcgacctagccccgcggccgccgccgcagaggctgcaggatccggcggccggcttcctcggcctcacgcatggcatcatgggcgccgacgggtcgcacatgcaccagcaacaacgaagccgcggccacggccacggcggcgacgagctgtccggcgtggtcgggggcgcgtccatgacccggagcgtcggcggcggcggcaagaagacgaccttctcgtccggcgccggcgcggcggcccacgcagcgcctcaactggagcacaatgcggagagcacgtcggtcaccgtcgccgcagcgccgacaccttcgtcggcggcggcgacggcggcgatgagaacgcaatccgtggactcgtggatttgtacatcggagtaggtcaattcactcgcttcattatattccaagagcagattggcttgtagtagtaaagctcatttagctagtagcttaatttcatttggttctttaatatcttattaatctctactactcctttgggtgtttaattcccctatttgcatatgctctttgtgtagatcgatcaaaccaaacaacaagatcatactatcatagt

SEQ ID NO: 12445 - DNA, 1693 bp, Oryza sativa
  ref <308>: DATABASE ACCESSION NUMBER: AK109793
  ref <309>: DATABASE ENTRY DATE: 2002-08-28
agggcgatccacaatatctcgtcacggtctgggcctctggggcgccatccaccggcgatctcggccgccgcccgccaatggccgccgccgcagcggctaaacccttcccgttcctcgccgccgccgccgccgccgcctcacggtccccacttcccctctcacccgcggcacggccggccccagcctcgtcccgcttcggcgaccgtcgcgctcccgcggtggtcgctgccactgcccgccgccgcggcgcccatggggttcgagctctccggccccttctccttccccgcgcctccgcttctccctccgcgaagaccgcggcaggaggcatgtctgacccggagctaaggatggtgctcgagctcgccaccgacgaggagctgatggagttcgaggagatcctatacggtaccagctattttagcccactgctaaaatcaattgcaaaaagacccaattcagattatgtcgatgctttggatgatattgaggagagagatattttcatctcaaaattagagtcgaggttcctgtatcttgctgccgatgcccgctcaatcataaggggatctcgaccatcatacaggaatgtcttacttggagtgagaagagaacttggtgttcgctgctctagtaaattatgcacggcagaccttgaggcagaaatatttcttcacctgctagatgaatattcgagaaatctccaaaagacaactctagccttggagttaacaagtggatggtgcttactgattctgcttggaagattggagcaaaaggactagaaagtgcattcttgaagggtggtagtgcattgactctgaaaatgatctatgaatcggtaggtatactgttttatgaagttagattgattttactttttcttacagcatcattagacattaatggacttatcatcatggtagttagccaagagactatctggaaagctgctcatggaggctggtaaatatgagataaagaaagaacttctaaagcagggtggacgattagctgctgttaatctggagtctcgagctggtttgcttgcagctaggcagggtttggcacgtgcagcatctagatatgttggtcttaggagtgtcatgacgtttcttggaccaataatgtgggggacactcttggctgacattgtgatccaaatgcttgggacagactatgctagaattgtgcaggcaatctatgcttttgctcagattcggctgactaggacatcttacatagaatctcatgaagaataatcaacagtgggacatttctggtctggactaacagggcattctgggcccatagtgtacattctgatcatgcagaacatttttggttgagtgctggcgcaattctcccaagaggactcgaggacagtaagttcatactttcacagaagttgtgcagctgatgtaaatgcatagaagttagatgacagaacaattgatagatgctaggtaggatagatggtacagatgacacacaaatcatctatgcttttgaattctccaaggtttaaggctgctgcttaagtgagagcttgttatacattccaggaaaaattaatttactgccactatagaatggtgtaattgtatttaagaaatagctcacaatgaccattagggccacctactctctaaacgcggtagttgtgaatgaatatacatccacttcacacttc

SEQ ID NO: 12446 - DNA, 1532 bp, Oryza sativa
  ref <308>: DATABASE ACCESSION NUMBER: AK109794
  ref <309>: DATABASE ENTRY DATE: 2002-08-28
aaaaaacgcaacaaatcacaccgtcttcggttcggcttcgtgctctggtcttggctccaatggcggcgtttctggtatggattctcctcttgttaccgtacgttgccatttcgtccacggcgagccatggcgttcgtcttgagctcacgcacgccgacgaccgcggcggctatgtgggggctgagcgcgtccgccgcgccgccgaccggagccaccgccgcgtgaacggcttcctcggcgccatcgaggggccgtcgtcaacggcgaggctggggagcgacggtgccggtgctggtggcgcagaggcctccgtgcacgccagcacggcgacgtacctcgtcgacatcgccatcgggacgccgccgctcccgctcaccgcggtgctcgacacgggcagcgacctcatctggacgcagtgcgacgcgccgtgccggaggtgcttcccgcagccggcgccgctgtacgcgccggccaggtccgcgacgtacgccaacgtgtcgtgccgctcgccgatgtgccaggcgctccagagcccgtggtcccgctgctcgccgcccgacacgggctgcgcgtactacttctcctacggcgacggcacctccaccgacggcgtcctcgccaccgagacgttcacgctcggctcggacaccgccgtgcgcggcgtcgccttcgggtgcgggacggagaacctcggcagcacggacaactcctccggcctggtcggcatggggagaggcccactgtcgctggtgtctcagctcggcgtcaccaggttctcctactgcttcacgcccttcaacgccaccgcggcgagcccgctcttcctcggctcgtcggcgcgcctctcgtccgccgccaagaccacgccgttcgtgccgagcccgagcggcggcgcgcggaggcggagctcctactactacctctccctggaagggatcaccgtcggcgacaccctcctcccgatcgacccagccgtgttccggctcacgccgatgggcgacggcggggtcatcatcgactccggcacgacgttcaccgcgctggaggagcgcgcgttcgtggcgctggcgcgcgcgctcgcgtcgcgcgtgcggctgcccctggcgagcggcgcgcacctcggcctcagcctctgcttcgccgcggcgtccccggaggccgtggaggtgccgcggctggtgctccacttcgacggcgccgacatggagctgcggcgggagagctacgtggtggaggaccggagcgccggcgtggcgtgcctcgggatggtgagcgcgcgggggatgtcggtgctcggcagcatgcagcagcagaacacgcacatcctgtacgacctcgagcgaggcatcctatccttcgaacctgccaaatgcggcgagctttaggattcgcatgatcaaagagatacatgaccatatgtacataacttgaattttctatcagttgcttttgcaattattctatggaggtgttttcgttcccaaggcgacattccctctgtttattgcatgtcgagaaacacacttttccct

SEQ ID NO: 12447 - DNA, 1623 bp, Oryza sativa
  ref <308>: DATABASE ACCESSION NUMBER: AK109795
  ref <309>: DATABASE ENTRY DATE: 2002-08-28
aatcgagctggtagtagccggccagtagcactctgagtgcgtgcactactagtgctcctgcaggcaaggctggacgggagtgggagtgtgtgtaccagtactagctactagtgaatactgaataggcagcagcaacagcagcagcagctaattaagcatcagacagaaactagaaagagcgagcacgccactatggatatgatggaggaggaggctgccaacgccgccactgctcaagctgctgctgctggcgacctcgccgacgtcgtggcccgtgccaatgcacgcgcattcctcgtctccacccctcaccatcacccctcacctctgcatcctcttcctcctcctcccatgcctcaggcgcctcaccaatactatcccgccccccagatcaccatcccttaccaccaccaccaccacggagagcttcggcgccctaccaccatcgcttacaccgacgcacctgtgccgttcgagacggcggggccgccatccacggtcgtcgactcataccaccacctcacacccggcgacgccggctacgggatgccgcggccgcttgctctccagatctcccagcacgccctctgtggcggcggcgacgtggtgatgggcggcggaggcgcaggcgctgccgatgatggagaagaagccatcaggatctcgccactgacgccgtctgctcatcatcaaatgatgaaaaggaagaatgaggtgaagaaagtggtgtgcatcccggcgccgccagcgacgagtagccgtggaggtggaggagaggtgatcccgtctgatctatgggcatggaggaagtacggccagaaacccatcaaaggctctccttatccacggggttactacagatgcagcagctcaaagggatgtatggcgaggaagcaggtggagcgcagccgcagcgaccccaacatgctggtgatcacctacgcggcggagcacaaccacccatggccgatgcaacgtaatgtgctcgccggatatgcccgttctcatcacagtactcatgctactgcctccagcagccgccacaagcaacagcagcagcagcagaccaaccagctgcagcctgcactgatcacaagctcatcgtcttcttcctcctccccattcaatctctacgccgacgtcgtgctcggtggccaacaggccaacatgatgatgacgacggagggcgccggcgctggacttggcatccaaccttcagcagctgatgaggtctttgcagagctggaggagttggagcctgataatcctactatgatcaatgcaaacatgcaggtgtactccaccaccagcaggccaggggtaagcagctatgatcatcagtggcacaagttctaataattaaaccatgcagtacctatatatatatatatcagaacttcaatattcgagagaggagatcagaggaaattgaattctagcacgtacaattaatacatcatgactatgcaaaatttacatatatatgatatgatggtcgcctgtgcgattattagtgaccaaattaaagattgtcagagatataggcgtgtacttacgcttatatgtatcacgctgaggtatactgtatttacaagaagataaataaaatatccatatccctct

SEQ ID NO: 12448 - DNA, 1726 bp, Oryza sativa
  ref <308>: DATABASE ACCESSION NUMBER: AK109796
  ref <309>: DATABASE ENTRY DATE: 2002-08-28
acaactcatggcttcgaagtccaaactcaacactacaagccagtaagtttaactactacacatgcacggcacgatttacacctctgaaaaagagggggaaaaaaaagaaactgacgaatttacacttcggcgacgaactgtacggaagaaagagcgtacgctcccgcctagttgatgccgaggaactcgctcatggagagcaggtcgcagagccctcctcctccctgcatgtgatcggccgcgtcgtcgaagtcccagcagaagccgccgtcgcccagcccgtgcagggagtccacggcgccgccgcacgggacgtcgacctgcaccgacgacgagccctggtagctcaggcccggcgccgtcccggcgaggctagtcccgtagtccatgtcgaaccagtcggcgaacatgaccttggggatcacgggcgcgtgcggccggacggcggcgagccccgccgcgggctcggtgaggctgctcgagtcgtcggccgacgacgactcgaccggcccggaagactcggagctcgccggccggtcagcggcgacgcgttcttggccggtctcgctgcggttcgggctgccggtgacgacgtcggccggctcggcggattttctggccgcagcctccgcgccttcgactcgcttcttgagcgtgcaggttcatgacggtttcttcttcctctcgggaaaacatgccgtgcttcagccccggcctcaggtaattgatccatctcagcctgcaactcttgccgttacgctgcagccctgcatgaaaggcaaattcagaagagaattcagctcaccagacaaggtacatttgacgaaaaaacacaaaagctcaaacaggcttcatctatcgtcctgaagctgaacaacactttgcaaatagtaggaaacaaaaaaaatcccttctccccttcccttaaatcaaggtgcatttgaaaaaaaaaagaaaaaaacgagagcagcaacaagcaaacaggggggttttgaagcaggacacaggtgcaatgcattcaggcgtacagcagttgcaaaattcgcggtgaattccccggcgaaatcgtcgcaggcggagctcggaaccgtggtcttaccggccttcacggggacggcgctccagcagccgtggccgtagcggaggatgaagtcgcggagcttctggtcctcctccggcgaccacaggcccttccggtagtgcaccttgggcttctggcacgccttgcaccccatcaatggcggacgagaagagagcaagaggagactctagagtctagactctagagagacaatgccaaaccgcgagcagcacgaggggaaaagaaagcagaagaagactttggcttggtaaggaggaggaggaggcggcttgcttggacggccgtgattgctttgcggcctgcactgttgtgtcggtctgcgttggcgtgagagatgggcgcaggggctttataggcctcgcccaatcatcaccgttggccctgtggcccctcacgggaataagcaagtggttaggtcgccgattgtttttccttcttttagttccgaggaaaaaataaatggttttttttatctgtccgaccaaaaccatatatgtacatggcactagtatcattacatcggacggagtacataccttcgctttctgtaattctcagaggctgcagtagtctgaaagcagatgcaatttttagcgaaataaaattacaaggtttggcacttgc

SEQ ID NO: 12449 - DNA, 2014 bp, Oryza sativa
  ref <308>: DATABASE ACCESSION NUMBER: AK109797
  ref <309>: DATABASE ENTRY DATE: 2002-08-28
aatcccaccgttcctttgggggttcaccggcgggcggcggcgacctgcgtcgtgcgtcagtatgtgtcgcgggcctctgccttgctattcgccactccggtgaactccgcgcccctcccgtctcctccggcctcttcccgtagcgcgccggccgccgcccccactcctccggatccggatggcattgcagccatttaccgacgacctcctcgccgagatccttctccgcctcccgtcggcggcctccctccaacgcgccgcgctagcctccaagtgctggctcgccgtcgcctccggccccgacttcctccgccgattccgcgcccgccacacctcgtcgcctctcctcggcctgttcgtctcccacgggagctccggcctccccgtgttccaccccgccgcgaccgtccgctccgaccccgacctcggcgccgcggtactcgggggcgacttctcgctcatccgcgtcggggacggcgaggatccccgctggcaactccgggactgccgcaacggccgcctgctcctctgcggaggtagatccgtcgccgtctacgacccggtgtcccgccggcgcgtctccatccgccgcccacaggacgaccccttctcggacgcctacattgccgactgcttgctgcacgggcgcggcgacaacggcgcggcgtcgttccgcgtggtgtccgtgcagcgccatggccggaggatgcgcgccgcggagtacaactccggtactcgagagtggagcttccacccgtgggtggaaaacatgaggcggcctcgccggggccaggcgatgcatgcggcggggattatcttctggaaatgcgaggacaattttgtgatattgcttgacacgctcacgatggaattctccatgctcagtctccctgtaagcttgttccagccttccaagtacgccataggggagatggaggatggcgtgtgctgccttgtatgccttgatggcaccatggacaacgtccacatgcaagtgtggctgctcatggaggaggacggtggtggcaggaggtgggaattggagaaggaaatgccggttagtgaagtgcttgacaggcattccctggtgcgacaagtccgaacagtggctagtggattggttcttgtttcctgggatgaccgctatcctcaatttgccattgacctgaagaatatgaaggtcatggctgagtttaggtgcagcggcgagacttatcttttccaaacgccatggccacccgctttgttggtcgatagcgaatatgtggagccgcttcagatgatcgctactcagaacatgatgaaacatgttaatcttgctgcagagagaactgatgttgtgaattcagagggcccattggatttggtattggaaccacatggcccactggacgcacaacaagctatggctgctgaagcggagaccttggtggtaacagcagacctgaaattagtcaggtctactgaagcacaaaaccagtcagtagctgaaaaacctgagatcatgaaggggcctgaagtcccagtttcgaaaaggagcatgtcacgtttggaaaaaagaagaggggaaagatatgagagtgctctccacaaggcaatggagaggaaagctcgttacatgggtggtgtggaacagcttagtacttctcttggaagaaactacagaagatcagagaagccaattgttgtggactctagttacgagagatactaccagtgtcgtcaacgtcgagagaagccaattgttgtggactctcgttacggtaaatactaccagcgtcgtcaacgacgaccagccgcaggagttcagggaaggtgaggcagggcgcagctaaacaagtttggagggaagtagggttgaaggagatttgtattcagtggtaggaagtttatttgtattcagaaattactaaccattaacaccattcattcgcctgagcactggtatatgctttcgataactcataacagatacatttttgtaattcatatttacttgaaatttgtttttttt

SEQ ID NO: 12450 - DNA, 1399 bp, Oryza sativa
  ref <308>: DATABASE ACCESSION NUMBER: AK109798
  ref <309>: DATABASE ENTRY DATE: 2002-08-28
accgaacccgcccggccgccacacacgcctctctagctacccggcgcccgttcgagtagcctgtaggcgcgtggcgtcgtaatggccgtggcgcccgtccggctcgtggcgtgcattgtcgccctggccgccgtggcgccgggcggagtggcggggcacacacggggcgtgcggccagggagggcggcggggaagcagcagccgtcgttcccggagaacgcgacgcgggtggaggcgatcgagcggcagttcatggagtgggtacggtacatgggcgggctggagcacagcacggtccaccacgcgctcgcccgggcgttcccctcctactcgctcgtcgtcgacaagaacccggcgttcggcgacttcaccaccatccaggccgccgtcgactcgctcccgatcatcaacctcgtccgcgtcgtcatcaaggtcaacgccggcacctacacggagaaggtgaacatatcgccgatgcgcgcgttcatcaccctcgagggcgccggcgccgacaagacgatcgtgcagtggggtgacaccgcggacagtccgtccggccgggcgggacggccgctcggcacatacagctccgcgtcgttcgccgtgaacgcgcagtacttcctcgccaggaacatcactttcaagaacacgtcgccggtgccgaagccgggggcgtcggggaagcaggcggtggcgctgcgggtgtcggcggacaacgcggcgttcgtggggtgcaggttcctgggcgcgcaggacacgctgtacgatcactcgggccggcactactacaaggaatgctacatcgaaggctccgtggatttcatctttggcaatgcgctctctctgtttgaggattgccacgtgcatgcgatcgcgcgggactacggcgcgctgacagcgcagaaccggcagagcatgctggaggacacggggttctcgttcgtcaactgccgggtgacgggatccggcgcgctctacctcggccgcgcctggggcaccttctcccgcgtcgtcttcgcctacacctacatggacgacatcatcatcccccgtggctggtacaactggggcgaccccaaccgcgagctgtaagacatctcatcgctctctccgaacttatctgtgaagctgctagcctgttacgtgcgatcagagtgaagtttgtagaaacagttttgtatgtacagaagcaaagtcactttaattccctagccaaccgaaagccgcatcggtgttgcactgttggtctgttgctgtttgcaaaagctcggtgtagctaggcgcatggccgtgtgcgcagagaagaatcgtagacatagcttccatatcaataatttgccagtgcacgggaaaagggagagcactctccccttctcggtgcatggcgttgcacgggtgc

SEQ ID NO: 12451 - DNA, 1660 bp, Oryza sativa
  ref <308>: DATABASE ACCESSION NUMBER: AK109799
  ref <309>: DATABASE ENTRY DATE: 2002-08-28
attgattatgttctggaaaggaaaaagtacaccgaaggtccctcaacttgtcatcgggatacaaaaacgtcctcgaaccgtaaaaccagatatgcggggtcccttaactatacaaaaccgctcacccgaggccgaccgacgggtagggagcagatgaccgggcggcaagcggggctaagcggcgccggcggaggcggcgtgcgagcgcgcggcggccggcgaagcggagtggagcggaggcacagagcagcggtggcagcaagcgggcgagcgcgcgtgatgtgaccatgcctactacagatagaaccattgctcacatcatacatcaaatggaagtcatcaagatcccacacaacttcggaaatccaattcggccacctgcaatagagctggcttcaaacgggcgccaaatttgcatatgagctccatttcaatcatatgagtactcgttggaaagatcttgttgtctactttcagatatgtccagcctcaccttaagatccgaaccgagctgctcagaatgaccaaaatagttttcgcatctgaaactcgggcttgggcgtttgtatctttacagcccattaggggtccacaaaacctagggtttgctcccacctcctctcctggtcattcctccacctatataaactcctagcaacccccattttgcagtttgggtttttgtttagatgtaagtttagctgcagctacttccatgtactcacgtgtgtcggctagaccacctagatacttgtattcagaactccattttggtttgtttcagtttcatcatctgacaagtgccgtgagctgtttccttgtcaatttgttcttgcttgttcttcgattgcttgtaggttcaaggttgttcttgtcacggcaagaacagcaacaacgtggagtcggtgtaccggttgctaaggcgcagcacccctgtggtagttgtagtcggaccgctaacgtcgtgtcctcccccaaatcgaagtttatccacctctcatcgaaagatcgggaacccccgttgctgcatcaagtggtatcagagctcaagttgctcggtgagagattttatcactcctttgtttttacctacagcccataaaaaccacaaaaataggtcaaatccgaaaaaccaccaaaacaagttgagcctttgctgttctacttcgtctttgcttgctgagttttcggttgcatcgattggttaagttgctggttctagtagtttagtcctttagtgtttcgggttctactcatgatttcgtcaccacaaacacttccaccatcacttcatttatcttcatcccgctgccaccatcaccaccatatttaccacgaaatccaccttcaaccccaccaaatttcgtccaccacaaccagcggcaccctcatcaccacatcagccacccccaaatgcatttattgctgcccccaccaatagccaaccattttgcaactttgtgaagtgaatcagtccttcccaagaaagcatttaagtgctctcacttttgacttgttggctgaaccaagtaactccaaccagcccaacatttcctcctttgtgttgacatgttggctgaatgaaaagagaagttgatcctgctgttttgagtaatttcgaaattcattgggaaaaattttcagctttaaactagtttac

SEQ ID NO: 12452 - DNA, 1449 bp, Oryza sativa
  ref <308>: DATABASE ACCESSION NUMBER: AK109800
  ref <309>: DATABASE ENTRY DATE: 2002-08-28
aaagcaatagccaagaactgagccaaagaacagccaagcccatgtacgcagccaacgagcacgccgtttccaaggtcctggccctcaaactcaggcttccagatcgcctcgtaaccgcctgattaatcctccgctcctgcaagaactgctgtccctggccttcacctcttcggtgaatcccaattgggttcgagcaacccaattgggagaacaaaatcggaatccacaatactcagaggttgcctgcttcgttcgtgttcgtcgattgggaagggcgaatttgactgcctcggttgcagtcaggactcaggagtagaatcatgaagctgaaaaatagagctgaagaaatctttagggacggcgacctgatattcacatccgaaagaaatcttggggcaagaaacgtgcaaatggattatgatattgttagagcaaatcagccagctgttgttcagacaagatgcagatggatcattggagatgtaactgaggtgctggatcgcaacacatggaagctcggcaaaatcgcaaagatgctgaagaacaactacttcgtcatcaggcttgctgactgcattcaactgaaggagtttcacatttctagcttgagggttcctgcatcacctcatagcaacaaccagtattctgtggcagataagaaatctgaagctaagcttgcgcagagaggccagattccatctgatgctctgcctggaagaacaaacaagaagagaaaatcaactgcagacacatccttcaatccaagaaggagaacatcacggcctgaaaatgcatccagggcctgtgtgctcgatggctcaacgactcaaaatcgcttccagttcatcagagaagaggccgaatgttcagtggccagctgcagcatcaacgacccggacaccaccttcaccaacgccaagaagctccaatctctcggcttccctgacgacgccatgtccgcgtgcccatgcacctccggcatggaggatgacgatgccgccgccgccgtcgccgacgaagacgatgacgacgagccggcggccattgccgtccacgagctggagctggaggcgtaccagtcgacgatgcgagcgctgtacgcgtcggggccactgacgtgggagcaggagtcgctgctgacgaatcttcgactgtctctgaacatctccaacgaggaacacttgctgcagctcaggcgtctcctgtcctcgcgatgattactttcgtttcgtttcgttttctactactgatcaggccttctccagcttcaggttaatttactcgagagattaatcaaaaacctctttgttcgcaacggcaatgttgctgatgctctttgaaaaatttttacaaacttgtaatcttctcccatctcatgtagttcgtgtagaactgtgtcactgtggagagagtgagagatatatacacatagaagaacattgcgttctt

SEQ ID NO: 12453 - DNA, 2092 bp, Oryza sativa
  ref <308>: DATABASE ACCESSION NUMBER: AK109801
  ref <309>: DATABASE ENTRY DATE: 2002-08-28
aaaaaacaacaagtggatcgatcgatcgagtaaaagaagcaacgatcactagtgtctctccacggaggaggaggaggtttgacaaggtggcagagacggagggaggaggaggatgagtagcctggccattgtggagaagaggccggcgccgttcgtcggcggcggcgggtgcgcgggcggcgtgctgctccacctcctggactggcaccgccgcctcgcccgcaagcgccgcctcttctcgccgcgcaggctcctccccacctcgctccgctcttccccgcgcaggctcccgtccccgcctcaggcctcgcatcctcctcccgcgcctcgcttgtcctccgccgcaaccgccgccggtgtcgccgctccgggcgtgggcgtcgtcgcgcgcctcatgggtctcgagtcgtggcccgccactggccccgtcggcgcgcccccggcggcgcggaggccgcagaagcagaggaaggtggaggtggcatcaccgacgccgcgggccgacgagccagacgtggtcctggtgttgcctccgagccagcgtccgccgccgctatcgcctgcggcaaggaaccatcacggcgccgacctgccggcgaggagcccgaggcggagccgactcgtgcatgccgcggcgaccaagctgttggagcctagcgctcgcgcgagctcgagggcgagtgccaggttggccctcgcgtacgcctgctcctccccgcagcatcgcatggatggccattccaatgcgttgcaaagctcaagtatgcctgatgacttcctgtctcgctctgatagcctgccattagagcgttcgtccagattgcagccggtcgttgcccagcctcctgttcttccggcggagacagaatgggacaatgtcattacttccagtaggcatgagaagcattccattgacacaataagcagctctgatgctgcagatgtagtaagtggtgatgcaatagtggtgctaagatcgggttttgatgatgcaaatgtgagtagaagcagctctggtgcggacgccatgcccaaggatcacaaggcaagaactgacagactgagcaactgttcaagaatgagatcgagtggtgctggcgttcgagctggagaagagaggtcattgcgcaagcgaggaactcactctctgcaagatgttgaggggaatattggatctcggagcttggttagttccactcatcctgctgctggtagtgctcgcgaactgatgtctggcagtaggagagctgcacaccatggttctggtcaaagaagggagttgatgggtacaatcactccacaaagaagcagtcgcagggaggtaatgggttcaagcaatccacaaagaaacactcgccgaagctcgattgaccggagtggattgacatccacaaccacaagtaggattgcagtcagtactgtatctgggcaaaaaaggggatcacggaagaatgtaggccgtgacaatgcagcctgtaacagagaagttaataatccagttgcatttgcatctagttcatctgtgaacccagtgacaaggaattcatcgcaaagcaaagtttcagagaagagagggtgcagaaggacacaagttattagtaccagttgtagtacaagattgccggtagttgaatcttcaccttctgttgtgggtagttctgagaaagaggagtttagcaggctactgaaagcaaaaattaatgagcttggtttgtctgataggattgaatcaagtgatgctctttcaggaaaattaactgcatcagtgcttcaagagctcatttctgccctcactaatgatacaaacacttcagattctcaacatagtaactattccaatgcatacaattctcagcatagcaactactctgatgcagtagactgtctaaacaacaatttgagtgcatgcaattccaatgatcagtcgcatgactttcagaactgttaccaggtcagtttaaaatatcagcatgctgctgcaatgtcaactgttaaatttatggtttttgccatttgcctttacatcataaatgtaatcttgttaaattgtagcaacacctctttcaacaataaacatgtgatggttatacat

SEQ ID NO: 12454 - DNA, 1645 bp, Oryza sativa
  ref <308>: DATABASE ACCESSION NUMBER: AK109802
  ref <309>: DATABASE ENTRY DATE: 2002-08-28
gtgcggcagcggccgcatcgagctgccgcggcggggacggggagtcggcgtcgagcggcggcggccgcaacgggcgtccgaggcggggacgggaacatgcggcggcggcggcctgcgtttcacacatcgatcatcccttctggatcttcggctgcttttcccgttattaatcaagctaatggttgtactgttggagtgttggtcgatcggaaaggggagccgcttcaccgggcgaggcggcgatagctccgcagcggcggtggctgcgacggcgtttgcttcgaatcggcgaccctcgcttgctccgccggtagctccccgcgtctcctacagacgtagcctgaggaggggattccaggctgggggctgaggaagcaccagggctggcggtggagacgacggacatggagcgatggccggtgggcagctgcttgactgacgacaaccgaaggggtaggctagatcctatgaacctgctgcatacatgatgaatgtgtagtgtgctcttgcaatatattgctgatcataccatcatcagaagcagtagctatccggacaagtgaatacacctcgaacgcgttgatgagcggtggctgtgatgtgggctgcttgcgcaacgtgaaagttgagctcacaccgggcaagaaccggccattctggtacatgctgtccacctggaagggggatggtgagaagttggcgaacagctcctcgctgtcgctgtagatatcgaacaacctggtcgtgttgctggctatctcagcaaagtgaaagaccggtagcagctccagatcccccaagccaagcaggttgttggcgcccctcacagtgatgttgagccaactgaatgtgatgtttatggttgaagctttctggaggatggtattcggcaccatgaacttttcatcacctgggagccttttcacttcttgtgttgtgttaaggttgatccagggataggatctggtgtggaacgctccctcccaaaaccggtcgtaaacatcctctggatatctgcatgcatgaatgacaagaaagcagaaacaatattccacggttaaattacatggcatatatataggtcatactgtccctggtgataccaatctaaggctgcaacagatttcaacatgctgatatgatctcacctagtgatgacatcattgacttgtccatatctttgccgagaaaaataactgacggccacagaaacattcacaaaggggtacattgtatcttgcaagggcctcaaatccaatgtcgatatgaagggagtccccaattcgttgtttatcagacaaacagatacggaattgcctggagcaaccatgatcagctctttccagattgtgttcgatgaaggcaattttgtcaggttcaccattgtccagaagttgatgccgatatggagtccaaagagaaacggtgaaccactctctgatgagttgcggccatcgtagttcccgtaagtgaaggtggctctgatgagatacttcttgctacggttggttggtaatgtataacagttccgttggccatcagggaaacttctcagggtttcttcttgcttatttgcagcttctttcatgtactgtgacagaatactgaaggtcttgccgccctttatatatcctttgtcagagac

SEQ ID NO: 12455 - DNA, 1582 bp, Oryza sativa
  ref <308>: DATABASE ACCESSION NUMBER: AK109803
  ref <309>: DATABASE ENTRY DATE: 2002-08-28
atgcgcaaggaagctgacgagcgggaggccctcacgggccgcaccgctggccgaccctgcaacagcagctaatcctagctggatcaaaccatctccagccaagacaaaatcaacgacatatctctgtctctgaagtctgacctgattcggatggtccttcagccttgaacagcaagaattgtggccctcgtgatcataaataatcaagcgtaatctccatagctatgccaacctccactggcagccgcaaaccggtgcggtctgcctccaccatcatagccggcacggagagcggccagcaccttctcaagatcgacggctactcccacaccaaggacaagctcccgacccccggcagcaacgtcaagtcccgatctttccgcgtcggaggccatagttggcacatcagctactatcccagcggcaacgactcggacaaagctaactgcatctccatcttcctcaacctcgacgacgatgtagacgtgaaagctcagttcaagtttagcttgctcgaccgtgccgggaggcaacccgcacgccttcaaaagcagcgggtgggggtttgtgagtttcatccggagggacgtgctggagaaatcggagtatctccgggacgactgcctcacgatcgtgtgcgacctcaccgtcttcatggagctgcagacggaggacatcgacgtagacaccgcaacgccgccgccgccgccgccgcctacggtggtggtcccaccgtcggacctgcaccggcacctcggaggcctcctcgccaccggggagggcgccgacgtgacgttcgaggtcagcgggaagacgttcgcggcacacaggctggtgctcgcggcccggtctccggtgttccgtgcagagctttttgggccaagcaaggagctgggtgccacgaccggcggcgcggtggatcacaccgccatacgcatcgacgacatggaggcgcgggacttcgaggctctgctccgctacatgtacaccgactcgctgccggagccagagacgacgaaaggaggaggggacgcggcggcgatgctcccggacctggtcgcggcggcgagcaggtacaagatggagaggctgaggctggtgtgcgagcacaaactgtgcgagtacgtgaacgggagaacggttgtttccatgcttgcattcgcccgggagcaccattgcgatggcctcaaggagaagtgcttgcgtttcctcgacgatccagtgaaagtgagagagatcgtgaaggctcgataatctgagcaaaagttacacttctattttgacggatctgattgccaagcttgctgcagtaccatcatcgcaaacttagctccagtggcctaaatgtgtaactagttcgcgagtcctctaattaattaatgtagccatgtgtcaacatactatgtatatatagtagtagtaagtaagaagaggggaaaaaaactattaaatggagtgataaaagaaacaagcattgtagtacaggtccagcaaagtcttcacgcgaaagtgttttcaacagatggttcctctttaaacatatgttaagaggatcatctataggtgtgtatggtgtgcatgc

SEQ ID NO: 12456 - DNA, 1831 bp, Oryza sativa
  ref <308>: DATABASE ACCESSION NUMBER: AK109804
  ref <309>: DATABASE ENTRY DATE: 2002-08-28
aactactttgcacttgcactagttgagttctcttctccctcccgcacggcaccatgatctcacagtgttccggccatgacgtcatgcagtgggagtgggacgtcccacggcggcgtcgttgcgctcgccggcggcggccgacaccctgccggacgccggctcagctggtcgccggaatcatgaggctccctcctcgccggccttttcttcaggggttagagaaacggtgaccggggtggagacgaacgacgacggcgccgagagaggggcggagccggcggagcgcgacaacgccgcgccggccgccgcggcagccatctccggcggcgatcaagaagcacaaccaggtacagcagccgtggatgcggcgccgggccacgacaaatccttgcggaccgccgccgccaccggaacgtctcctccacggcacgaacaaccaggggagaccacgacgcgtgcggattcggtagaccagccgcgacatccgctgtgcgacttgtccgaccaccgcaccgacgtctgcgacctcgccggcgacatccgcatggacgccaacgcctcggcgttcgtcgtcgtcgtcgacccggcggtcggcgcggacgggccgacgtacaaggtccggccgtacccgcggaagggcgacgccacgagcatgggccgcgtcaccgagatcacggtgcgcacgaccgcggcggtcgtgttctcgatcagcgggtacacgggcaacctgttccacgacttcaccgacgtgatcgtcccgctgtacaacaccgcggcgcgctactgcggcgacgtgcagctcgtcgtgacggacggcaacgcggccacgcggcggtggctcgccaggtacggcgctgtcctgcgcggtctgtcgcgccacgtgccgcttgacctcgccgccgaggccgccgccggcggcggggaggtgcactgcttcgggcacaccgtggtcggcctgcgcgcgcacggggagctcatcatcgaccgcgaacgcagcccggacggtctcgggatgccggacttcacgcggttcctccgccgcgcgctctcgctgccccgcgacgcgcccacgcgccccggcggcggccacggcgacgccacgaagccccaaccccgcccgcgccttctcatcatctcccgccgcggaacacggttctactcaacaccgacgccgtggcgcgcgccgcggagcaggtcggcttcgaggccgtggcaagcgagctggacatggccggcgcggaccacgacgacgtcgcgcgcgtggcacggctcgtcaactcgttcgacgcggtggtgggcgtgcacggcgccgggctgacgaacatggtgttcctgccacccggcgccgcggcggtgcagatcgtgccgtggggcggtctccggtggctggcgcgggcggacttcggcgagccggcggtggcgatggggctcaggtacatccagtacgaggtcgccgccggcgagagcacgctcaaggacaagtacccgcgagaccacgagatattcaccaacccgacggcgctgcacaagaaggggttcacgttcatgaggcacacgtttctgaacggccaggacatcatcgtcgacatcgaccgcttcaagccggtgttgctccgcgcactcaacagcctcgcgcgctaacctagggtctgtttggcagagctctagcgcaagtctaatggatgagtctagggtccgttctgcattcggcctaagcacgcaaacgtgttcggtctggcccacatgcgtcttgcccatcttgagacactgtgctagaaaaaattgacacagaatttacataaaaaacttttaatataggaacattttatat

SEQ ID NO: 12457 - DNA, 2452 bp, Oryza sativa
  ref <308>: DATABASE ACCESSION NUMBER: AK109805
  ref <309>: DATABASE ENTRY DATE: 2002-08-28
aaataaaaaattgagcaaactcttgttttttttccctttatgttatagatagaaaaatcttgtccagcatgttttcagaatagaatggcactgatttcccgttatgaaaaacttgataaatcatgctgtcttaagtagaatatagttcacacaaactttcatgaaatatatagtagacatgaccataattggccagtaggagtgaagtgtcctgagcaaaaaaaaccaggagggaaatgagggtggtgtgttcaccgaggacgctgatagccccatacaaacatcttacgcccgccctcattcaccgcgctcggtcgaactagctcaacctcaaatgtgcccatgtctcctagtgaacaatgcgccatgtgcagccacacaaaactgagaaactccccacccatgctgagctgccttgcatggttctcgccacgggacttgccggctgcatagaggagaaccccaacccacgcgcgcgcaagaacttgcagtgattcatgacaatgcacagcctcttccttgtggcccctgaagacaaacccagcgagggtgatgggatcagacaagtcattcaggtcacggtctgtagccagtttctccaggacgacactgactctgcccttgcttgcagcagctccagagctgaccttggcaacggtttctgaagccttatctagaacatcacgcacactgccactgacaggaagcatttcaggatggacgaccaataggtagcacatgtactcagatattgtcctgcacgcatccatcagatgccgtctctccctggtagcgtcgcagctatcagcacttgtgggattcatgcatcggtgcaagaatatgtcggtgtagacgtgtagcgagaggatggccacctcgaactgttcccgcaggattatgtccagtgctgaaccgacgcctgaatttggatccgcatcgacacttgatgtctggcttgcaccgaagatctcggcaaggcacttggcttcaaagacgagcttcttcatctctgctttgacgcccacacgctgagagtaccgaaagttcctccaaaattcctttgctccaacaaggctcatcaccttcccaaacacattgtcagagaagcaggaactgaggaaattgtattgccccaaggaattcgaccaccatgacatagactccgtctgtaggctcttgaaaacataccaagctgcatctgcgagcctatggtacttccaatattgcaaggatgcccatgtccatggcgacatcatcaccatgaagaagatcgcacagacctccaaacagagtgctccaatgaacaatgcataggttatggcaacatcaactctgctatggtgccacttcttgttccctgtcagaaagagcacaaatgcaaccatcagggagatgcaggtgatgaatcggagtatggcgccagtccatgtacgaatcactctcgccttagtgtagaggttgtcatacatcattcccagctcgatctctagaatcttgaacacaagttgcgcgttttctgaaacttgactatacagtcgacctgaaaatgcatgacgtaccctttcttccatttgatcaatcttgcgtccaacaagtaggtttctcacaactggtgagctagacagagcaaacatgaccatagttttgtatcccaactcttgatagtcttctagttcaggaaattgacctactactcctccatcggttgagcgtctaagggatttctggctcgcactcttgagtgcccatgttctctccccatacttgatgattcctgaaataaaagcaaagatggctgagactacaaactgattgcctgctgctgatttccaaaacacatacaaggccaagcaaacttggactagaagattgagcagatgcctgagccacagttcattgtcctcgacagagaacgcagtgattgtgtcctgcccaccaagatgaatgagaaggaaaggcgtccagaagaatgcaaacttgtgaggttgcccagcttcacttgcatctgtttttttgccgtgatagttgcccaagggcatagactgcaatgaaatcagccaccaaatatgctaaccaaaccagaatcctcaatgacgagttggtgctgcgctgtcgaagaccaccggaaaagaagacgaacacttgcaacatgaagcttaaaagcaccagcacctgtaactcccaatcattccatagttggatcaacgctgccatctttacatgcgtttcaagtttcgacaatgctcaattcagtttctgcagtcctgtatgaaaccagtgtttactcaagataatcaatccaagagatattatgcaagaagatcatttgtttcatccaacactgctagcctgtaacaagcatttgtgtgttcaaagccagtttgtttcttcattagaaatatgctactagtgttgttcatattaaaataatatctcagaaacattagaaatc

SEQ ID NO: 12458 - DNA, 1692 bp, Oryza sativa
  ref <308>: DATABASE ACCESSION NUMBER: AK109806
  ref <309>: DATABASE ENTRY DATE: 2002-08-28
tgtgaaatatgtaaaactatatgtatacatataagtatatttaacaataaatcaaatgataggaaaagaattaataattacttaatttttttaataagacgaacggtcaaacatatttaaaatagtgaacgaagtcaaatatttagaaattgagagagtaaatgacttagccagtactatcgtacgcgactaggcgtgtgaggtgacggcagttttggcagcccgaccggtcgatcgatcaccacgttgatcggatgcatgcctcagctgcatggtataatgtggctgaaagttgcacatagccttttgcatatgcgtcaagcgtctatacgattcgatgcatggcccgatcgatcgagtgatcgtgactgcattgccgagtgccgacacgagttacggcgcttcacgagaccactggagatcgatcagagctaagcctaggacatcattttgtttgtcgtgtgtgcgcaactgtttatatgcacgtgtagctgcttcaattcactgaacgggacggggatgtttgatttctgacgtgaaggtactcccgctgtctcgtcgaatcagctcgacgacaaggatggtcgggaggaggagcaggtggttcgaggccttggcatcctcccggcgcagctcgagctgagcaccaaggagctcccatggctcgtgggcgactcggctacccagcgatcgaggttcgccttctggctccagacgctgcgccgcgccaggggcttccgctctgtcctcgtcaactccttccccggcgaggccgtcaccggcactgccgccgccgaggacgacgacgggccgcagcggcaggccgcctgccctcgcgttcttcccgtcgggccgctgcttgtgctcgccggatgcaacgtagagcgcgcgaaaggcgccggcgacgacggcggcgttgcggcaacgaatattaacaaccacccgcagccgtgcagcaagaaccccagcatgtggcaggcggactcgacgtgcatccgctggctggacgcgcagcccgcggcgtcggtggtgtacgtctccttcggcagctgggtggggccgatcggccacgacaagatccgcgagctcgcgctcgggctcgaggccaccggccgccccttcctgtgggcgatcaaggacgacccgtcgtggcgcgccggcctccccgccggctacgcagggagcgtcgccggccgcggcaagctggtggactgggcgccgcaggacgacgtgctcgggcacgcggccgtcgggtgctacctcacgcactgcggctggaactccaccgtggaggccatccagcacggcgtccgcatgctgtgctgccctgtctccggcgaccagttcatcaattgcgcgtacatcaccagggtctgggaggtcgggctcaagctcggcagcgtgcgccgcgacgtcgtacgtgactgcatcgagaggatcatgggaggcgcggaagggacgcgcctgcaggagaagatggacgcgctgaggcagagagccgtgacggccgaggccaggtgcttggcgcaggggaacctcaggtctttcgtcaacgaaatcaagagagaccacccgttgttgacgcagatttacaacatattgtaggatcggtattatatatgcttgggcaggcccgcaggtgcatgtacattattagatgtacaattgtacattgttagtatctttctcgtc

SEQ ID NO: 12459 - DNA, 2356 bp, Oryza sativa
  ref <308>: DATABASE ACCESSION NUMBER: AK109807
  ref <309>: DATABASE ENTRY DATE: 2002-08-28
tgtcacaagctcggtcactcaacttctatggactagctgagtgtctgccttcgactttgcagttcaagcaacttagagttctaatacttgaattttgggatgatcaagaggagtttgatctcagaggaattttcagattgttacaactgagatacgtgcaggttacaactgatatgatcgttaagctaccagccaccgtacagagcctacaatatttggaaacactgcaactaaatgcaagagtagcgaatgttccatcggatattgttcatctcccgaaattattgcacttacgtcttcgagatgtggcaaatctgcctgacaacattggctgcatggcatctctatgcacgctagagtcattagacctcagcaataactctgaacaaaatgtgtggggtcttggagagatgacgaacctgcaagaactttatctcaactgctctacagaattgtctggccgcctgaagagaaatcttaccgctctagcttcttctctagggaaacttcgtaaactaagaactcttattctggctccttcttcaggcacgagcatgtacatggattgctcgagcatcgtttcatctccgcccctctgtcttcagagacttgagttattacctaccatttgcatcttttccagactgcccaaatggatcggacagttaaagagactccgcattctgaaaattgttgttagagaactgctatgcagtgatgttcatagcctcacaatgttacaggagctcactgttctctcattggatgtccagcaatccactgaagaaacaattgtctttaacgacaaggcattcccagttctcaagtatttcaaattcagatgtggtgtgctgcgtcttgcttttcaggcggaggcaatgccaaatctccggaagctcaagatagaattcaatgtccacaggggggaacagtatggtgatattcttaccggcattgaacacctgttgaaccttcaagagatcattggacaaattggagctgctgcgggtgcagaggaatctgacaagagagccgctgagtttgcgttaagtgatgccactaagaagcattcgaggatttctagattcaacatacgatggattaattgtgttgaagaagatgtcagggtttccaagatttcagatttacaaggaatatcttcaagttcagatgaagaaaagcaaaaggctaatgagccaagtgggacagatattacgattgaggacgagtcgccattttctcacgagccaaattatgatgttccacgggcatacaaggcagagatagaaagcgaagaagttcctcacgcggaattagcagatgcctctcgcacaagcgattcaatcgacaatcgtcgacggcaacgccggtcaatcgagccttctttctcccgcgatcgcctcagccagccgaggaagcactcggtcgcgtccgccgtgccaaagttcggcgagtgggactcgccgctccgcccggcagacaactacacaagcatctttaacagggcgagggaagaaaagcgtagtcaggtagagaagccgtcggtgtttgacaaggatgacctactggttagaagaaccagaaatcgcaacgacggccacgcctccacgaaatgctcctgctttggatggtgcaaatagagatgcatcgacgttaaaggctgtgtttaataagagaggaatagaaaagattgaggcatttagtcaggctgttaattatcaattttgggcatcagcggcaccatatccgcccatggtgaggcgaaccaggcagcggcggcggctggctgggaatggctgcgacgtgcgaggagaggaggtgttggtctggcagcgggatatatacggcacgcccagcctcctaggcgtcggatttgaaggaaggcgagataagggaagacgggcgacggcgcgcggcatgcggcgtctgctcgtcatctctgttctccagctccgccgcgcgcgaagacctccttgcaggtacctccctatggtggtcagcgtccaccacaaccaaaccagccattgatggggatggagggggacgcggacggacggacggacggaggaggctggcgccatcgcggcgaccacaggctccgaggatgggacgagctcctgcggctgcggcaacaggagagccgacgcctgtagatattttgttttctttttcttttctctctctctctctctctcgcattttgcagcatgagcctgcttcaccatacccaatttttttatacgtgattcactgtatcattggatacacatatcacatgtatcaaattgcaatccagtggagtaaaaaaaaattactattgattttattgtccaagtaaatagaacacacattacac

SEQ ID NO: 12460 - DNA, 1947 bp, Oryza sativa
  ref <308>: DATABASE ACCESSION NUMBER: AK109808
  ref <309>: DATABASE ENTRY DATE: 2002-08-28
cttcttcgtcttctgacctaaccctagacgaccaccaccatctgacggcggtggctgcggcgtcggggcaggcgacgcagaagcttcaggagttcttgtcacgtctcgaggaagagaggctcaagatcgacgccttcaagcgtgagctccctctctgcatgcagcttctcaatcatgctatggaggcgtacaggcagcagctggaggcgtaccagatggggagccagcatagcgccgcggcggcggcggcggcgagggcgccgctggtgctcgaggagttcataccggtgaagaacatcgggatcgacgtcgtggcggcggataaggcggcggcggcggggggcaacagcgtgtcgtcggagaaggcgagctggatggtgtcggcgcagctgtggaacgcgccggcgtcggcgtcggcggcggacacggcggcgaaggggccccagacgcccaaggagcactcggagcaccacccgctcgacacgagccccaagctgatcaccgccgccgcgctgccggagctcgcgctcgcgcccgcggagaaggcggcggacgcgatcaccatcgccgccggcgaggtcgacaagaagccgtacgcccacgacaacggcgtcgtggcgagatcgagagaagcccagaacggcgggaagccgccgtcgacgccatcggacgggcaggccgtcccgccgccgccacagccccaccggaaggcgcgccgttgctggtcgccggagctgcaccgccgcttcgtcaatgctcttcagatcctcggcggcgcccaagtggcgaccccgaagcagattcgcgagctgatgaaggttgatggattgaccaatgatgaggtgaaaagccatctccagaagtacaggttgcacacaagacggccgatgccgtcgccggcgccgccgacggcagcgacgccgcagctggtggtgctgggaggcatctgggtgccgccggagtacgcgacgcaggcggcggggccggccatctacggcgcgcacccggcgacgcagccgcactacacggcggcggtggcggcgcaggagtactaccaccaccaccaccaccacctgcagcaccaccccgccgccgccgccctggtgcaccaccgcgccgtagccccgcccccgccgctgccgcctcagcagcagctggcccctccctacagcgccaagtcgtcggcgtcggcgaggctcgggtccccggactccgacggccgtggcagcggcggcggcggcggcgccgccgcctccggagccggaagggacatgtccgagagcatcgaggaggaaggcgagggcgaggagcgggaggacgacgacgacgacgacgagatggcggcgaccaacaacgcccacgccgtcgacggcgacgacgacaacgacgagatcaacaccaccaccaccacgagcgcgggagcgattaactactaattaatcaaccaaaccaaccaatcaaatcaccacgcgtcgtaattaattactcattagtaataatactagctagtagcttaattaatcgcgctaatccgggagattaattagcgtcacctggaaaaagggaaaagtgattttttgttggcgcgcgcgcgcggagaacgggagccgagccgagccgagccgaccagagaaggagcaggagcttgagcttgtctcactcgttgatgtgatgcatatgtatggaactatggatcgatggataatgtgagggctttactttgcttttgcttttgctggtttttttttctccctcttgtttttcttccttttttgggactctcagctgttcctgatttaataatccggtagtactagtagtaaatatcaaaattatgtgatggtggagagattaaatatgagctagatgtaattgtttgggagattatgtttgttgttgttgttaagttgagaattgtgaagagccaccaataatgcataatgcagg

SEQ ID NO: 12461 - DNA, 1486 bp, Oryza sativa
  ref <308>: DATABASE ACCESSION NUMBER: AK109809
  ref <309>: DATABASE ENTRY DATE: 2002-08-28
agaagacgatgccgccatgcgcggcgaagaagggggcgaagacgagcgcctcgacggccatgagcttgacgaggatgttgagcgatggccccgaggtgtccttgagcgggtcgccgatggtgtccccgatcaccgccgccttgtgcgcctcggagcccttgggccccagcgacctcgcctcctccgtcgccccggcctcgatgtacttcttggcgttgtcccacgcgccgccgctgttcgacgccgagatcgccacctgcaccccggacaccagcgcgccggcgagcagccccgccagcgcctccaccccgaacagcgtcccggcgacgagcgggctcgccatcaccagcgcccccggcgccaccatctcccgcagcgacgcgtcggtggagatcctcacgcaggtggcgtagtccggcgcggcgagcccctcggcgagccccgggatctcgtcgaactggcgccgcacctcctccaccatccgcagcgccgcgctccccacgctccgcatcgtcatcgccgagaaccagtaggggagcatggcgccggcgaggagcccgacgaacaccctggggctcaccacgttcaccgtccggatccccgcccggctcacgtacgcgccgaacagcgccagcgacaccagcgccgccgacccgatcgcgaaccccttcccgatcgccgccgtcgtgttcccggcggcgtcgagcgcgtccgtgcgctcgcgcacgcgccgcggcatgccggccatctccgcgatgccgccggcgttgtcgctgatggggccataggcgtcgatggtgagccccgtggcgatggtgctcagcatccccagcgcagccagcgcgatgccgtacatggcggcgagccggaagctggcgtagatggcgccggcgatggcgaagatcggcacgatcaccgacttgtaccccacggcgaggccgaagatcacgttcgtcgccgcccccgtccggcacgactgcgccaccgtctgcaccggcctatcaatttgaaatttgaacgcaaatttcatcaaaatttgaaattttacaaaatgtagaatcatcgcgaatttgggtgggtagaattcgttttcacccgtaagcattgctcgtgaagtactcggtgacgtagcctatcaccaatcccgcccacagaccagctgagacgcagatgaacaggtgcctgaattattcaacaaaaattcagacaaaactattattattccataatttaatcaaatttggtgcaagtacaactgctagagtcataggtgcatggctccacccaacaagattcaaatcttggtgcttataaatattacgcactgtaactaggtttttaacatgatttctccgaaatcaagaatgtgttgttgaatgcacatagacagggatgtgagtgtggtattatctgtgcacgtgtgtctcccgtgtaattgtaaaacttttaaaaaaatgtattgtatacagggatgtgagtgtggtct

SEQ ID NO: 12462 - DNA, 2329 bp, Oryza sativa
  ref <308>: DATABASE ACCESSION NUMBER: AK109810
  ref <309>: DATABASE ENTRY DATE: 2002-08-28
ttggagtagatactaaggaaataaagctctctacagttagaaagagcagacaggaattcgagacccccctgcaggcggtttgccccaatatcaagtaccgataacgatctgatgctaccaactgttgttggtaatgatccattcagtaggtttccctccaacactagcatggctaattcggacatgttaccaagagatgcaggaatggttcctgttagctgattctgtgagagatgcagtttctcgagtttgccaagctgtccatactctggcggaatggctccagtgaggttgctccatgagagatctaggacacttagcatggtgaggttgcttagtgaagcagggattggaccagcatcaaagtgattcatacccaacacaaggatagtgagattcgtgagcttgctcagccatgcagctgaggctgtgacaacaccttcaaaataattttcagacagggaaagaacttggaggtactgacacgatgcgagccccagtggaatttgaccagtgaaattgttgccatcgatggagagccattggagagctggtaggttgaaacttgtgttgcccgcgatagggccggttaagaaggtgttcagtccaagtgcaataacacgcaatgtggacatattgaagatgcctggtggcaccggtcctgcgagaaggttgacctgcatgttaaggtgttcgagcatcgacaaagagccgatggaggctggtatcgacccagaaaggctgttgttgccaattttgaaataagctagcaaaggtgtgttgttgaatagattgtttggaattgagccagtgaggtaattcctccggaggctcatcaaaccaatgcttcctaggccctgcagctctgcggggattgagccagatagctggttaaattcgaggtaaagaactcgaagccttgtaaggttccctatggtggctgggatgccacctgacagagaattgtagccaagctcaagaatctctaggcgatggagccttcctatgtcttctgggactgagcccgtgaggctggcgttggtgagattgaggacggagaggaaagagaggttaccgaggtgagagctgagctctccttgcaagggaatgcctggaagcaccaggccagtgacgcgctgatggcggcggccgcatcggatgcccacccagcggcagaacggtgtgttgacggtccagttgctggcaagaatgccgagagggtcggccagctgcgctttgaaagccagcagtgcagcatagtcagtgtcactgccattgctcttgctcggaactgcagaagcacaagtcactgcagacaaagcgatgatcagcagcacaacagatatccgtactggcattctaaacgccatgtctgagctcttatgcgttggcaagacaggaatcatcgggttgaggttaatttatatatttagctctccattcaattgtgcgtgcaggcatctggttctgtctacatccaagaccttcactattgctcaacctgacgtgaacaagtccaactgtccacagtttttccttcgctggtccatatggaaattagcatgcaaccttttctctttcccagttgtgagttgttaacttgttgctaatcaagaccttgatagatagtggacaaatagctaactagctagtcatataagtcgaatatatttgactgctgaccaatcatatgcagtaatacaattttgaagtttgaacggactagaaactggagtagccatagttccgtgcacagccggagatcctccctgtgaaattatttttcggtactaatcatcatcagtagccatagttctgtacaattgctaggcaaatttctgaaatactatcaagagacatcaaggacttgatgctacaaatgttgctggtaacaatccaggcatccagccagcagattgtacactctgagctaaaagatcacatctaaggctaaggaatctgagactggacagcttgcctaaccatgcatatttggccaagtgaccacgcggcgtgcggcatccaacagtaaatcaagatgctgtgctactttcagtctctgaagaaggatttcaaggtatttgatctctgacaactccatgaaaatgtgtttgcttttcacaactcgtatgctgatttgaaccatgtcctgtttcttcacatcgtaatcgtggtagctaactggcgtgattcttcacttatctatctactacccattggttgatgatgtttttattcttactaaagattatctcttgaactgtcgtgtactcgttgatttcggtatcatctgtatgtcctaaataagaactataatcatatttccatt

SEQ ID NO: 12463 - DNA, 1862 bp, Oryza sativa
  ref <308>: DATABASE ACCESSION NUMBER: AK109811
  ref <309>: DATABASE ENTRY DATE: 2002-08-28
gcgacaaagccaccggcagttacgcctccgcgctcctccttcccaagagacgcagatctccaccccgcgctcgcctcgcttcccccaaaaagtcttctcgtgagagctttcccccccctcctccacccaacaaatccccagcctcccagattcgtggcggaggctgcggcctgcggctgttctagggttagctctcgctccgccggcatttctcggtagataaagtattgtaagggcttgggtttgcaaccggagatggatgctaaaaagaagaggaacaagaagaagaaggggaaccaagggaagaacactggtgatgtaacgtccagcactgcagaggctgccattcggtcccacaatcatgagacagcccctaatgaccatcataatggcactgatgctgatgatgcaatgtccactgttggagaggaagctcctcagtaccagaatcatgagccagatcgacaggcaaatcatgatagcacaaacactgatgatgtcatgtcctctgttggagaggggattccatttcagaaccttgaccctgccatgacacatgaaaatcacaaagtcagtagtacagcccatgctgatcagaggagtgttgagatgtcagattccaccgtggagcttgacatgcacagactatatgaagcaaagcttgataaattacatgatacgataaagaagttggaagatgagaagagtttgtggcatcaaaaaatgagctccatggagattgaggttgaaaagttgcataacaaagtggattatcatgcacagaatgaggtccgtttggaggaaaagctcaataatttacagaatgggtatgatgtgctgattaagaaggaggtagctttggataacaaagtcaggtccatagaggtcatcaatgatgccttaactcatcaggagacgtctcttaaagagagattaagtggactggaggagacaaataaagtactgcttgtacaggtgaaggtgctggaggaagcttcaaacaatactgttgaggaaagccagaggttggtaaaaggttttgatgaactggcatcaagattaggagtctttgaagcaaagtctgctcttactgaagcctccgtgactaaaaagggtaatgaactgattgttgatagaagtgtaaacagttctgcagcaattacttctgtggataactatagtccaatcaacagcagtcctagcaacgcctatgttaataatcatctagaagaagctccaatgcaacttccagaaacaacaatcaatgatgtttcttccgagggcctcattgacatgaatgcacatcaaaggtcaaagcaagattttgatgaaccaagaacaagcgaagaaattctgccagttgcattagatgatatacagattcatgaggaagacccataaccaccggtagccgatgatgaggcagaggaggttccattttctgatgctccaatcgtcggtgctccattccggttgatttcattcgttgctaggtatgtcagtggtgctgatttggtgaaccagaagtaattctccattaatgccatcaagcagcttgagatctgtatttcttggaaagaggagtcttcctgttttgattctgctcacacagttatctcgctaagattgtgaggatgtatacgatggatgcactgaattcaacagagatatggaacctctgttcagttcttggtagtgtgctcgtgtcactaccagtttttcttcctcccctgtcaatttttcaggggcagcagaagctcttgttccccagttatagtgttatacacacaagaggccttcctgaccatgtggggtgtactgaccatatttattctacagaaactgaaaatttttggtattcc

SEQ ID NO: 12464 - DNA, 1803 bp, Oryza sativa
  ref <308>: DATABASE ACCESSION NUMBER: AK109812
  ref <309>: DATABASE ENTRY DATE: 2002-08-28
aaaaaaaaacagagagcaacgaatctaggggagcaccaccactagcgtgggccccacggtggctggctggcgctttcaaggcctagggggtggtaggtggggcccactgacagccgcatgtcggtgcccccgctgcgcagcgaggccgtgagcgccgcgccagctcacgcgtcatttgactgccagctgtctcccccctccccgtcacatgattggctcctcccccctacctttaattttatttttcttttttcttttttgacatccataattaagaattttcaaatggtaaaataaatataatagcgctagtttgaacttgaatataaatataaaagtggcaacaattttctcctcctctcccatgcagtaatcgagctgtgcctaacatggtccatgttcccccaattattgcgcctcctccatcgtgcccgtgcatgcactaccccccaatcattattactcgtcttcattagccacacattacctgtccaaccaggcacaagcaaaatataattaactactaattaattactacttgctaattaacagcaagtgatgtggttaatgtaataactggatggtaattggatgctgcagggtgctgatctttgtgaggctgatcgcgttcacactgttcgtgatatggcgtatcgagcacaagaacccggacgcgatgtggctgtgggtgacgtcgatcgccggcgagttctggttcgggttctcgtggctgctcgaccagctccccaagctgaacccgatcaaccgcgtccccgacctcgccgtcctccgccgccgcttcgaccacgccgacgggacctcctccctcccggggctggacatcttcgtcaccaccgccgacccgatcaaggagcccatcctgtcgacggcgaactccatcctctccatcctcgccgccgactaccccgtcgaccgcaacacctgctacctctccgacgactctgggatgctcctcacctacgaggccatggcggaggcggccaagttcgcgacgctgtgggtgcccttctgccggaagcacgccatcgagccgcgcgggcctgagagctacttcgagctcaagtcccacccctacatggggagggcgcaggaggagttcgtcaacgaccgccgccgcgtccgcaaggagtacgacgacttcaaggccaggatcaacggcctcgagcacgacatcaagcagaggtccgactcctacaacgccgccgccggcgtcaaggacggcgagccccgcgccacctggatggccgacgggtcgcagtgggagggcacctggatcgagcagtcggagaaccaccgcaagggcgaccacgccggcatcgtcctggtcagtataattaaaagttaattaattattactcttatagtacaaatcttttgtttatgtgattatttggttagttagtgatgacttgtcagggcgaatattattttggattgggagatatgtgtgggattttgatggaattgacgtggtgatagtcaagagcgcaaccaccacgcactaattgcacattagtagtcgtagcagcatgcaggataatgactcacttgtgtctgaacaagctagtggttggggtggtcctttccacccagacagcaccaccacatcaccattaatccacacccccctaattaatctcacctcctctcaccattaactaaccaccatttcttaattactgctacaagtacaagttaattaattaattaccacaatataattattagtattattattattgatttgtgtcaaggaaaataagatcttgatcatgttcgagc

SEQ ID NO: 12465 - DNA, 1417 bp, Oryza sativa
  ref <308>: DATABASE ACCESSION NUMBER: AK109813
  ref <309>: DATABASE ENTRY DATE: 2002-08-28
atttccagctgctgcatccacctcactgccgtcgccgccgccgccgccgccgccgcagcagcagcagcagcagcagcagctaagctatgagtccaacctggtcgatctagtcgtacataagggtggctagagatcaaccgatggtgatggttggctgcttgatcgccatcttggcgcgttcttgctggcacctcgccgtcgccgccgtcaagctcccggcgctgctctgctgcgacgccatgctctccaccgtcgccttcctcaccttcccgctccgcctcctcgccgccgtcgacagagagcgcaagctggatcggctggtgggggagatgcagaggcagatggagaggttggtgtgggagaacagggagctggaggagaaactgggcatggcgctcaaggagagcagggccatggaggagattcttgacgagatggaggaggagcacgacgacgcctttgccaggatcactctcctcgagacccagctgaaggccctcaagctggagaacatgcggctcatcgagcacagggggaaatccatgtgggacaagaagccgccggcgacggcggtgcacggcggcgagagcttaccggcgtccacgagccgcccgtcgaacacgaggaagaggaaggaccgagaagacgaagcagaggaagccgccgccgctcaggaggaggagggcggcggcggcgtcgcgacggaggaggattccgagatgtccgtgcagatgcggcggggcaaggcggtggcgcggcggcggagcctggtcagcgtgggcatggcggcggcggtgggggcggtggtgtgggcggcggacgcgccgtgcctgccgctgctggcggggctgctcgccacggtgggcgtgtccatgtgcagcgtcgcgcgcttcttcctcctccgcgaggaggccgccgcccacgccgtcttcccgcgcgccgcccgcctcgtcgccccggccgtcgcctggttcactgccactgcgccactctcaagttagctataccccttgtattgtacacgtctcctgttcccgtatgctactactagtagaatatactgactaaaatacactttgtatttgtttttttttctcctaccaagagatgcctggttaatcatacggattaacaagcccttagacttgtctcgtgtgatactttcgcaatgcacaaatccctccgttacgtaatataacgcaatataaagcccataatataaggaattttgaagcttctgtacagattcgtagtttcgtagtaacaaatgtgtcacatctctcatattattacggtacggagggagtatgatcgagaacacctggccagccaaagatatgtattgaatgagaccattagaggcgaaactacgcgtggatatcgttttgagcaagaataatatgcacaagatttattt

SEQ ID NO: 12466 - DNA, 1631 bp, Oryza sativa
  ref <308>: DATABASE ACCESSION NUMBER: AK109814
  ref <309>: DATABASE ENTRY DATE: 2002-08-28
atggcgatggcatcatcccgcctcccgctccaactcctcctcgtcgtcggcgccgccgcgtcggagatcgcgcacttcctgggtgtcaactatggcaggctgggcgatgacctcccgcctccgcaccgagccctcgagctcgcccgctcggcgggcgccgcggccgtccgcttctacgactccaacgccaccttcctctccccggccgccgcctccggcctcgtgttcgtcccgggggtccccaacgagctcatcccctcgctcgccgcctcccgccgcgccgccgacgagtgggtcgccgccacgctcctccccttccgccgcaaccgccgcctccgctacctcttcgtcggcaacgaggtcctctccgaccccaccaccaagtcccgctggttccagctcgtcccggccatggccaacctcgagcgcgcgctccgccgccacggcatgcgccgcgtcaaggtgagcacgacgctcggcatggacgccctcgacggccaaaacgtgttcccgccgtccgccggggtgttccgccccgacatcgccgacgccgtcgtgcgtccgctcctcgccttcctcgagcgcaccgactcctacctcttcgtcgacgcgtacacctacttcacctggtcggcgaaccacaccatcgtgccgctccactacgcgctgctcgagccatcgccatcgccgtcgccggcgtaccagtaccacgaccccggcacgggtctctcctacaccaacctcctcgaccacatgctcgacgcggtggtcgccgccatgtgccgcgcaggccactgcggcgtcaggatggcgctggccgagaccgggtggcccaacgccggcgacctcgaccagttcggcgcgaacgcgcggaacgcggccacgtacaaccgcaacatggcgcggcacctggcgtccggcgccggcacgccgcggcggccggggatgcgcatgccggcgttcgtgttcgcgctgttcaacgaggacctcaagacggggcccgccacggagcggcactggggcctgttccaccccaacggcagcgcggtgtacgaggtcgacctgacgggtcgccgcccgccggcgtcgtacccgccgctgccgccgccggcgacgaacgacgcgccgtacccggggaagctgtggtgcgtggtcggggcagcggcggcgaacgagacggcggtgagggagcagatggaggcggcgtgcgccgacgaggccgcgctgtgcgcccccgtgcgcgccggcggcgagtgctacctgccgaacacggtggcggcgcacgcgagctacgtgttcagcgcgcactggaacaagttcagcaaggtgtacggcggctggtgctacttcgccggcctcgccatggagaccaccaccgatccaagtcatggatcatgcaaatttcccagcgttactccaagctaatgaagagtgtccgcgctttcatcctagacagatgctgcaattgtaatcatggagcgttatgaaataagcatatgggaccatgaccataaattggattccatattgtactgtagtataatcagtttgtaacagaactatcacaactcacacgggagagagttgcttgccaattgaggcctttgattgaaatattgaaatttcacatg

SEQ ID NO: 12467 - DNA, 1703 bp, Oryza sativa
  ref <308>: DATABASE ACCESSION NUMBER: AK109815
  ref <309>: DATABASE ENTRY DATE: 2002-08-28
ataccggtcagagatgggttatctgtgacgggtgtttcatccgtcacaggtgattttgtcatcagtgaccactaatcactgaccaagaccaaacccgtcaaaggtgagggtttgggcccgtcagagatgacctggtccggcgtagtgtgagcttccgctgctccccgtgcggcaaggacggaccctcgatggacctcgtcgctgaccacgacgaccactccgtagtgctcctcgagatgcgttacgacaaggaaggctacgacgaattcgggatcgattacttcgtctacaattacgccgccgccgacgacgacggcgacgacgatgacccaccacggccgccgtcgttgtcgctgctcccgtcctactgggatccattggacgaggacgaaagaaggcggcgtcaggatccgaaggtgcaccagctggacgcagatagcaccggcctcctccgccgccgccgccgccgccacggcgaggacgacctcgtggtggcggagctcatcaccaccagggagagcgagagcagcaagctggaggaggtcaagctcctcgtgctccgctccggcgagtggagcgtcacgcgggcggagatcatccacgacggcagcaagggcgaggagctctcctactgggagaccgacatggccgtccccgtcggcgaccggcggctctgctgggtcgacctgtaccgcggcgtcatcctctgcggcgacgacctgttcgacgaaattcccccgcggctgcagtacgtgccgctccccgtggaggcccccgccggcgaattcgaggaggacagcgacgacgagagcacgcggagatgcctgatggcgagctcaagttcatcgacgtcttcccccgctgctgctgcggcgaccccggcgccaccctctgcgaccattctcgccacgccttcgtcatcaacatctggacactcaggatcgacggcgacggcgaccacaccatgttgtcatggaccatggacgccatgatcgacgccaccgagctctggtccctcgacgcctacgccggcatcccacgtgtcatcccggagtaccctgtcatcagcacagacgacgctgacgtcatctgcttcctcgtgaccgagccatacaatcacaaacaggggaaaccctatttcgaaagaacgacatgggagatgacgatggacaccaagaacaagacactgctatcagtatgcacatacgatgatgatatttcccaacgagagccatcttatggacacacttacattccaaacaattttgctacaaagccaccaccggccatcatctgcgaggcaacgacgacgatcacaaccgaaatcaacggtaataatctgtcgcaatctttgccatctgccaaacatctgcaggtgtcaaggatggctcctgaggagatattggtagcacttgaagagattcctgagctttctcgcgatgatttgctgaaagcgtatagtattctttgccgtgacaatggccgcctatttaggtctcttcttgggctcccaatgagtctgaggaagaagtggctgttgatagaaattaaggcttgtcgagattgtcccgttgcagtgcatgtacaactgatggcctataacatgattgattaaaatatttgttatagtggtacttgtatacacttgtgggattaactgtgctaattctgctgaattaagttccttatttgttgtttttatt

SEQ ID NO: 12468 - DNA, 1842 bp, Oryza sativa
  ref <308>: DATABASE ACCESSION NUMBER: AK109816
  ref <309>: DATABASE ENTRY DATE: 2002-08-28
actatcaacgaagaggctcccagacctgttgcgctttgcgcctcgccacaatccaccactgtgccctctatcgctcacgcggtcacgcccatcgcgccgcgcggctcccgagatggcacggcacgcgaagacggactccgacgtgacgagcctggcgccgtcctcgccgccgcggtcgccgcgccggtcggcctactacgtgctcagccccgccgcctcccacccggacgtcgtggtggcctcgggcggcgcaggcggcggcggcggaggcgtggccgcggccgagaagatgtcgttcgcgggttctaccccggccgattttctttcactagaatactggtgagtctggtagtactgtgcaaagtgggggcgaagtgcatgtgatcaagtaacaaatactcctactactactagtactacacagaaccagcaaaaaggggacctggaatggaaacgcaataacacccagaggcaagcagtggcgtcattggctatcggtgggcatggtgttcacgtgactcgagtcagggatgccatcgcttgccatttgccgatatgagcagattttttgttcttgtcacggcacaaagaccagccggtaactgatgtaaggactgaccggttgagaacgactactcttcagcctccctctgctatagtttttttagaggaaaaagacaacacttccctgatgactgtcttgccgctgctgcatgcgctaccactggatactccgttgcatagtacaggcaaagagccaatgtgatatgtcaggcctttgttccatcttcaacgtcaacactcaaaaggattgccttttggcaagtactataagcacctttatataagcccttttatgttgcccctaaatttaccacgtagattaggtgatgagtcggaggagaggagttaggagagagagaatgagccacccctcatgcaaggggcaatctccacacaatctccaagaaaaatataagatgatgtgtgagagtaaactaatattggggtttgtgtactagaggtgacatgttgtaattgttatctcttaattaatgaaaagatgacatggtttaaattagacgtgccactcacctccaccataaaacttgcccttagggcatgcccaaccctccaccttggagggtatccctagctcgccccactttttcgcccgggaccatcgccctgcaaagaatcgcggacctctgcagagcgccgcgcacctctgctcgccccggctcgagaacagcgaagcacgcttggagcggcacgttggcgaggtcgtctccccgtgacggatccacgatggaagatgccgccgccgggaagctccgccggccaccgacgcatcgatctgctccgctactgtggaagaagatggcgaaggggtggactcgagagaaaggcgtacccgggaagctccgtctctgccgcgtcgctccctgccgctgacgcgtcgatccgcggccgtcgcgtcgatccacgtcgccgctgcttcgatccgccgctgccgcctcgatccccacctcctgcgcctccatctgccgccaccgcgtcgatctgtggccgcagccgcttcgatccgcgcccgctgccacgatccccacctccagcggctgctcgatctgctgccgccgggaagctccgccgccaccgctgctcgaggcgccgaggagagagaggggaggtcgtgctggggagggcgccgccggagaaggggaaatcgcgccaccaggaggacgggaatcgagccaaggaggggagcctagtgatttttagggggtatactgctaatattggatgtatatgtaaataaaaataatccaagggtttaaatgt

SEQ ID NO: 12469 - DNA, 1358 bp, Oryza sativa
  ref <308>: DATABASE ACCESSION NUMBER: AK109817
  ref <309>: DATABASE ENTRY DATE: 2002-08-28
ctctgagagagtgggccccacgcggcagcgacgcacgcatgataggctcgtagccctcgccgtcgtcgtcttcctcctcctcctcctcgcgccgcggagaggattccatcctcctccctctccccgccgccgccgtcaatcccgaatcccgagggctcgggtggtcgtcgtcggtccgggatggcggggaggaagcggaaggcggaggcggcgcgggcggcggaggaggaggccgaccgggcgctctacggcgccttccgcggcgccgccaactcgctctcgcagctctacgcgctcgccggtgcccaccagcgcctctccttccacgccggtgagcgccacgccttggaaaaactctaccagtggatggtgcgacagcatgaaattggcttgaggctcacagtatctgacatagcatcccacatccagcacgagattgagtatggaggtgacaatgcattaacttcaccgagatcgcaacacgcattccagaatctccaagctccaatgcacatccccaacacaagcacgcagcagccgccatcttgttcaatcacaccatcaaacccttccaaggactctatgatattttcgaaagcgctatccagccctgtccggcaaaacctgcaactgtaccatgtacagcaatgcggtgacacaggatgctttgcagatggcattttttgccctggaaacggtgactcggatcctgcagcatcaaatgattcgtcggtggatatgcattcagatagcccagggtttccacggcccactgaggccctacgagacagcgaagggggccgacccagctgaacattggctgggacagggatttcatcagagtgaccagaaatgcagagtgatccattgtcatcttgatcccagtaaacttcaaccatcacgcctcttgggtgatcctccgactcggttccgggaattccgacaaaacgagccccctttggtatctgcattgccatagaaaatggaagtgatatcaaagagatattcagagttttctgaagaaatcacacaatcaaattacagcatagcagcaagtttcagagttttctgtactgttgctgctgtacagaagttctctacatagcagtgagattatccttttcatgtccaatattgcagcattgttcttaggggtactaaggaacaaacctgaatagatgaacctgatgataggttcagagtaaccagggtgccttcagcagtagagctctccagttctgcctgctttgcgatgttcaggaatacttcttcgagcgtcgtgaggccgagttgaatgtctgagataccgaattcccgttccctgtcttggagttccccaaagaacctctgcttaatgg

SEQ ID NO: 12470 - DNA, 1411 bp, Oryza sativa
  ref <308>: DATABASE ACCESSION NUMBER: AK109818
  ref <309>: DATABASE ENTRY DATE: 2002-08-28
actctcctctctctcaatcattctaatcgatagcactcgccgcggcggcgcacgccacctgttcgacggaaagccccgccgacgaggaagagcccggccgccaccacatggcgagcggggcggaccgcatcagcgacctcccggacgacgtcatccaccacgtcctctccctcctgccgtcgcgggacgcggtgcggacctgcgcgctcgcccgccgctggcgcgacctctggaggtccgtgcccgccgtccgcgtcgccggcgacagggggtgggccagcttcgacgcgctcgcccgcttcgtcgacagcctgctccgcctccgccgcggcggcgcggcgctggacgcctgcgacttcgacctcagattcgacggcgccttccccggcgaggagctgcagggcgacacctggatccgccgcgcccttcgccgccaggtccgggcgctccggttcgccgtctccacccacccccgggtgcccatccctctctcggactcgcccctcgtctcccacagcctcacaaccctagagctgaggggtgtccagggaaacgaccaggttcttgatttctcgagctgtccttcgctggtggatctcaagatgaaggattgctacgttggtggcctggaaatgtggtctccatcgttgaagcatctgagcataacatactgcgtcttctactgcgactatcgcaccaggatggatttccctagccttgtcaccttcaagttcaacacaaataccgggaggactccgttgctcgagacgatgccttcgttggcaaccgcggcggttaggcttgatcatttctgtcatgaccgatgcgcaaatggttggtacgatgattgcggggatgctggttgtaagggttgtcatgattattataggcctgatgaatacgactgcgtgtttctcgaaggcttgacggaagctacggacttgactttgttagcttattctaaagtgtaccttttcaacagggatttaaagtggtgctctacatttagcaagttaaagactttgtttctgaatgcatggtttgtggctcctgacctcagtgcactagcttggtttctccaacacgcacctcttcttgaaaggctttttcttagagtttcaaaggtacccaaaaatttagtgggaatggatggaagtttcaatcaattggaacaaccatttgcagctagccatcttcaaatagttgaaatctattgcagagaggttgatgggattattctcaaaattttgaaggtcttgaatgccaatggtgtaccactagagaaaattagtatccgatgttctggctgtgagttatctatgaacacccacgcttcctattatgcagttgtcaatatgtgttgtagagccaagcactgtccatagttatatataagttctgacttaatcac

SEQ ID NO: 12471 - DNA, 1928 bp, Oryza sativa
  ref <308>: DATABASE ACCESSION NUMBER: AK109819
  ref <309>: DATABASE ENTRY DATE: 2002-08-28
ggctctcgcctccggccatggcgaaccctcgcggcggcggcggaggaggagcgcgccaccacctcccactccggccgcggcggctgctccggtcgccgatctcgcgctgcgcggtcctcctcgccgcctccgccgcgctcctcctcgtcctctccctccgccaggtccaccgcgtcggcctcccaccccgcgaccacccgcccgcccaggaaccaaatgagcagctgtggggttctgatggttacggttctcatgcttgtgtcacaccaacatctagatatatggctccaaaagggtcagagcgctacatgacagttaggagtaatggaggactcaaccaaatgcgtactggaatctgtgatatggttgcagtggcccgtttggtgaatgcaacacttgttattcctcaattagataagcgatccttttggcaagataccagtacatttaaggacatcttcaatgagcctcgttttattaaagctctggaaggggatgtcagcattgtgaatgacttgcctcaaagcctgcagtctgttccaagagctcggaagcactttacttcatggtctggtgctagttattatgaggaggtgaaacaactttggaaggatcacaaggtagttcacatcccgaaatcagattcacgacttgctaacaatggtcttccgattgatatccagagattaagatgccgctgtctttaccaagcactgcgtttttcagatccaattgagaaccttggaaagaagcttttggagcgtctaagatcacgtggaaaatttattgctcttcatctccgatatgaaaaagatatgctagcattcacgggatgcacttatggtctgagtgaatcggaagcagatgagttaagaattatgagggagaaaacaagccactggaaattgaaggacataaactcaactgaacagagatctggaggtaactgtccactaacgcctgaggaggtggggatttttctgcgagccatgggatatcctgaatccacatggatctaccttgcagctggtgaaatttatggcggtgataagtatatatcaaaattgagatcatacttcccgaacttggttagcaaggaagtgttagcaacaaaagaagagcttggtaaatttaacgaccatgcttctcaagttgcagcccttgattacatagtttcagttgaaagtgacgtgtttattccatcacattctggcaatatggcaagagctgttgagggacatcgtcgatttctaggtcatcgtaagactgtcactcctgacaggagaggattggtggaactctttgatttactacaaaaaggggaacttatggaaggtccaaagttttcctcacttgttactgagatgcataaaaacaggcaaggagctccaaggaagagatatggctccttgccagggagcaagggcagagcacgtctaaggaccgaggaatccttttatgaaaacccatttcccgagtgcatctgcctgaatggaaagcactgatgtgatgatctctgcatggcgacctaagtccatttgctctctgtattggtgtttctgtcgacgaatggagctccagtgacgcatcagaattacactggtactcgactcagtcatgcaagtcaggcaagggtatcattctttcagtgatctacatccaagaatcctgtagcctgcaggtccagaattcaagatgggaaaattggcaggtagagggaagaaattgtacattcatcggtttgtcacatagtcacagagacagaaattgcaaaggatgtgtgatatgtgtgtctgaatttttaggttccttagatctagaaaattttgtatctagtattaggcatttaggcctcaaaaagggaagtttacgtacaatgttcaaaagcttcagctttaacaactcatattcaaaagttatgttttctt

SEQ ID NO: 12472 - DNA, 2062 bp, Oryza sativa
  ref <308>: DATABASE ACCESSION NUMBER: AK109820
  ref <309>: DATABASE ENTRY DATE: 2002-08-28
aggctaaccaccctcgacgtttctctccctcgattcacggcaacctctcggagcgtggtcgcagcaacggccgcggcgttggtggcaatggaacgcccaatctccatgcttcttcttgctgtcgaacaccagatcgcaggagacaagaatcagtgagcatgcatcatgtcgtccaacatgttcggcaagaaagggtgggactcgaatgggatggatacatctggttctgtctgcagaagttcttcagatatcaattacattaatcaacgggcaagattgaagagtgcgagcctaaactgtgtgggttcgccgccaaggaagaacaacaatgctacacagtaccggatgtttgttgccacatggaatgtgggaggaagaactcctaataaacgacttaaccttcaagactttctgcaggttgaagaatctcctgacatctacgtcttagggtttcaggagattgtccccctgaccgccggcaatgtgctcgtcctcgaagacaacgagccggcggcgaggtggctggcgctgatccaccaggcgctgaacatgccccaagaaccggccgacggcgacgagccatcgcctttgacgccgccgccgtcgtcgtcgacgacgacgtcggagtcgtcgaacggcgcccggacccggcggcgcgacgccgtgtcgaggtcagccagcggcaacctcttcttccacacgccgtcgctcaagatgctcagcaacagctaccgcgtcgacagcgcgctagtcaagacgtgcaactgctcgccggagcactcctccgtgcgccgccgtgccgcggaggtgcgcgagtccgtgtacctcgccgacgcacccgcgccagccggcgagacggcggcgccagctgccgacgaagacgacgcgccgacgacggaggcgcagtgcgaggcaggatgcggcggcggcggcggcatgagctactgcctgatcgcgagcaagcagatggtggggctcttcctgtcggtgtgggtgaggaaggagctcgtcgagcacgtcggccatctccgggtggactgcgtcgggcgcggcatcatggggtggctcggcaacaagggctgcatcgccatcagcatgacgctgcaccacaccagcctctgcttcgtctgcagccacctcgcctccggcgagaaggaaggcgacgagctgcggcgcaacgccgacgtcgccgagatcctcaagagcgcgcacttcccgcgcgcctgccgcccggcgcccgccgccgcccgccgcgtccccgagaggattcttgaccacgaccgaatgatctggctcggcgatctgaactaccgcatgtcgttaagctacgacgagacaagaacactactggaggacaacgactgggacgctctactggagaaagatcagctgttgatcgagagagaagcggggagagtgttcagaggctggaacgaaggaaagatctgcttcgcgccgacgtacaagtacacgcacaactccgacgcgtacgccggcgagacggccaagtccaagaagaagcggaggacgcccgcatggtgcgaccggatactgtggcagggagacggcatcgagcagcttcagtacctgcgcggagagtcgaggttctccgaccaccggccggtctgcggcgtgttcgccgtcgaggtggacggcggcgatggcgacggcggcggcgccgccggcaagatcatgaagggttactactccctcaacgcccggatcggcggtgacagatcgcagtgtcaccagggtgacgtgtcgtgaactgattatatatttcatccccttttgcaagtttgcaatgatagggtcttgtgtataagaaggtttattaccaagaacagaggatattgtagatactagtatctgacaagaatcccatgactgaaattagtacgagtactgactaattaagaatacagtaattttcgtaatttgtagaacctgtctagctgtatggttatttttgtccacttatatgaaccccttgggcagagaaagttgtctcgtatatatgtatagacaaattatgtactcgttatattgttatatttttttc

SEQ ID NO: 12473 - DNA, 1846 bp, Oryza sativa
  ref <308>: DATABASE ACCESSION NUMBER: AK109821
  ref <309>: DATABASE ENTRY DATE: 2002-08-28
aacgcaaaaaaaaagcgcctccacaccatcgccgccccaatccaccctcgcgcctccccacatacccaccagcgcctcctctcacgcccgcacccacgccctaaaaacgccccgcccccgccgccacgccgacaccgccgcgccgctccgccgcccctatcacgcctgccgctgcgctccgccgcccctctcacgcctgccgccgctgctccgccgccgcccttcatgccgctcgggaggagttgcgacggggtcgagcccctcatcgtcgaccacctttcttcgctcgcagccgccgtcgtagcgtgcgtcgtcgtcaccagacacctgcgatcatcattccctctgtgtcacctcgccgtccgtctgtactacacctctgccgccgggcagccgccgtcgtagcgtgcgtcgtcgtcaccagtgatcaccattccctcagtgccgcctcgccgtccatccgtactccacctctgccgccgggactcagggccgaacagatctccccggccgcggtcgctcgttcttttgctgcaaaactaaaatgatttggcctggtgaacctaaagcagttttctgatgcagtgttgctgcaatctgacactaggcgtgatccatggagacggtagcactacccatgcctcgtctcgtatcacagcgaacagctgcttctatccctcacaatctcattccctaaattgaagattggtttcgaaagctagattctgaaaaagactgaaatgaaagagtttgttgggggtgccgtaccatcaagtacaacatcagaccctcttgctgctataacaaatacaaatggtctcggtttcactaatagacggggcaagggtagagccaagtcgttatgtgttgttcgaagaaacgacgaagagtgtcacggctctaaagaaaactgtgacaactctgaacagaacactccaatagcttcaaatggtatgcttcatcagaatgtgtgtttccaaatttaatttgatatccatctgtatcaaccaacggatttgggccatgaagttgtgcatcctattgtcatgcctaatagtcagccatttgcggatgaccgcgatgcatccttcagtacacccagcaatttgcctatgtgcacaggtgcgcatggagatgttactaaccttacccatgctgaagttgtaagaaagcgtgctagaaactggtatgcatcattgacccaggagcaaaaggatgagaggaacaagaaggaccgtgagagaagaaaacggaaggaggaggaaagtcaagttttaaataagtctgcaaccaatagtggtgtagccccacttggcaagctttccaatataagtgctgctgatttaatgacatgccaattggaagtgaacgattcttctacgttgcataaagtttattagggaatatgggcaactgatgaggctcccgccatgcatctccctcgatgaagctctccggcttcacactcctcccgctcgccgcacccagatgacagccgccggagaaggagatcggaggaagaagaaactttggcggcggcggcgcaaggtcgcctccttcctcgatttcagcccgctccggtgacaccggtgagcaacctcgccgcaatggcagcccactcattcgcttcgtcgcttttggatgacaacctctgttttttttattttatttttttaccttctcatcccccatgtctctcccaaacatagacatacactagtgttttgaggtggtctctctcttatttttgttgcacttcacatggtacaaacaatactagagagaggtatacatccatcaattttgtaaaattaaatccaaaagtgacaacaacttgtgctcgttc

SEQ ID NO: 12474 - DNA, 1827 bp, Oryza sativa
  ref <308>: DATABASE ACCESSION NUMBER: AK109822
  ref <309>: DATABASE ENTRY DATE: 2002-08-28
ctactctcaaaggcctcgttcgtttaatccctctcacggagagaattgaaggggatttggaggggatttatttcacacctatcgtggtgtgaaattattcctcttcaatcccctccaatccctctgtattgggattaatcgaacaagccctaattcgtgagaagctctgatcgatggcgccgagcaagctccgggcggcgctgggcgcggtcaaggacaggacgagcgtcgggctcgcaagggtgggcggcgccgacgaggtggccgcggacctcgccgtggccatcgtcaaggcgacggcgcacggggagagcgtgcctggcgacgagcgccacgtccaggagatcctcacgctgacgtgctactcccgtgcgcgggtggccgcctgcgtgtccgccgtgtcgcggcggctcgggcggacgcgggcgtgggccgtggcggtcaaggcgctggcgctggtgcaccgcctgctcgccgacggcgacccggcgtacgagcaggaggtgttcctcgccacgcggcgcgggaggcgcatgctcgacgtgtcgcaccggttcccgcaccgatcgtcgcgctcccgcgcgacgtgggacttccacgggttcgtgcgcgcctacgccgcttacctcgacgacaggctcaagcaccggatgaagggccgcgtggccagccagggcaaatggtgctccgacggtcgccgcgacggcttccccgacatcaccgacgggagttacgaggtgggcgaagcggtagccgaggtctgggcgctggtgccgagggacacgccggcgacggggacgacgacgaccgaggagctcgtctccaaggcgcagcatctgaagcacatactccagcggttcatcgggtgccgcccgacggggaaggcgaggacgaacaaggtggtggcggcggcgctgcacaggctggtgaaggagagcgcggtgatgtaccgcgagctcaccgaggtgatggccatgctcgccgaccgcttcgccgagctggagaccccctgctgcgtgcgcgtacactccatcttcaccagcatcgccaagctgttcgacgagctcgacgagttctactcgtggtgcagatccgccacgatctgccgcccgtccgaaatccccgaggtcgagcgcgtcgcgcagaagaagctggacctcatggacgagttcatccgcgatagacaaccggcgtcgtctcggtggtggaggtgcacgccgccggcgccgtccagcccgcttgcccccattgccagcaatggcgacaatagcagcaaggcatcgccagctgagccggcgccggcaggcgcactcgtcgtggtcgacgaccacatggccgacttcctgaaccttggggaagaatcgacgccattgtcgacggaggagcaagaccgggatctgacactgtccctgttcggcgatgacccagcgacgccggcgccgaagtgggagacgtttgacgacgaccaatgcgatgactgggagacggcgcttgtgcagtcggcgagcaagttcgccgccacccagagcgcgacggtgcttgcactgccaccgccacctggggccaccggcggcgaggtcgcggacccgttcgcggcgtcgctggccgtgcctccgccgacgtacgttcagatgatggacatgcaggcgaggcagcggcttcttgcgaacgagcagatgatgtggcagcagttcgagacgcaacaaatggcggcctggagttacagttcattgttgtaagatcgtaaaaaacgaaattaatgttttagagcgatgagaaatttcaatgctaactatgatacacgctaaatgaagctgattttgcacc

SEQ ID NO: 12475 - DNA, 1757 bp, Oryza sativa
  ref <308>: DATABASE ACCESSION NUMBER: AK109823
  ref <309>: DATABASE ENTRY DATE: 2002-08-28
aactgctagtgggcccccgtgccgctccaggggcaggggcgacacgggcggcgaccaccgccgccttcctccctcctccacctcgccgccgcccgagcagaccgccggaaaccgcgtggctgcgaggaaggcggcggcggggccttccttctccctcgagggcgcgggtcggtgcccacgaccccgaccagttgggggcggcgacggtgcggcggcatcggcgtcggcgtcagggcgttgggctgggcgcgcggaggcgacagggtgcggaacagctgggcggaggcggcttggtgcggaacggcggcggcggcgccggatttggcgtccctcgccagatccggcggtccggtctcctcccgggacgatggtggcacccaaggaggcggggaagggagatgcaggcggcgggaaaggtggagcagcggcaacgcgcgtcgcctctccagatccgggctgggggagtggtcggcgccgaggaggtgcggagaccggcaggcagaggcagcgtcacggtggtcaggcgacaacagcggcggctcgctcccgccgtggtcgcggcgccgccgtcggtgtctgtcaagcgttggtgttggcttcggtaatgctgcggcggcgcgctctagctggtcatcccctgtacctggctggatctggccgtccgcggccggatccatcgcctccacgccgaatggcagctggtcggcgggacggctgcgtgtggacggcaagcgcggcggcggctcgctggcggccagcctcctgctcggcagggggcttctgccggtggtgggtcttgtcgttgttgatgggcggcgatgtgcggatgtggaaatggcaggacgacggcttgtgctggcgtgaagcaggaatggggcttgatgtccgtgacggtgacttcctcattgtcggccgagtgttctccctctcttcggtttccccccttggccggacccttttctagtcatggggaatgctagggggagggcggaggctccggcttgctgtagaagtttgtggcggatagatggcgtttcgagggtggccaagggcccgtcttgccattggttacaatcaagtttgctcgggcctcgggaagacatgctgagtgcctaagaacaggacattgctcctttgcagctgatgcacattgcacagctaggcgcggccgcgcggataccgttctgccctgcaccactaggccggccggcaacatgttcttcgtttctgtgatcgtcgggactcgagaattggattctccctcacattaggcggacgaacaagccatcccgtccatccaaatcgctggatgcgacgctgcttgaccttctcgtcatcattcatcagtgggctgtctaaagcggttttcttcgtggagggctttcccggtgctggctgcctttacctttcatgagacctggacacatcgaccagcaaggtaaaggtacgacaaaaggaggtgagcaacgttcctccactagcccacgtgtcctctcctgtggctcccacgaccggggtaaccgtgtcacgctgtatatatcctttagagcttaggtttgacactttagtgagactacatatagagcaagttagatggtactagaaaagggaattaccgttggttttattttgaggctgtgtttagttcccttcaaacttctaacttttccgtcacatcaaatatttgatatatgtatagagcattaaatatggacaaaaaaaaccaattacacagtttgtatgtaaattgcgagacg

SEQ ID NO: 12476 - DNA, 1413 bp, Oryza sativa
  ref <308>: DATABASE ACCESSION NUMBER: AK109824
  ref <309>: DATABASE ENTRY DATE: 2002-08-28
agcggccgcgtggggtggtgacatgggcggcggcggcgacgaaaggggagagtgggaggcggcggtgagggaggaggtgggggtcggcgggtggtgggacgatcccgacggcgacgagctccgcgccaggttcaaggccttcacggggcagcgccgcgactggccccagcccaagctcctcttctggaagggcctcctcctccgcgtcgcgcgccgcctccgcctctgctccgcccccgcgcgcctcgtgctgggtgtttggttcgcgcgccctggtggcctcacgccgctgtgcttgccgcaggttctggaagagatgcgtgccgatggggagattctgctcaaatcggagctaatcgatccgactacagggagcttgtatcagctagtcaggaggatgagccagatggctgtcatctcaaagcagccgattgcgcaggacgacatcctcgtgtttaaatcgttgattgaggaacgggctgctgaaattgttgatcagctgaggaactctcattggacgtcaacgtgcattgttactattagtaaattcaatgccttcttccatgggcaggaggattctcatgttgcattatgttacttgacacaatgtgggaaagcacggtatattgttgataggaggcaagattctgttgagggtgtgaagttttcgctcatggctgcacaagttcctgctgtctcaaagcttgaccacaacacattgcacttaattttgacggaagaaaagttgcagcagcagcttgatgtacttgatcgccaatggcaaatttcaagaaggagggcattggtatccttcaaatctggggataaacagtcagcttatcgatatgtgcggcagtctaagttgttctcagaaagcaggaaaagattcacaccactgctggagagggttgaagaagttataagcctaattgctagtgctgaaacaactaagaaggttaatgaggcaatcaaagtcagtattcaggcgatgaatgagcatcatgtgagcgtagaggaggttaacgagcacctaaaggaggttgatgaccttgttgcaacacaaagagaaattgatgctgccttaggatcagtaatactccagtcaatggattctgaagaaaatatcgaggaagaattcatgaagctggaagcagaattgcaggatgagtttcctcacgttcaagaagatccagtttcacatgccaatgaagaatttcctaatgatgaagatgttgattcattgagcaataacctttcaaacattaaactcgaggccatctagattttcacttattaagtgctacttgtacatatcgtgatctagtcacatcttttgccccatcagtatgtgttgtatttcttatgacaatgttcctaccaaaacagaaattctctattgcagaaatattcctt

SEQ ID NO: 12477 - DNA, 1747 bp, Oryza sativa
  ref <308>: DATABASE ACCESSION NUMBER: AK109825
  ref <309>: DATABASE ENTRY DATE: 2002-08-28
acaattctccacacgcagccgccggcgcccgtcgaaatgctggccaggcctgggcggctcgccgcttccacccttcccaacgattccgccgccgccgccgcatccaccgtcctctccatactccgcggcgaggaccccgccagcctccccgcggccggcatcgacccgtgccccgccgtgttccagcaactccgcccgtcgctgcccaccgtcccggactccgcgctcccggcgctggcccgatgggcgggcgaagccaccgccgtctccctcctgacgtcccgcggcctttttgctgccgcctggcgcctcctcctggccccttcccccacgcctcctcccctcgccgccttcgccccgctcgtccgacgctacgcccgcctcggccgcgcccccgccgccctccgcgccttccagttcctccgccgccaccccgaccgctacatggccggcggcgacatccctgccgcggcgtccctgctaaacatggcggtcgacgcgctctgcaaggagggccacccgcgcgcggccgtggagctcttcgagcggtggcgccgcgaggagcccgactcgccaccagatgagcgggcttacaatatccttctccacggctggagccgcgccggcaggctcgacaaggtggggaaactctgggccgagatgcgcctcgccggggtgcgcccgacggtggtcacgtatgggactctcatcgaggggctctgcgtgaagcgcaggccagaccaggcgattgcgcttcttgacgagatgcgggaagaagggatcgaggccaatctgcttacttgcaaccccattgtgtacgctcttgcgcaggccggccgattccaggacgcccacaaggtgctcgagaaatttcctctgtacggtgtcgcgcccaacatttccaccttcaactcgctcgtgatgggctattgcaagcatggggaccttgctggggctagcagtgtgctcaaggttgacagaacggggcatttcgccgaccacaaggacatacaattatttcttcatgacctttgccaagaacagcgatgttgagtcagggatgaatttttatagcaaaatgatcggtaatggctattcaccagatcagcttacttatgtcctcttggtcaagatgttgtccagggcgaaccggcttgaacttgtggtgcaaatgatacaggagatgagaactcatggttttgagccagatttggcgacgagtaccatgctgatacatttgctttgccggcgtcatcaatttgaggaggcatgtgctgagtttgaggatatgtttaagagaggaattgtgccccagtacatcacttaccagaagcttatgagagagctcaagcgacttggtttggttcatctgatccaaaagttgacaaatttaatgcgctcagtgccacattctacaaagttaccaggcagctatagggataaggaaggggatgactccatggaaaagaggaaattgatattgcagaaagcacaggctgtttcagatgttttgaaggagtgtaaagatccaaaggagttgggcaagctcaaagaagatgaagagactgatgttgaggtcgcagataggttagtagccaacattagaagaagtgtatatgggggtgcctcaacgagctctgtaatggcacctctttcttgaatatggagttgcaaaaatgaaaatcataaagataagggacatgattgcatgtgaggggatttactgatagattgcattgttcatctc

SEQ ID NO: 12478 - DNA, 1739 bp, Oryza sativa
  ref <308>: DATABASE ACCESSION NUMBER: AK109826
  ref <309>: DATABASE ENTRY DATE: 2002-08-28
atatagaccacgctttcatccccaccttgtctcccacacaaatgtcgccggcgcggcgcctcgccgtgctccgctcccacctccagcccgccgcccctgccggcgaaggcgaccgggacgtcgtcgtgtgcgcggagcaagccgcgggggtctcgacctccccttgctccgccgccgccgccgggggcgggcgggaagccgaggggaagagctgcgtgttctgccggatcatccgcggcgaggcgccggccttcaaggtctatgaagatgatgtatgcctgtgcatattggattctcatccattggcgcctgggtaaattgcttctctatcttctccatattgtcactgtattgtactgttgtacgattggtagggaggatttctatctggatcaaaatcctctactgtgttagcttcccacaagttctggcagaagggagagagatatattggattcagtggctaagttagttatcaagaagaagaacttcatcagaggatgacatgtgggttcttagtatttcttttaatataaaaaaaactatttgctgatttacaaactaacaaagttgtatctatgtgccatccttgtcagcatagcatgagcacataggtgccatatcagcctaaattggttttgcgtatgatgaatgggtgttttcctttggctttgagaactcgaggatatcaaatgcttgatttcggaattgaatttgaggattggtccggatttataaaaaaaaattgacaggtgtaaactgaagtatcgttaattaattggcaccccttttgcttatttttgtgataatactgcatcatgttcaatatattgaataaaagagtctttaccttttctcgttacttcatcctagctttttactccatggtatcttgttaacattttttccctctacaggcattccttgattattccaaaatgccattttccatcactggaagcaacaccaccacatattcatttaacatggtggttaataatggagcagctgcaggacaagttattttccatacccatttccacataattcctcgaagatctggcgacaagttgtggcctacagagagtttgagaaggcgctccatcgagcctaacgaaactccaggccttgttagctgcatcaaagagcagctctattcttcaccagaaggctgtaaagccgaaccaccatcttcactgcccaaggaacggtgacaccaaagctgtgatccagtccggtacataatgctcctcagttgcatattgaaatcaaattgccccatttgggagtgtgggattcagtttcagagttggagggtgtatggtaatttatccttgggcgttgttgtacttgtaatagtttctcataggtctgcaactgtatctggtgtataaatcagacaacaaggactcagtacagcattgttatgccctgctgtcgggtgtctgcctgtctggtttcctcactttctggagtggggctgaaatccaacagccatgttgtactgtgtttggcactttggctggtagtggatgatagccatggcgaagctgaagatttgtggacagagcatggggttgtgttgggtttgatgcgtggaagtgtgtttggactctcacacggcagcggccacgcggattttgttgtgggctcgatctgcttctccagttgtgatgcgcagcatcatttcacttatgtttataggtacgattcatcgtatgagtatatctattcttcat

SEQ ID NO: 12479 - DNA, 1907 bp, Oryza sativa
  ref <308>: DATABASE ACCESSION NUMBER: AK109827
  ref <309>: DATABASE ENTRY DATE: 2002-08-28
ctgccagtgctttctgctctttctattccctccctcccttctcccttcatagttccaccctccttccattcctctctgctggtcagggacgagagaaacgtaaacccagccgtgacattatattgcctagctagttgattaatttgttgcaagaactggctagctagctcgagaaattctgtgtacctggccgggtgcatgggcagcggcggcgaaggaggtggtggagcagcgagcgtacgggatcagccgccgcatgacttcgccaacgtcgcgtccttctccgagttgccgttcctgcggccggctccggcgcccagggagagccccaacaactccgccatccgcctcttcggcatcgacgtcccgcacgcgtcgtcgtcgcctgacggcaaagcctccaaggaatccgtcgtcgtctccaccgccgccgccgcggcgtccacgcatggcgctgccgctgccgccattgccgcggccgccgacagcagccgcaagttcgagtgccactactgctgcaggcacttcccgacgtcgcaggcgctcgggggccaccagaacgcgcacaagcgggagcggcagcacgcgaagcgggtgcagatgcagaccgcgatggccgctgccgccgcggcggccagcggcgcgcaccaccaccaccaccaccaccagctgctcggctacccgcagcatcatcaccgcttcggcttggcaggccccacggtggcggcattgtatcaacacccgtcgtggccgacgatgagcggcggcggcggcggtatctcctcaattggccctcagttctatagcgggatcggatcggtcacccagccgatcaacgggagcccgctgccggcggggctctggaggccgggcccgatggcggcgccgccgctgctggccggagagcggcggccggtcgcggtgtcgacgtcgtccgtgttccgaggagacgagccaagagcttcagcttctcttgtggcgtcccagacagcttcttcctctttgctgctgtctccgcaaggtcagttcgcttgtgagcagccgccggcgaccaccgcagctgagggcgtgagcttagatttgcacctataattgttcttttttcttctgttggttttagcggattactacgtacaataactgatttctcgctaccttttcttccttgcctgggaatgagattgccctttactaaattcagatgaatcgtgcgccttttttttttctcctgacacgtgcaaaagaattccatttgccaaactttgatccttttgttaatgtgcatatatacacatgacaaaataatttgggtacattgttagggtttgaattatcataaattacgtccaatacaaaacgcctatgcatttgaaaatgtttactaagtagttagttgaggaacagtcaggtttcatgctgtttctagacaataaatgtgcatattaattcctacgatgaaagagaacagaaattacaactgcatgcattaaccaatttcaatttcggattgcaaaagcaccagggacaataaaagagtaagattttaactgatcatatttttcacggaatcggtcacatataagtaagctgaaagtgcacaatactttttcaacaattgaaaaaaaaaatcataatgcatatacttttcatgcggcccagtaaactgctgcagcttgcagggccggcctgtacgtatgcacacgctaaaaaacatgaaggatatagacactaaaattctttctgaagcgggtgcagagttttttgttttttttaatcctctgtacgtgcgtacctatgggcaacagttctagcaactgctgctgcttgtatgcaatgaggctgtagctttatgtgtagctttcgcatgtcgctagggtcaggtatatgcacaactgcagatgcatgat

SEQ ID NO: 12480 - DNA, 1595 bp, Oryza sativa
  ref <308>: DATABASE ACCESSION NUMBER: AK109828
  ref <309>: DATABASE ENTRY DATE: 2002-08-28
gatgatggtgcacgtgtgtatgcattaatcaaaaactaatcacaaatggcgtccgacgactcttctccgccagacgccaagaggctacgccgctcgccgccgacctccacctctcccgaccacctcctcgtcgacgagatcctcacgcgcctccccatcgccgccgccgtccgcctccgcgccgtctcccgcgactggaacgccgccctcaccaccgaccacttcatcctcgcccaccgcgccagggccgccgccgcgcgccacccggagctgctcttcttcgcgccgccggaccaccgcaacaccaccaccttctacgcctgctcgctccgcggctgcgagccgccggccgccgcacgcgagctcctaaccatcgactacttcagcgccaagcacgccgtcatgtcgcccacgccgtgcaggggcctcaccctcgtctccgacggccgcgcgccgcggtattacctcctcaacctctccaccggcgatcacgtcgcgctgccgccgtgccagccggccgcgaaggcgcaccctgatccgctagcatggttaccccgtggcaccacgagttatctcccgtcgatgacgccatggcgccccttcgagctctcgaccaccgggctcggcttcgacacggcgaccgacgagcacaaggtggtcaggctcttcaagagacgcaacggggagcacgcctgcgaggtgtacaccctgggaaagcccggcgggtggcgcccctgcgccgggagagtgccggcgtccgcggccagcatcctcccagccatgccgccggtgttcgtcaacggctacctctactggctgctccagccagccgcccccggcgacgagcagatccggcgaatcctatcgttctccatcggcgccgagcagttcgggtcggtgtacgtgccgccgcggctgtcctcccgaatgtgccacctcgccaacctcgacggctcgctgtgcgccgtcttcgactaccgcggcgccggcggcgtctacgggctgttcacgtgcagcgagccctcggcgtcgccgtcgccgtcgtggtcggtgcgttgctccatctacctgaataggctgccgcgagaggtgagcgacgagctgatggaggagcgcgtgatcgtgccgctctgcaccgccggaggcaggatcctgctcgccacggggcgccacgaggtgttcgcctacgacgccggccggaacgccgtcgagcgcgtgttccgcatgcaggagttcgtcgatgtgccgaatgactgccgcgaggctcgcctgctgctcagcgttggcctccacgacgaatgcatcgccgaccttcacccgggcgccggcggcgagaggatgctttttgtgaacacgggacgccgcggcaacacggtggtcaagcgagaggtgcccgtcgagtaccacgacgacagcgatcgtcgtttcaatgtatttttcaaggatttggccacgatggctgcccaaatttagttgatactatttgcatatttatattagatttagttttgtttataaatacgggattgctaaatcatttttgatatgtaaaagttgtatgatgtggctttatgagagaagaaaaggaggacgat

SEQ ID NO: 12481 - DNA, 2127 bp, Oryza sativa
  ref <308>: DATABASE ACCESSION NUMBER: AK109829
  ref <309>: DATABASE ENTRY DATE: 2002-08-28
aactaacgctaaaaaagtaacagtttctgtactttattgaaggaaacaccacccacgagctcggatgtttacttctcgaggggagggttccctcgaaaagttttcgctggagaacttcgatttcctgtcagacaccatttcatccatgaagtgtgacgcgtcaaacccgcagacgcttgttgacgccatgcgtgagctggtcgaggtcgtggtgtggggcgacaagtacaacgaagtcatcttcgacggcttcatggagaagaacacgatcggtatcttctcggaagccgtggaaagcccagatgcacaagtggaagtcaaggtgcagtgctttcagtgtttcatcatcctgctcggcaacttgactcgtcaagagtctatctactacgtcatgagcaagaactacatcaaccgcatcatttcgtccgagcttgacttcaccaacgatgagatagtttcgaactacatctccttcgttaaggcactttcgatgaagctcaataacgaattggttcagttctttttccagcacagcaccaactcgtttccgctctatgagtgcagtgtgcggttgctcgaccacagcgatcgcctcgttcgcaccagcgttcggcagattttggtgaatgtgatgcaaatcaatgacgcttcagtgaaatcgtacatggcgacgcaagtgcccaagttcgtcaccggcgtctgcaaatttgtcctgcacacgctcgctgtcctcgcgaccgcattgcccagtcagtccatcgccgccatcgacgcagtgatcgaggatatcaacgacgacttcttcttcctgaacgacctccacggcgtcgcggcaccagagacaatgaaagctgacatagtcaaggtgctcgaggatttttctgggcccctgcaggtcgcagcgcgcgaaaacacggatgccttggcgctcatggcattgagcaactggtgccgaatcgtgacgattaacgaacttgccccgtgcgttgtcgaggcgagcgtcgaaacggccgttcacgtgctcgcatcacaggaaaccaacggtgcgagccaccccatcgctctcgcgttgttgagtaacgcgctggcgctccataaaaaaaccgcggcgatcgacaagcatttcccctcggcaacgtcaggactgatcgacagtgttttgttcggggtgcgaacggtcttggacagtcggcgtgacaagtcagccaccgtggtcgcgttggcattagacgtggccttcactctcgccaagacggtgccgcacggcaatgaacacctcaagaagtcgttacgtgccactgtttggtggctgcaacagcggatcgcggctgacgcttccgacgcttcccaaactgaagacagacacaccaacgaagccaagattggccgtcattacgaatgcttggcgtccttcgcccagaccgtccaacagcaatttacccagctcaagcaaaccctgagtcgcatcggccgtgacgtatctttcttgcgttggggtcaagcgccgcttctcgtcggcgatgcggagcttcgaaacacctttctcgctttgttcctcttgcgaagcagcctgcaggggcttatgacgaacaccagttcgcttcaaatgttcgcactggaccctgaactgtgtgatgttctggctttgtttcggttcggaacggaagcagcatctttcgtcaaaccgagcgattgcatccgagtgcaggtttgcgccgttgacgacgttgatgcttcagcgaagctccttgaccgcacgaacgcagtgatcaagggtgttcctgtgggcgcaaagcaccaccttactttcgtcggcgcgcagatggtgctcctcgattttgaatccgatgactcggaaaagacgaaggtggtgcttacgcttccaatggcgttcggttgtgcggtggtggaaagtgatcgtccgttccgctttcgggtgtcgttcgagagcgtggagtcgcaaccgtctcaccccgttccgttcaacgaaatcagcctcgtcacacgcgataagggctcaacgagagcagtcgttcgccgattcaacgaaattgccttcgcgtcgagaagcgcgtgcagcaaagctctgaacgagctcttggaccggcccttgggtgctccatcttg

SEQ ID NO: 12482 - DNA, 1741 bp, Oryza sativa
  ref <308>: DATABASE ACCESSION NUMBER: AK109830
  ref <309>: DATABASE ENTRY DATE: 2002-08-28
acgcacgtacggcgcgcgctcgcctcactgcatttctatcccggccatcggtccggccgtcacgatgcgccgccgcgtcgctctgtgcctcgtgcttttcgccttcgccggcctgcacgcggcggcggtggaggccgtgacgctgtcgacgtcgtcgcggtggatcgtggacgacgaggccggcgggcggcgggtgaagctggcgtgcgtcaactggccgtcgcacctggagccggtggtgacggaggggctcgggatgcagcccgtggacgccatctccaagaaggtggcgtcgctcgggttcaactgcgtcaggctgacgtaccccatcgcgctggccaccaacgcgtcgctgtcgtcgctcaccgtgcggcgctcgctcctcgcccacggcctcgccggcgcggtcgccggcgtcgaggccaacaaccccgggctcctcgacctcacgctgatcgagtcgttcagggccgtggtcgacagcctcggggagagcggcgtcatggtgatcctggacaaccacgtgagccggcccggctggtgctgcgccgacgacgacggcaatggcttcttcggcgaccggcacttcgaccccgacgcctgggtgcgcgggctcggcgccatggccgcgctgttcgccggcgtccccaacgtcgtcggcatgagcctccgcaacgagctgcgtgggccgaggcagaacgccgacgactggtacaggtacatgcagatgggggcggaggcggtgcacgcggcgaacccggcggcgctggtgatcatgggcgggctcgggtacgacaccgacctgtcgttcctcgccgcgaggcccgtggacgtgagcttcgcggcggcggagcgggggaagctggtgttcgagctgcactggtacagcttcgccgacgcgcgcgcctgggagtccgaggacgccaacgaggtgtgcggccgcgtggcgcggggcgtcgcgcggcggggcgggttcctgctcgacgccgggttcccgctcttcctcagcgagttcggcgccgacacacgcggcggctcgcgcaaggacgaccggtacctcccctgcgccgccgccgtcgccgccgagctcgacctcgactgggcgctctgggcgctgcaggggagctacgcgctgcggcagggcgtcgccggggccgacgaggtgtacggcgtcctcgactggtcgtggagcaagccccgcaacgcgaccgcgctctcgaggatccagtcgctgcagcgcccgctccgagggcctggctacgacgaggcgaggccgtacaccgtgctgttccacccgccgccgtagccgcttcagccgcctcgcgccgtcgccgtggtggtcgtcgccggtcgccgtcgctttcaccgggttcgcgaggagaagccgcagaccgtcaatcccttcatcggcgttgcaacccgccggaaagccgtcgtcgccgtcaacccgaagccgccgcttttggaagctcgtcgccggccgttttctgtcgtcgattgtcgtcgccgtcaccaccggtgggttcctctcgtcgtgctcgttgcgatggtgctctctgtttgcgccgttgtgccttcgttcgccggcggttgtgtggtccagaaccatgcccggcagtgatgtcatcctgacatcataaattttttatttaaatcgtaataattttctgaattaggtgaaaaactgattaaacttcggaaattcatagctaaatcatcgtaactcggattcaagtggttc

SEQ ID NO: 12483 - DNA, 1373 bp, Oryza sativa
  ref <308>: DATABASE ACCESSION NUMBER: AK109831
  ref <309>: DATABASE ENTRY DATE: 2002-08-28
aaaaaaatattaagtacatattagttatagctaagaaacggtgatattgtttttcatatataacccttaaattgatacccgagatcttctatagctgctgtagtagatatatccatttttgcagtaaattaattattaaaaaaatagggcacaatatagcacgagtagtgcacgagacaacaaagaaattattgatgaggtagctagctttaagctgttgtgggaggtcatcgcctcaccaactgcatgctaaatatatcgatagatatattatgctttgttatattctgtcttgcctaaccggccgcatctcccccttcctccactcactttaagcatcgatcactgcttggtactactacgtcgcttaatcacttcttgattcctttgctaacctactactccactacttggcctgccacagtttgatagctagcttagctagctagcgatcgatcgacgtcgtcgttgatccatcgccaccggcgccggcggcgatgtgcctcccgttcctctgcggcggtgacgaccccgtgaaaaatagcgaggtacggccgccggcgaggcacccgagagaaggtccaaacgacggcgacggcggccacaagccatcaccacctccgcatgccggcggcgccgtcaacggcaacgggggagctgctccgcctgctccggcgacgtcgccggacaccgaggtccgggcgcccacctatggcgataaacagatcagtcctccgaaggaaggcgcagctgggaagccgcctatggtggtcccggcggcaaatcatccgcaagctcccaccggcgaggaggctaagaaggctcacggcggcggcggcgccgtcggtcgccgcaatggaatttcgtccacggtactcacggcgccgccgccagtgggacccatggctgctccagcgacgacagtgaaggatgctcctcctgctgctgctgctgctgccgccaacgacgtccatggcgatgctgatgagcaacaccctggctatggtgatcacggcgaggtcgacgaccgcaagcctcgacgcagatcatggttgtgaggtgagcaatggcacgcaactacatattggctgtgctgtgaattgtgatcctcgttctttatgcatatgccgctctcggcgctgctggctggtgatcaacgatgcatatatacatatgtgctatatatatttttacaggtttgcaaaaaataaagagacattagttgctaattgttgttcttgtgccctaactagtttgggtgtaatattgtgttaattgttgtattttagtatgtgcacttgtatgggtgttgatgaatcatggacatatatcagtattgcatgatctcgattataatgcagagcaaaatctgc

SEQ ID NO: 12484 - DNA, 1835 bp, Oryza sativa
  ref <308>: DATABASE ACCESSION NUMBER: AK109832
  ref <309>: DATABASE ENTRY DATE: 2002-08-28
ctgtccgaaagttacaacgaacaagagaacagcccaacactctccaagccccgatacccacccccgacaccggcgatgttcctcctcgtcgccggccacccaccatgggctctcccctcacctttcgtccccggttctcgagtcctttccgtccaatgcagccgccttccccagctcggcctctctctcccgcagagaatcccttgcccgttggaggatggtgagttcgtgccacctcttgtcccagatccatcccagattttcaaaatcaaaaatccccaggtgtattcaagaccggatccggagctacccccctcctctcaggctcagaaattgtgctctgtcgaagatccaagtaaagattgcgccgcgcccttgcaggaagatgtgtcagctgcagatttgggggcaaatcgaaatctgtctatgaagatcctccaccctcagagcaagattgtgcagattcgaaggcattactccaccatactgaagagcgacattcaaccccacgccgcgcgccgtctgtcggttgctgaacgccttaaccctccggtatggggtcgctgggctacgcagcctccgtctagatccctggttcccagacgtgatgcagatgtgactacacaaggccttaactcacgaagctctactacccaggtgaaggaagatcagtggagtgaagtcaagccgagattttggtggagaaagcagcagtcttttaaccctcccaacaaccagaagccgatgcattcaaggaagcagctcttcctcaagcatgtggttggaaaatgttttcgctgcctcagcttagatcataaagtcaccacctacagagagcctcttcactgttggatgtgtcgaggtttcggtcatatctcttcctcttgcaaatccaagaactataaatcccagcaccccccactcaatccccctccactctcctccaccaccacttttccttctctaagtgtttccaatccctccccctcactccaccactcccccacgacagcaatggctagggtgccgggcgatctagcggctcgtcctgcccttatttctgcatggtggcctccactggagagactgagcgattgcgtgagcttttcactgcccgctcggttgtcgcctgggttgaagaaggggaaagggtggaggcgagcacatttgctgatgatgtgcgcactgcattccgcatccgccgctctgatatccaagtcatgaagttccatcctgaagatttctttctcacgctcactaatcatagtgatcgggaggccatcctgcaagaaccaagactgatgctgagaaatggccgtgtgtatcgcttccgtccatgggacgagaggcgcggtgctgaatgcgtcgacgttcgcttcagggtcagagtatatgtggaaggaatccctatgcatgcaagaacagatgcaactgcggcaaagatcatcggcaagaagagctccatccactacattgaagaatactcaaggcgtcgaaactacaaccgcacttttgactattgggtatggagctcagacccgagctctatcccacgagcaacaaggttgacaatcacgtcagcagacgaggaggggctcccagttgacactcccttcccggagctggaagctgtgcatcctgccccttctgacacaaaaaaggtctcacctatcctgttcttattcatattgacactttgcaagacctggtgtcccgacaggtccgctgcttccagtggcgttatggagtagcagatgatgttgcaagaaccagggtaattgctttacccctccaagcctgcagaactgatgaaccctgagttcctctcgacactc

SEQ ID NO: 12485 - DNA, 1428 bp, Oryza sativa
  ref <308>: DATABASE ACCESSION NUMBER: AK109833
  ref <309>: DATABASE ENTRY DATE: 2002-08-28
atccaactttcccatgtaaagccctctccccctcggcgaaaccctagctcctctcctctcctcttcctcgtcctcgcagcacaaatgtccgaccgccgccacgaccgggagaagccccgcgaccgcgaccgggaacgcggccgagacggcgagcgcgaccgcgagctcgaccgcccccgcgaccgcgaccaccgtgaccgcgaccgggacaaggagagggatcgagatcgcgaccgcgaccgcgaacgccgccgtggggagcgtgaccggaagcgctcccgctctccctccgccgaccgctcccaccgccgccactcccactcccactcccaccgcggccgctcgtccccgtccccggacgccggccgccacaagcgccgccgcgacgggtcccccgccgccgccgccaccgaccacaaggacgacaagaagccggaggcccccgtggtgcccaagagcgccgccggggacggggtcgcgccgggcgacggggatgtggacgtggaggagctggagatgatgaagatgatggggatccccgtcggcttcgactccaccaaggggaagcacgtccccgacgccgacgtcagcggggtgcgcgtcgtcaccaagcggcagccgcggcagtacatgaaccgccgtggcgggttcaaccggccccttccaccggagcgcaaccgctgaggagaggaaggatgatgaagatattctgatattgggttgcattggactactggaacatgttgctgtcttgctggacatagtaggcaatgaactgctactgagcatgtataaccttgatggctagttacttcgcaaaactttgtagactatgggatctctcttttttcatcaattgctctgtcgacattccagggatacagaatttggtggctcattttgaactatgggtttacaactttccatgctgtttctgcatataatttggtaatgggacgacaaactgaaacagcctttactttcagttgtagattctggaatgagtttattggtgatgggtgatggttacaaatttggtgggtgatggttgcaaatttggccgcagctttatactctgaacgtcttgctgagtactatcttgcatgcagcgttataattctgaatatgtcgttaaatttaactttcatatagctttggttaacggccgagttttgcctgtaactggtcaagagttggtttcccctgaattttactgtagttatatggttggctgttggcaaggtaaattgtccgcaactgcacattatccaagttgattagcccctaggtttgcaaatagcagaaaccatttttaagccggtgctgacgtttaaatttcaatgcttttcagcacacgcttaaacctcgttttctacgttctaattccacttgttctgtatagtgctataaatcagacaaattggattt

SEQ ID NO: 12486 - DNA, 1654 bp, Oryza sativa
  ref <308>: DATABASE ACCESSION NUMBER: AK109834
  ref <309>: DATABASE ENTRY DATE: 2002-08-28
aattgtgatccacgttacacagtatctctctcatactatctaacatggtatcagagcgggcgatctagcgccgctcccacgcttccgccgccgccgcccccgggagtagcgatctcccaggggcggccacccgttttttttttctcttttcgtcgtcgccgttgtcctggagagatcaatctctgggcgttctgctcgtcgtcagatcgatctgaggccaatcttcagatcggtcatgcatcttcttctcgtcgtcgttcatcgtcacgtcaacatgaagcagctagcagaccaccatgccagcctcgccaggggaacccgttgccagtgccacgccggaagtcggcgctcctccggctcaccctccccctccatcgtcgtcagccggcccctgccttggcggcggcgatctggaggagtccgccgccctgacgacctccctgtcagccttccgcgaccaccgcccgtccgccggctcctccgcctaggctgccaccgcttgtcgtcgtctctccggctggggaccaccgccgcccggggggatctgtctctgccactgccagggggacagccgcctcttctcgacgcgtcaggccgccagccaccgatgctccgccgttgccgtcggggctacggggccgccgcctggccggcggtcggcgtcgccttcccggctcccgatctgaccgccgccgccggggggatggagctcgacccctccggccagccggccctgaggccccctgttggcgccggccagcctccgccgcacgacctcctcccgccgaggccatcggcttgtcggcgacccggacaacgcggcgtcctaccgctcctcggctcctgtcccctttgtctctctcgttgtggtaatgggagatgggagatgattggttggctggttgacttgcccgtgtggactgtggtgcattaatggacttggcccatgtgctgctagttgggctatctattaattgcaactgcattgctgctgctgcttgtatccgtgtatatctttcttttatcccgatcagtgaacgggtttgcgtcgcccgccgcctcgtcgacatcggcacgtctccgacattggcatcgactctgcttcgacttcatcgttccgcctcgcgcatcttcggcttgatcacccgttcaagcgtccggctacaacaacttctacaaccgatcatcatcgagcatgcatctacaccatcaagcttcgggctgccgctgcgtcgccctctcgggctgcagtgttgccgctcatggtccatctccactagttgttggaacgctgcaaggcgccctcctcagcgtggcctcaccaccggtgaacttctcgccgctgcatcgacatggagctgtagctgtgttgtgctctcgaaccgcagcttcgccgctttcatcgtcttcatcgccgttcgcgcatcgacaacctcgtcatccgcactggtcatcgtcagccgcttagggtcttcttcctctacttcgagcatcgccgccgcgtctccaagctgccactgtcgccgctctaggccggtgatccagctacctctacatggctaccgacgtcgccatctaggccgttggtcccgctacatcgccttatacttcatccaacatgattcatcgccagcgttgccgtaaaaaaaaaaac

SEQ ID NO: 12487 - DNA, 1446 bp, Oryza sativa
  ref <308>: DATABASE ACCESSION NUMBER: AK109835
  ref <309>: DATABASE ENTRY DATE: 2002-08-28
atggcctcctcctcctccgcgtaaccatcgtcaccaccaccgcgccatcgcggctggagaacgactacttcgtctacagctaccagtggcctggacgcccctcgctccgccgtctcccctcgccgccgttccccttccacgacgacgaggctgggatccttccccttcccgttcccggcggtgagcagcaattcaagatcgccgtgctatccgtccgcctgaacgggttcaacctccgattgttcgattccgcgtcatggagctggaccaatgtcggcaaggtgatcgtagcttcgccgcagagaccgttcccaatcaagatccccaggaacgccgctcgcctcaaccagcacatcacaacaacggcgatcacgcttggaggtgaagatggcacgatgggctgggtcgatctctatcgcggcatcctgttctgcgacgtgctaagcggcggcgatcatcccacgctcgttggtgttccattgccgctgccaaggagattggtcgatcgcggcgcggaagtcgaaggatgccctaaggccaataggggtattgctgttcttgatggttgcctcaggatggtcgaattggaagttcatggcgagatacttcctacgcgtgaccctgaaactgggcaccttgatcgtgagatcaagaactgggagctctacatgtataccaacagcaagatcaccggtgcttgggaggattggcaattggtgcacggagttgaagcttctcaaatcaatatcgaccaagcgattcatgacagcttactgcaaccgggattgctgcgtgataaaatgcaggatggcaaggagaggaaattgcacaacctcctcacatctcaacctgctctcagcctggatggtgaaggtgttgtttacttgctgacaaaggccaaattcatgcaacgtcaggcttgggttcttgctgttgatgttaagggcaacaaaatactaggattagctgagtttggcactgacacatacttgggtttgtccctcgcgtattgtcctagtaggatctccagttacatggatgcatggactgtccagacaattagttatattttagtactatataagttcctagtcctatgatttatttgcatgtataaggagcaatcgataggataattggttcatcgaaaatatgctgaaaagaggatgctccattatcgacaggatgtagacttcaagttaattttagtctatgcatttaagaattcaccgatgttcaaaaaaggtggatcaaatttataattgctttatagtggcctactgttacaactacagatctacctagtacctacccatagaagtaaattaccctagaagtaaatgtcttcttagctggtcactgtggtatattatagaggtgggcaaaattcaattgagaagatcgggggacctgaaataaattgagaaggtatttcttttttttctc

SEQ ID NO: 12488 - DNA, 1947 bp, Oryza sativa
  ref <308>: DATABASE ACCESSION NUMBER: AK109836
  ref <309>: DATABASE ENTRY DATE: 2002-08-28
atcattcgatctcgaattccacccgctcccatacttccatggacaccgagatcacgcaggagacggcggcgccagcggcggcggcggcggacgtcgatatcatcagcgacctcaccaacgacgtgctgctgataatcctcggcctcttgccggcggcgagggacgtggtgcgcacctccgcgctgtcgacgcggtggcgccacctctggacccgcgccccggcgctccgcttcgacgtcggcccgcgcagctggcggctaggtgggtgtggagccaccgacgaggccgccgccgccgcccgcctcgtcgaggcggtggactccgtcctcgccaggcgcgagggcggcgccgacgtgaaggacctggagatcaacctcgtccaccaccgctccgatggcggcgacaggccgcccatgtgccaccactacgccgccatgttcgtctcctccccttcaccttcacggcaccgggaggagccgcggtgcgacctcctcgccgtgcccctggacgtcgtcacgccggcgcgcgtcgccgcgtggctccgcttcgccgagcgccgcgtcgcggggtcgttctctctcaggctgcccgcgctgtcgaggaggatcgcggccgccggatctccccccgccgtcctcccttgctccgagaggctccacaccatgcgcctcgcgctcggcggcgcggccctcgccgtcccagacgccgtcgctgccgccgcctaccgctctcttaccgacctgctgctcagcaaagtctccctcgacgacgacggcgacgacctccgcctctgcagcctcctctcctccgccagctgccctaacatgcggaggctggagctcagcgacatcgacggcctgatcaacctccgcctcgacgccgccgcgacgctcgaggtgctccgcctcatcggcctccgccacatggagcagatggaggtggacgcgccgggcctccgggagcttgtcctcaagcgcatctacgcccacctgatggcggcggcgtcggcgtcgtcggtgaggatcgccgcgccggggctgcaggcgctgacgtacgagtacgactacgcgtgctggggcggcgccttccccatggtgctcgacggcgagcgcaccgcgaagctccaggtgctgtcccatggcgtccccgacaaggacaacaacggcgcggcggcgtggtttctgcagcactgcgccgccgcgaatcgcctcgacgtcgtactgaagatggaatttgatgaggagaagatggaagaggatattgaggatctgatcaaggatataccagaagttcttaatataaccgacttacgaataacggtagccatctccacgggaaccgtggatacacatgcaattggcgcaagcgtaaccaagctcattgcaaagtttagaagaattgagtatctctccattgacatagacaaaaaggccggtgattgtacaaattttgactgcaaatgtgagcagcataaaggctggagcaacgagatgattccactagatcatctccggatggtagacatacgtgacttcctacctttcaatgaccaaatagaactcgtatgtgcactgattgcgagtgcgccggcactggagaaaatgattgtagcattgcacgagtcatatgaagagacaagagagcgtacaaataacatggaggcgtatttatgcattccaagctgtggtggtcgttggaccccttgtgcttggaatgggggtaaatttggcagtgctactaaatatgagtggaaaccatgtaagcggaagcggtcagaagaaggggtggagaaggtttgaaatgccttattactgttcgatatgaaatacctttatgaaatgtatgcatgtatccttggagttgatctgttatactccctccatttcgatatgtatgatgttaccgacagagtcgacaaacttaataatatagtgattttaccatttt

SEQ ID NO: 12489 - DNA, 1554 bp, Oryza sativa
  ref <308>: DATABASE ACCESSION NUMBER: AK109837
  ref <309>: DATABASE ENTRY DATE: 2002-08-28
ctctctctcagtccccggtgggagaggaccacgtgaggtccgccgtgccaaggctcgggaaggctgaaggctgacggcgctcaggaggcggacctcgccgtcgacgctgccgcatctccgtgcactgccacgcctacgccggggatggtcgccgccggcagcaaggagctcctccgcaacgaggatgggttcaccacggaggacgtcgtggccatggactcccccaacatcgtcgccctcgctgagacgccgacggcaaggacatcgccgccgccgccgctgccgaccacctcaaggccatctgagcgagctagctgctctcctcaaggccatccgtgcagcgccggcgagccgcccggagatccttggcgtcgaggcggccgcggcggagacagcttcccgctccccctgccgccgcggctccttgtggtgctcggtggcgtacgcttgcgggtgaaggtggcagagcagcatcccggacgtgtccgcctccaccctggccgacagctgcctcaaccgcgactccacccagccctgtgagctttggcccagagaaacaacaaaacacacgcgaggtcacacacgcacgaaggaatacacaagtgatgcaaatacttcagtggacaaacacgagcttgcggcgaactagctacacttccactcttatttctcagactcagtgatttgttagtcaagctgcaacacatacagttaccgatcattaagaccaagcagtacttaactaatcaccacccacatggcgtcggccttgacgatctcctggcagacgtcgtcgccgacggcgagctgctcggtgatgacgcgcagggtggcgtctgaggccgagctcgccgtcgtcgtgctcgatggcgcgcagcatcaccgggctgggccacttccaccgcgcaaagccgcggaagaagcgcgggagcagcatgctggggatgtgttggggtagagctggcacatgcgcgccacgaggatagcccagccgatgccgccgaggaagcccgcgacgttggagtagacgccccgcgccttagcccagtgcttcacgcaccgcagcatggtgcggaacacggcggtctccgggacaagccgcaggatctcgtcggccacgcggatgccgttgaggctgcgcgccgtggcaaggtcgtcaaggccgcggagcaccgaccggtcgcactgaggtccactccaggttgtcgggcaccacgggaggcacacgccggcgtacacgagatccacctgcacgccgcggaacctcatctggatcaccggcaagggatgtggcggtggcgggagcggcggcggagtccgtggtggtggcgctgctgtagagagaagagatagaggaaaggggatagagatgaagatgccgagagaagaggaggaaatgaggagtgacgatgacaggtgggacccacgtgggtcccaccatttttatattattttatgtgtgcaacttacatgtgggtcccacgggttttattatttttccggatcgaattgccacgtcagtgccacgtcatatgaagacaagtcaaattagcc

SEQ ID NO: 12490 - DNA, 1550 bp, Oryza sativa
  ref <308>: DATABASE ACCESSION NUMBER: AK109838
  ref <309>: DATABASE ENTRY DATE: 2002-08-28
cacgctgtcttctccactcccaccgccggcctcccaacccgccgccggcgacgattccggcgagatacctggtcggcggacaccggctcccgcgggtacgagccttctctagacgggctgcgtctctgtccatctcttcttcttctccaacatgaggcccctcgcgatacggcggcgggaggcgcggctcctcccacccctcgccgtcctcgtccggtccatggcgtacgtggacgtgaagatgcgatggaagaaggacgcctccttcgacgccgtccccgtgctgtcccaggcgcgggacctccgcccgctcgtgtccctcgccggcctcctctcgccgtcgccgacccccgtctccgcggtctccaagcttcgcatcccgctcgaggtccccgaccgccgcgtcatctccttcctgcggcggttccccgccgccttcgtggagtccgtcgggccggagcacaaccacccctggttccgcctctcgggctccgccgccggcctcctgcaggaggagcgggaggtcttcgccgcgcggcgcgcggacatcacctcccgcctcggccgcctcctcctcatggccccgcgccgccgcctcccgctccgcgccgcgcagggcatgctctggcacctcggcctcccggaggactacttcagatgccgggactatgacatcgcgcaagacggattccggattctcaccattggagacagtgtttgccgtgaggaggaggaggatgatgggagggagcttgtgctcattgataatggggaacaccaagaaatgccaaaatcagtgctccaaatggatgccataaggagatttgggtccatggagacggtgccgatccccctcttccagtcaaaggggctccggctgaagcagaagatcgaggcatggctggaggggtttcagaagctgccttatgtctctccctatgaggatttcagcggcatttatcgcgacagcgatgtttcggagaagcgggtggtcggggtgcttcatgagcttcttagtctgttcgtgacatgctctgccgagaggaggcggttactttgcctcaggcagcacctggggctgccacagaagtttcaccgtgtgtttgagcggcatccgcatgttttctacttgttgttgaaggagaaaacatgctttgttgtcctcaaagaggcatacctggctcggggagacactgcaattgaagaacatcccatgctggtggtgcggaggaagtatgcagggttgatggaggagtcgcgggagatcataaggtgccggcggagtgggaaaccttttccgtcgaagcataaagatcatgagcagattgaggattctgagggtgcaaattctgctccaattttgtcatagaaagctagaactttgcctggtcagaaaaaatgagggcatatgcagtatgattttcgtgataataccaagggggattctactcttggaagtatatggctgcttgttaggaatatttgtgtagaaagacaggagggtgtacaaacaggttggtgactgatgaaattaaattgcattatcattt

SEQ ID NO: 12491 - DNA, 1660 bp, Oryza sativa
  ref <308>: DATABASE ACCESSION NUMBER: AK109839
  ref <309>: DATABASE ENTRY DATE: 2002-08-28
agtctcctttcgtttttttttcctccactcctccgcctcttcttccgccgccgcgacgcgccgttgataggtctacgacgatgtcgccgccgacgaacggcgccatctcgctcgcgttcccgcccatggggccgctgccggcggacgcgctgatctacccgttcgacggcctctcctacgacgacttcgtcctccctgtcgccgccgcaccgcagcatccgctccccgtcgccgtcgccgaccccgcgcccctcctcctcctgccgccgccgtcctcctgcacctgcaacggcgccagcagcggcatgggcgccgttgcgccgcgcacgttggctctgggcgccaccaccgacggcagcgtgatgacccccaccagctggggcagcgacggcggcggcggcggctcctcctccgcgcgggccgtgcgctcgccgtcgccggtgctgccgctggtgcagggcaccggccagaggacctcctgctaccgcggcgtgaccaggcacaggtggacggggcgatacgaggcgcacctgtgggacaacacgtgccggcgagaaggccagaagcgcaagggccgccaagtttacttgggtggctatgacatagaagataaggctgctagggcatatgaccttgctgctctgaaatattggggtgctaatgctaccactaacttccctaaagaaagttacgtgaaagagattgaggagatgcaaaagatgagcaagcaggagcttgtagcctcactaaggaggaagagcagtggcttttctagaggtgcatcgatctacagaggtgtaacaggcaccaccaacatggccgctggcaggcaagaattggtcgtgttgcaggcaacaaggacttgtatctcggcacctttgcgaccgaagaagaagcagcggaggcgtatgacgttgcagcgctgaagttcaggggcgccaacgccgtcaccaacttcgagccaagccggtacaacctggaagcgatctctcagagcgacctcccgatcagcgtgtccgggaggcggcacaacagcagcagcaacagcaacaatccagcaccagaagcaggaggccaaatcactctgatgagcagcccgccgatctcccagcagtcgagcagcgcgccaccgtatctcatccacaacctcctgcagttccagccatgtggtcccccatacgcaccaccaccaccaccaccaccaccaccaccaccacaggctcttccgctgccaggatcgtacaactttgcagagccagtaggcttctactggccctacggcgatggggaggagcagaaggttcagctcaacagcaacatggttggaatggctagtggtggctttcttcatctggccaatgctgccaactgatcccagcgtctgcaattgctggtgttgtgtggttcttgtggagattccgagggagtgagattttgggtggatataggaagggggtcttttggcttttgctgctgccatggactaacaacctgaacatagataacagctggagtagtgaacttgactatgctcgttacaacaacagtgggtctaagctcaaaatgagcttgtggtatgccccagatatgcttagttgttaattaatggtttattttgaacaaaagtggttcatactttctaccatgttgtatccttttt

SEQ ID NO: 12492 - DNA, 1746 bp, Oryza sativa
  ref <308>: DATABASE ACCESSION NUMBER: AK109840
  ref <309>: DATABASE ENTRY DATE: 2002-08-28
aaaaccctacaccctcctcgtttctcccaggcttcagagtcgccgccgccaaatcgccgcccaccaccggtcgcccgccgccgccgccgccggttgcccgcttcgccctagcgggctcgccctcgccaacggcaccgcgacgcttgcctcgccatcgctggcaccgcctcgcctctgaccgcgagctcttcgacggcgtcagacagcgccacgaccactccccgcaggctgcggcgctgcgcccaccactccccgcggcctctcacggagtgaggcctatccgcggcctttctcgtgtcggctccgtgagacctatccgcggcctttctcgtgtcggcttgattgttcttaattcgttggcatgggcaaatccaaagacaagaaggcctcacgggaagctaaagcggataagaaattagtgcttggagtgaagaggaaggacttgaagagaaagaaggacaggactttgaatggtcctgttgagaatgaggttgctgctgaacatggcaccgcagaagataaaggacttgtacgaaagaagaaggttgtagcgatgaaacagaagaagcaaatgaaactaaagagcagtcagactgattctgatgacatgttggaactcttgacgagtaaaaaggatgagacaaagttgaagaacaagaagaagagcaaaaagaatctcaaagaaggcagtaatcttgttgaggagcatcaaagtttgtctgacagaattaatgcaggaacgcctaagctgaagaaggaccggaggagctctgatgagcccaataatgcagatgaagtcttgcatgggaatcaagatgaagaaactccaactgcccgtgttaaccaactcacagcagagagtggagatatggatataggggagcctgaagaagtgaagaggggaaataaaagcaagaccaagaaaacaaagaaatcagggaaaagcagcaaaaaggataagcatgaatccagcagagagaacaagttggacaggcatggtgaagttgatactgcaaatgtcgatgagattcaatctgttgatgaagattgttccagaggaatgaaaaaatgggtcctagagtacaaacagaagaggcccggcttgaaagtgttgcagcaaagaatagatgagtttataactgctcatgaggaacaagaagagcaggagaggaaagagagggaagcacgcgctgctgaggatggatggacagttgtggttcatcataagggtaggaaaaagaccacagatactgaaactggaacagctgttggctctgtatctctagctgcaatgcaggagaaaatggctaataagaaacccaaggaagttgatatgaatttctacagatttcaaaagcgagaagctcacatcagtgaactcgcgatgctgcagagcaagtttgagcaggacaagaaaaggatacagcagcttcgtgctcaacggaaattcaagccatactaatgctgcccactttggatatctatcctcagagacgcagtgctgctaccctgttgaaggccatacgtttcattccttcttggcagcaaatgtttgctctgttggataacatttttggatctttacttcttaatgaaccgaaacaatttcagccctgcatttgcagcgcagatgtattggtttaaaatcatgccatgaatccatgatgccatctggtgcctttcatggatgttctcctgttaagttgtactccctccgtcccctaatataagatattttgatatttt

SEQ ID NO: 12493 - DNA, 1548 bp, Oryza sativa
  ref <308>: DATABASE ACCESSION NUMBER: AK109841
  ref <309>: DATABASE ENTRY DATE: 2002-08-28
aacatatcatagagtactattcatcttacgtgcatccgccgatagacagagatcatcagatcgagatggaggagccgccgtcctcgttgtcatcgccggctctgccgctcgacatggtcgtggagatcgccgagcgctccgaccccatcacgctcctccgctgcgccgccgcgtgcaggcacctccgccgcgtcatctgcggcgccgccggcttctcccgcaacctccgcctccgcaacgccgacggcttcgtccctggcctcctccgcggcttcttcctccagcctcgccgcccctcccccgaccccgactaccagccgctacgtttcgtcgcggctggccatgccatcgtcggcggcggcggtggcgccgatcagatacggtccttcgtgtccagctccgaccacgtgtatggttctatccattggcgcatcgaacccgtggcggcgcgcggtggcttcgtcgtcctccggaccggcgactcctccggcaaagtgtgcaaccctatgacgggctacgtgcgctgcatcgacatgccgaggccgtggtcgtccgggtcctacctcctgctcaccggcgacgacgccggagtcacctccgagctccacccgtaccggcttctctccgtgagccttcacctgaccgggacggggcgcgagcggcggcggattcacgtagagatggaggccttatccccggacgctggctcgtggggcccaaccaccgcgatccctgtcgagatcgccggcggcggcgagtacggcagcccgcgcgccttgctgatccgcacgcccgccgtcgtcgacggcgtcgcctacttcctcggcggccacccatcgcttgtcttcgacctccaataccagcgccgccagttgccctacgactacttcatcctctgcgtcgacgtctccggcgaaaccgagatcgggagtgcaacatctccggcgacgatcacgcggttgccgaccgaactccggctgctatcgtcgtgcacgggcgaggcagacgtctcgccggggcagctcctgctggtgccgccgtcgtcgtgcggcggcggcgacaggaagtcgttggcgctgctcgtcggccggaggacgcaggtggagatctgggcgatgaacttcggcggcggctgcggcgccagcgccaggtcggccccgcgtctcttgtcggtgtcgtgcacgagggtcgtcgacttgacgacgacgggagtgcaccggagtccatgctccccgccgctgccggtgccggagtcggacgaggtgttcgtgtggtccggcgaggcgagcggcgccgtggtgctccggctcagggggacgctctgcttgctggaccggcggacgatggcggtccgtgcgctcggcgaggacttcagcgagttccgtgatgggcctaacggtgtgttcctgccgtacgagattggtgtttccagttgggttccttcgatatctccatgattttgtgagaaacgtgggattaccggaagtcgcaactcgcaagcaacaccaaattaacatgcgtgtgctcaattatactccctccgtttct

SEQ ID NO: 12494 - DNA, 1500 bp, Oryza sativa
  ref <308>: DATABASE ACCESSION NUMBER: AK109842
  ref <309>: DATABASE ENTRY DATE: 2002-08-28
gcaaaacacgtgacaagtagagtggagtagtagagaaaagcatcttctcgcatccatggcagtggagatcgtcaagtcctccatggtgacggccggcgaggcgacgccggagcacaggatatggctctccaacctcgacctgctggtggccaggagccacacccccaccgtctacgtctaccggcgaactggccccgactccgacgcggcgtttttctcgccggacgtcctcaaggccgccctgtccaaggtgctcgtccccttctaccccctcgccggccgcctcgctcaggacagcgccggcaggccggagatcagctgcaccggcgagggcgtgctcttcgtcacggcgcggagtggcgccaccattgacgacctgggcgacctcgccccgtcggacgagctccggcggatgcttgtcccggcggccgatgtcgccgctgccagcatcttggccatgttccaggtgacgttctttaggtgtggaggggtgtgcctgggcgcggcgatccatcacacggcggcggacggcctcgcggcgctggacttcgtcaacacgtgggccgccattgcgagggacgtcgccggcgacggcgaggcggcggcggcggcggtgcagcggccgtggctcgaccgcacgctcctccgcgcgcgctcccctcccgccgtgcgcttcgaccacgccgagtactcccgtcgccgcggcggcggttcaaagctgccgttcgactcggccatcctccccatgtccaagaaccagctcaacgcgctcaagggcgccggcgccggcgccggcaagaggctgtccacttttacggcggtggtcgcgcacgtgtggcggtgcgcgtgcaaggcgcgcgggctcgccgtcgccggaacggaggcggcgacgaggctgtacatgaccgccgacgcgcgcacccgcctgcacccgccgctcccgcgcggctacctcggcaacgccatcttccgcgcgtcggcggtgtccaaggtgagcgacatcgtcgccgccgggccgctcggcgccgtcgcggagaaggtgtccgccgccaccgcgcggctcgacgacggctacgtccggtcgctgctggaccacctggagcagacggcggcggcggcgagcggcggcgcggcggggctccgcaagggggagtgggtgatgccggagagtgacctgtgggtgatcagctggcaggggctgccgctctacgacgccgacttcggctgggggcggccggcgttcatggggcgtgcgtgcctccagttcagcggcctcgtctacctcgtgccaggccgagacgacggcgacggccggctcgacgtcgtcgtggccatggaccccgagagccttgccaagttcaaggatgtgttctatgaggagctcaagtgttagctccattcgagctcaacaccaacttttttttttaattaagccgaatttataacgattttgttaaaaatatattgatttttcccgaaaaaaaaatattgatttctgtc

SEQ ID NO: 12495 - DNA, 2896 bp, Oryza sativa
  ref <308>: DATABASE ACCESSION NUMBER: AK109843
  ref <309>: DATABASE ENTRY DATE: 2002-08-28
aagataaacagtgtgttgtgtttgtgagagagaattagtggacttggagagagaatattactactcctactatcgctattgtgagatagagcgagagcgaaaaaagtgggagtagagtaaaaataccactcccctccatcggtccatcccatccagtagtagtagggtgttgtgtggcgcctctcgccgcgaaacgttcgaaaccccacgaaaacctccaagaaaaacgaacccaacctacgtaacgcgcggacatgacggccgcgtgacgccatgtcggcggaggaggcggggggcgcgtcggcggaggcatcggggtcggggtcggcgccggccggtgcggcaatggtgccgggcggggaggaggcggcggcgaggaagcgctacgacgcgctgatgcaggtgcgtgccaaggcggtcaaggggaagggcgcctggtactgggcgcacctggagcccgtgctcgtaccgccgccgggttccggcgtgcctcccaaggctgccaggctgcggtgcgtgttgtgcgcggcgacgttctcggcgtctaacccgtcgcgcacggcctccgagcacctcaagcgcggtgcttgccccaacttcgccgcgcagcagggggccgctgcgcagccacaccaggcgatgaccgtgtccgcggcgtcgtccgtcgtgcccatctcgtccatcccgccgtcgtcgcagcgccgccactcgaccggtggcggtgggcggaagaggcacgcgctggctgccgcgtacgccgccgtggaggcggcggcctcccagcacgtggtcgtgggagacccttcctcttactcgccgacgccacccacgccgccggcgctgcccgcgccacggcaggtgctctccggtggccgcggtgacctgggcgctctcgcccggttggaggacagcgtgaagcggctcaagtcgcccgtggcgtcgccgggggcgatgctgccacggcagcaggccgaagcggctctcgcgctgctcgccgagtggtttctcgagtcgtcgggcagcgtctccctcgcctcggcagagcatcccaagctgaaagccttcctccgccaggttgggctgccggagctgtcacgggccgagctcgccggcgcccgcctcaacgcgcgcttcgccgaggctcgcgccgacgccgcggcgcgcatccgtgaggcgcggttctttcagctcgcggccgacgggtggcgcgaacaggtggtcaccctctccgtcaacctccccaacggcgcgtccgttttcgaacgcgccgtgcccacgccggctccggcatcgtccgactacgccgagcagcttatgctggaagccatctcatccgtctcggcctccagcgaactccaccattgcgccggcattgtcgccgaccgtttcggctcgaaggccctgcgcgatctcgagcacaagcacccgtggatgctgaaccttgcttgccaagtccatggcttgtcccgtctagtcagggacatggcccgtgagctcccgcttttccactccgcgtcggcgaactgcgccaagatggccgcctacttcaacgcggcgcccacggtgcgcgcgctgctgcacaagcaccaagtccaggagcacggtcacgccatgctcctccgcgtcgccgccccgccattcgaccgcgccgcggcgttcgcaatgctcgaggacatcctgacctcggcgcggccgctccagctggcggtgcacgaggagtcgtacaagctggtgtgcatcgacgaccccgcggcgagggaggtcggcagcatggtgcagaaggtggcgttctggacggaggtcgaggcggcgcactcgctggtgaagctgatcaccgacatggtgaaagagatggaagctgagaggccgctagtcgggcaatgcctgccgctctgggaggacctgcgcggcaaggtgagaggctggtgccgcaagttcaacgtggacgagggcatcgccatgaacgtggtcgaggtgaggttcaggaagagctaccacccggcgtggtcagcggcgttcatcctcgacccgctctacctgatcaaggatgtcagcgggaggtacctcccgccgttcaagtacctgacgccggagcaggacaaggacgtggacaggctgatcacgcggctggtgtcgccggaggaggcccacctggcgctcatggagctgatgaaatggcggtcggaggggctcgacccgctgtacgcgcaggcggtgcaggtccggcagcccgacccgtcgacggggaagatgaggatcgctaacaagcagagcagccggctggtgtgggagacgtgcctcagcgacctcaagtcgctcggcaaggtggccgtgcggctcatcttcctccacgccaccgccaaggggttcaggtgcgcgccacccatgtcccgctggctcaccgctcccgggagctctgccgccggcattgcccgcgcgcagcgcctcgtctacgtggccgccaactcgaagctcgagaggagggacttctccaacgacgatgacaaggacctggagctgctcacggagggagacgatgacatgctaactgaggctactgccagtgtggatccctcttcagtgtagtcagcagcataccacagcatccatcccctgatcccctgcctgattttaattggtttttcttttgtttttaattaattgctcccttttaatgttgcccttaattactagcatttgtagaatttgataactaggaattgttagattcttcaattttttttctctctattttgttttcttttcctttttttttacttgtcttgtgctcatgttgccagttcttgcttgctccctcctcttgttttggtggggtgggggtggtaggggcatgagattggagatcatttgcaccattaatttgctttgcgttgct

SEQ ID NO: 12496 - DNA, 2206 bp, Oryza sativa
  ref <308>: DATABASE ACCESSION NUMBER: AK109844
  ref <309>: DATABASE ENTRY DATE: 2002-08-28
atgcccagttgacttgctcacctgcggtcaacttgcaatagctgcatatcgtttcaacaacaatataacatttccataagccagcaagatgacgatcccggatgaggttgatattatcgtgtgtggcggaggatcatgcggatgtgtcgtcgctggccgtttggccaatcttgaccataacctccaggtcctcttgattgaggctggtgagaacaacctgaacaatccatgggtcttccgcccgggtatctacccaaggaacatgaagttggatagcaagactgcctccttctactattccaggccttctgaatggctcgatggacgccgcgctgttgtgccctgtgcacacatcctcggaggcgggtcttccattaatttcatgatgtacactcgtgcctcggcctcggactacgatgacttccaagccaagggctggaccactaaggaactcattcctcttatgaagaagcacgagacttaccagcgtgcctgcaacaaccgtgacattcacggatttgaggggcccattaaggtttcttttggtaactacacgtatcccatcaaggaggacttcctccgcgccactgaatctcagggcattccaaccaccgatgatcttcaggacttggtcactggccatggtgccgagcactggctcaagtggatcaaccgtgacactggacgtcgctccgattctgctcacggctatattcatagcacccgtgccgttcatcagaacttgcacctgctgaccagcaacaaggtcgaaaaggtcattctcgagggtgaccgagctgttggtgtcaaggttgtccctaccaagcccgtctctcctggacaggtcaactctaggatcatccgcgcccgcaagcagatcattgtttcgggaggtaccctgagctcaccacttattcttcagcgctctggcattggtgacccagagaaactgcgaaaggctggtgtgaagcccctcgttgaccttcctggtgtaggtctcaacttccaggatcactacctgacttttgccacataccgtgcgaagccgcatgtggagtcatttgatgacttcatccgtggtgaccccaaggttcaagagcaagtcttccaacagtggaacattaacggcactggcccacttgctaccaatggtatcgaggctggtgtcaagatccgccctaccgaggaagaactcaagatgatggacagctggccatgcaaggagttccgttctggctgggactcctacttcaagaacaagcccgacaagccagttatgcactactcggtcattgcaggctggttcggtgaccacatggtcatgccaccaggcaagttcttcaccatgttccacttccttgagtacccattctctcgtggctctacgcacattgtctcgccaaacccatacgaggcaccagactttgacgccggattcatgaatgacaagcgagacatggccccaatggtgtggggatacatcaagtcgcgcgagaccgcacgccgaatggacgcatatgccggagaggttcaggccatgcaccccttctacgcatacgacagcccagcccgcgcacgcgacatggacctcgccaccaccaatgcatacgcccttcctggtaacctctcggctggtattcaacacggctcctggaccgcgcccttggagaagggtcgcgtcccccagcccacttacttgaactccaaccagcaagaagtctttgaagacttgcaatactccaacgaagacatcaagcatattgaagactgggtcaagcgccacgtcgaaaccacctggcactccctcggcacgtgctccatggcccccaagaacggcaactccattgtcaagcacggcgtcctcgacgagcgcctcaacgtccacggcgtaaagggcctcaaggtcgccgatctgtccatctgcccagacaacgtcggctgcaacacgtactcgactgccctgctcattggtgagaagtgcgctgtgctcacggctgaggacctcggatacagcggtagcgcgctcgatatgaaggtgccaaactaccatgcgcctagagaggtggttggcttgtcgcgcttgtagagagagagagagggaaaaaaagggggggagttgtgtgtatttgtagcatggatgagattaagttggtatctatggcgaagaaaatcacaagtatggatgctatgtatataagattgaacg

SEQ ID NO: 12497 - DNA, 1906 bp, Oryza sativa
  ref <308>: DATABASE ACCESSION NUMBER: AK109845
  ref <309>: DATABASE ENTRY DATE: 2002-08-28
tcgctttccactctcctcccccacttccatttcgcggctaaacataggcgattaggagagcgagctcgacgcacgcgcgcaatcacacacccacgaaaattttcgatccacgcgatttccccattcgctcccgaatcgaggccgcatttttttcgatcgaatttggggttcggatcgaataatcctgtaggttttgctcacctcttcgatcgtcatctccggcgagccggtggcggtggtgatggtgatggtgcgtggctaggcgcgcgtggcgtggtggtcggaggccatgaacatcgtgcggggcgtcgccgatctcctccgcaaggcgccggcgccgccgcccgcgccgcccgcggtgccctcctcctccttcggcgtccgcgagggctccttccatggtgccgaccaggacgtcgctccctctccccgcgtcgtcttcagtgatagcacggaggagagagtcttaaatacactatggaagaagtatgagaatgccctcaataaggctgaaaaggagaaatccctgcaaatttttgtcttacaatttgtacaaacattcagagattggggaccataccataatattcatttggttgatcaagaacaaggatctgatgaaacagttgtaggatgctctcacgggcatccttctgaggtcattcttatcctgattcaggagatgtctataataacatcaactattgcagaaataggtggcaacagtccagaatcttctccgaactattcagagcaaccaggagatctgggattaagtactgaacggctacatgttttggagtgcttgacaattttgactcgttccatgcataactgtagagtatttagctattatggtggtgtaaagaaggttacttctctactaaaagctgcagttgctcagctcaaaatccagaacagtttgcttgctgcagataaccacgtctcatgccaagctgtagaaaatataaaaatgatgctaaatatgctcaaatacatagttacaataatttccaacttcatgaaattggagccaactatcctgaggattccccattttctcaattccactaagtgtgcctcatcaaaaaatcatttggccacagttactccaagcacttcagaaagtggtatttttgatacacttcaacgttggcaacaaagggctattgttcttgtgatgggagctggtggtgtcaattcgttagtagaacttttgcgggtcattcagagactgaattcggagcagtggacagatctttcacttcattttatcacattatgcactttgcgatcaactatatctggaacccgtgcccagaatcatgttagaagcattggtggtttggaaattctacttgatgggctaggactcccttcaagtaaattttcagttttgaagaattcatctatcccaaaagatgaaagggttgaagttcttctgctccaaatattatatttggaaattctaagtgaggcagtatttggaaatgtcaacaatctgcaatttttgtgcgaaaatggacgtgtacacaaatttgcaaactgcatttgttggcctgcatttatgattctggagttccatcggcaaagggataacaccgggccttcacttgcattagattcgatttctggcccaatttattttcttgatataaccgaatggagggagtactctgtaaagttgagcaatgcactttgctcttttattattccttcaaaggttataagttactgtcgtaatgaaattgcttgcaacaaaatctctttatctatcccatcagcataccgagagcaatctgtgagatggttcataagggttcttatgacagtcttcctatgcatcaaagcttgtactagtgaaactgaattgccaaaccatataaagtaagtttgctttttatgt

SEQ ID NO: 12498 - DNA, 1898 bp, Oryza sativa
  ref <308>: DATABASE ACCESSION NUMBER: AK109846
  ref <309>: DATABASE ENTRY DATE: 2002-08-28
gactcgtgagagcagcggaattcaaaacgcaaaaaaaaaaaaaaagaaaagaaaaagaccctcgcttccgtttcctcctctcccaaactcgcctcgcctcgccttcccgcccgccgccgccgtcgccatggatgccgccggcgaggaagggggcatgacctacggggaagtggtggactacttcaactccttgcaggacccgccggcgcaggagcgcatcgactgcatcatcccctacctcatctccctcctccccgcgcccttcgtccccgcgccgcccgacgccgcctccgccgacgactccgaggacgaccacttctccttcacctcgtccgacgactactccgccgccgaagacgcccgctccttcccgtcgccgccgccgggggatggcgaggaggaccacatcagccgcctcgcggacgacctcctctcggagatcatctcccgcctctccaccaaggaagccgcgcgcaccatggcgctgtccacgcgctggcgccgcgtgtggacgaagacctccctcctcgtcgacgacgcgcacctcagggacgccgacaacgaggtctccctcgtccgcgccatctcccgctgcgtggacgcgcacccgggccccgtccgctccgcgcgcatcacccacgtcgccttctaccaccacgagtacgcgctccggcgcctcgtggcgagcctggccgacaaaaacgtcgaggacctcatcctcttcaaccgcccgtggccgctcaacatgccgctccccgacgacatcttccgctgcgcctacctccggcggctgtacctcggcgcatggatgttccccgaagtcgccgctgccgccttagtaaacctccgcgagctcggcctcttccactgcatcatccccgaccgagacttcgacgccctgctctcgctctgcagtaagctggaggtgctctccctcgccatgtcgtacaactgcccgtcgcggctccgcatcaagtccccaagcctccgggccgcggtggagtggatgtccagcctcgacgagattgtcgtcgacggcgcgccatgcctggagcggctgctcctccaccacgccatccccgtcgccgagcgtacgcccatcaagatcgtaagcgcgccaaggctggaggtgctcggcatcctggacctccagctccacgagctccagattggcggcaccaccatcaggcctgggatgtggatgtttgtgaagtctagcgccaagctcccgagcttgaagatacttgctgtcaaggtgtgtttggcgatcgaacgggagatcaagctgctgatgacgctgctcaaatgcttccctcacctcgagactcttcacatcaagtccattcctccatgcgcatcacctgaaatcgcgaattgcgcggatgtttgggaatccctgggttcctgcgaatgcctcaagtcgcatctcaagacagtcagcatccaagggttccacaccgagcgctatgaggtgttgtgcctcaagtacctcatcttggagggggaggtgctcgagaccgtggccttcttctgcgaggataaagtgtgcttcgccgccaaggacgacgaggcggtggagatcgagctgatgtttcccaagaacctcgtccaagatcgctggagcttccagagcgccattgatctgtctctcgacgatcccttcttctacgccgtggagagctgatgggtctgtgcgtttatggtgtttttgtcatccgacatagatgggttcacaaatctatggatgtagcactgacatactaaattcttcagaaattaacggtgaactctggatgctaatttagtactagttgttaggttctgggttgcggaagtactaaaactttggtgcgtattgttttgggccaaaatccacaatcctgtctcaatttgaagtt

SEQ ID NO: 12499 - DNA, 1732 bp, Oryza sativa
  ref <308>: DATABASE ACCESSION NUMBER: AK109847
  ref <309>: DATABASE ENTRY DATE: 2002-08-28
aaactcgcaaaccaaacccggcgacggcacacaggttttagcaccggacgggagctctccgccgtcgccgacgacgacgccgccggggtgcccagctcgcaggatcacacagagaaggttgatgatgtgaaagctagacccgacgagctcgacattgctatcgttggtggaggcatggtgggattggctgttgcttgtgcattgtccaatatgccattgactaaacatctgagggttggcatcattgatagcaatcctgcattgaagtcaagaaattatctgaagaaagatggtgtacctgattcaagggtcagtactattactcccgcgaccatatccttcttcagagatattggtgcatgggatcatgttcaacagcaaagacacgctttctttggtaaaatgcaggtatgggattacactggactgggttacacaaggtatagtgcaagggatgtgggaaaagaatatctcggatgcgtggtggagaacaaggtgctttgcaactcactgttgttacgattacaggaggaaaatggagacattgaaaagatgatctaccctactagactgatttctcttgctttgccatcaaagagcagacaagcaccaacaagggaagcaatatccagtggttaccctccagaagaattaaatcgcagcaatttagttaaacttgagctaagtgatggacaaactttatattcaaaactagtggtgggagctgacggttccaagtccaatgtaaggcaaacagcaggcataaaaacaacagggtggaattatcctcaaagtgcaattatttgtacagtggagcatattaccgaaaacgattgtgcatggcagaggtttctcccttctgggccaattgctctacttccaataggtgacaactacagcaatattgtgtggacaatgagcccagaggagtcattgcgccataagtcaatgagtcctgaagattttgtgaagtctgtgaacaatgcattggattttggttacggtccacatccacactctggtagtcttgactattacatggaaaagttattttctgacattggaagtactgctgcatctacaaaggaatgctttgaagtacctccaaaagcaatcggggtagtctgtgagagaatggcatttccattgtcgctgaagcattcacatgattatatttcaaaaaggttagcactagtcggtgatgcagctcatacagtccatcccttagctggccaaggtgtcaacttaggttttggagatgcagctgctttagcaaaagttatcgctgaaggagtttctgtgggtgctgattttggggatatttccttgctcaaaaggtatgagaataatcgcaaagcagccaatgttgcaatggcagcgctgctagatggtttccagaagatgtactctgttgattttggacccctcaatgtgcttagggctgcagcgtttcacggtgcccagtacatatcaccactgaagaagaacataatctcgtatgcaatgggcgacgcgaaatggccgctgttttcatagacagtagatccggaaactttaaatttgttagttgttactgcagtgtcgatgtgttattctaaattagtatagtgtactttgtctccagtgttctcatccagagtagtaatgcatcacaggcacacgttgcagagaagaaatgtagctagaaagaaataaattggatctcctggtgatctaggattaccttgaatgt

SEQ ID NO: 12500 - DNA, 1440 bp, Oryza sativa
  ref <308>: DATABASE ACCESSION NUMBER: AK109848
  ref <309>: DATABASE ENTRY DATE: 2002-08-28
agaaggaaggccagaccaggaaagggaggcaagtttatctcggtgggtatgacatggaggagaaagcggcgagagcgtatgacctggcggcgctcaagtattggggcccttccacacacatcaacttcccgctggaggactaccaggaggagctggaggagatgaagaacatgacaaggcaggagtatgtggctcacttaaggaggaaaagtagcggtttctcacggggagcttccatgtaccgtggtgtcacaaggcatcatcagcacggacggtggcaggcacgcatcggccgagtctccggcaacaaggacctctacctcggcactttcagcacgcaggaggaggcggcggaggcgtacgacgtggcggcgatcaagttccgggggctcaacgccgtcaccaacttcgacatcacccgctacgacgtcgacaagatcatggccagcaacaccctcctccccgccgacctcgcccgccgcaacgccgccaccaccacctccaaggacgaccactccgccgccggcgccggcgccattgtctcggtgcactccgccgccgacatcgccgtcgccgacaccctctggaaggccaccactgccccgaggcagcagcagcagcaccacgacgacgtcgtgctgtccggcgccgaccaggccgcattctccgtcctccacgacctcgtcgccgtcgacgccgcggcggcgcaccagcagcagcagcagcagcagcacatgtccatgtcggcggcgtcgtcgctggtgacgagcctgagcaactcgcgcgaggggagccccgaccgcggcggcggcctctccatgctcttcgccaagccgtcgcccgccgtggcggcgtcggcgcagcagcaggcgtcgaccaagctcatggcggcgccgctgccgctcggctcctgggtctcctcgccgccggcgtctgccaggccgcccgccgtctccatcgcccacatgcccctcttcgccgcctggaccgacgcctaatcaccctcgccgccatggctcaccggagtagtaattagctagctatagctagagctaggcaacgacgacgacgacactagcttaattagctcgtgtttagttggttaatttagggttcttggttgctcggcgacatgattagctaagctagcgatgtagtagtagcactagcagctagttggagtattaattagtatcactcaaggcgaggaaaccgacgcacgccatggccgcggcctctcccccacctttccttcttctccggcgacggccggccgccatgtatcagagagctcgatcggcgccggagaagaagggtttttgtaacacggaggccggagatctatcgaggcggtgcttctcctccaaaatccaaaactatatatcttatattaattaattaattaattatagcctcaccaaattaatttctcaaaaaaac

SEQ ID NO: 12501 - DNA, 2145 bp, Oryza sativa
  ref <308>: DATABASE ACCESSION NUMBER: AK109849
  ref <309>: DATABASE ENTRY DATE: 2002-08-28
gacccagtgtcaaggtcagggagagctgctcccttgctggccttgagatgtttgcattggttttttccctttccctttctctttggtggtcattaggcctacctgatactacttgtagtgagtgagtgataagttgataacacttctccctgccccaattgtttccttgttcctagtagaagtagaagctggaagctggtctctttgggttttggaaggcttcatctttccattttaggtcctgcaagtgtgctcaacaactcaagcttcactgtcttcttggtttctacctctggttttgattattatcactagtttctgcaattcttggagatttccgaggcggccatgagcggcaatccatcgttctcgcagctcggtgcggtggacgccgccatgaacggcggctacttcatggcggcgagcggcaatggcgccgacgtgccgctgttccatccggccatggcgccgccgcatgatcacggcgggagcttcggctacggcgacgcggcggcggcggcgatggacgtcggcgcgcacttcgcggcggcgaacaacctcgtgctcgcgtccctggcgacccagctgttcggcgccgcgccggcggcggcggcgcacgggcatggcgactacctcggcgcgacgacgccgccggaggaggagatggggggcgggtacgacgtcgccgtcggcgacagctccggcggcgcggtgagcctcgcgtgcctcggccacggccagccgggcgacatggcggcggggtggtgctcgacgtcggcgaggaagccgagctgcaactggagcagcagcaacgccggtgtgcacggtggttcgtattacctcgccggggtgccggaggctgccggcttcgtgtccgcggcggcggcgagcgagctgtcgctgagcctgtgctccaagtcgtcctcggacagcatgctcaacgccggcggcgaccagtgctcgtcggcggcgagccgttccgggctgacgcagatgagcagggtggtggtggtggagcccgagccgccgctcgtaccgtactacccggcggcgaacttcgccgtggtggtggcgcggtcccgatacgccgcggtggcgcagcaggtgctcaacgacgccgtcggctgcgtgctgggcggcgtcgcggacgccgccgccgactcggccagcggcgtcgacagcggcagctcgaggccgtcgagctgctcggtggccggcggcgcgccgtcgtccgccgtgagctccaacaaccagctcatcgcctcctccggcgagcacacgcacggcggcggcgacgcttcggctcagcggctcaggagcgagctcctcaccatgctccagctgatggatcagaagtacaaccaatgcctcgacgagatccagagcacgacggcgaggttcaacaccctgacgcacgccacggcgcgcgccgccgggatgagcagcagcagcatctgcgcgccgttcgcgcaccgcgccgtgtcggcaatgtaccacggcctgaggcgccgcattgccggcgagatcatgtccgccgccgccgcggccggcaggccttgccgcggcggcgagtcgtcgtcggcggtgaccggcggcgagagggagcggagctgggagtcggcgttcatccagaagcactgggcggtgcagcagctgcggcgcggcgagcagcagtgctggcggccgcagcgcggcctcccggagaagtccgtcgccgtcctcaaggcctggatgttcgagaacttcctccgcccgtatccgaaagacagcgagaaggagatgctcgcagcaaggagcggcctcagcaggaaccaggtgtcgaattggttcataaacgctcgagttcggctatggaagccaatgatcgaggagatgtgcgaggagctgaagaggagctcgggtggtggtgctggaaatcaagctctagcaatggagcatatgaacagccaagatgtggtcagttaaccagttagagctttggcttggtttgatggcgatgttagctgcggattaagatcaatcaatgccattgatctatttatcgatcaccaattgtaactcagtttaattcgatggtttcagtatatataaaagctgccggtgcagtgatcgcatttcgcggtagatcatgagcacctcattggg

SEQ ID NO: 12502 - DNA, 1493 bp, Oryza sativa
  ref <308>: DATABASE ACCESSION NUMBER: AK109850
  ref <309>: DATABASE ENTRY DATE: 2002-08-28
actgacacgtgggccccatcgctctccaccctccactcctcccaagcaggcagctccccgctccaccggcgaaaccgccgaaccatgccgatgtggtctcagccaccgccgccgccgtcttccctccagctgcggcggccgccgcctcccttgccccaccgtccccgccgcctccgcagccggctcagccccatcgccgcctcgcaggacccgctgaccgccctctctcgcctcctgtggggccgcgcgctgcctccctcccagctcgtcctcgccgtccgccatggctggaccgccgcgtggggcctcctcatgcggcagctcgccccctccgacccggccaccggcgccttcacccgcaccccgtcccgcttccccgccgtcgtggggacccccagcgcgcgcctccacctctacgtcggcctcccgtgcccctgggctcaccgcgccctcctcgtccgcgcgctgctcggcctcgagcgccgcctcccgctctccgtcgccgtcccgggggacgacggcgcgtggtccttcacgccggacagccccgacgcgctctacggcaagcgcaagctccgcgaggtgtacgcttccgcacgccgcggcgggttcgaggggagggcgtcggtgcccttgctgtgggacgcggagcggcgggaggtggtgtgcaacgagagcatcgagatcaccaagttcctctgcgacctcgccgccgccgacggcagcgccggtggcctcgacctctggccgccggagctccgccaagacatcgaccgctggtactccttcatctaccccagcgtcaacaatggcgtctacaggtgcgggttcgcgcagagccaggaggcttacgacgccgccgccggcgagctgttcgccgcgctggaccggctggaggatcacctgtcggggtcccgctacctgtgcggcgacacgctgacgctggccgacgtgtgcctcttcacgacgctggtacgcttcgacctcgtctaccactcgctgttccggtgcacgaggcggaagctggtggagtacgcgagcctccacgcctacacgcgcgacatctaccagatgcccggggtcgccggcacctgcgacatggccgccatcgccgacggctacttcggcgccctcttccctctcaaccccggcggcatcctgcccctcgtgccggcgagctgcagcccggaggcgctcctggagccacatggcagggaggcgctgtcttcttctgctgctgctgatgctggtggtggcggcaatggcaggcagctcgaagcaacgagtgcttccaactagtggcagtagacagtagttgtgcaagtgcaacatttcgtcagtaaattttcgtgtgcttctttgttattacgactctagtgtaagattttgtaaatcaactgaaattgctgctgctgcatgaggatcatcatactatccatcctaaaatgtatatatactgattgttgaggaacaggaaagacaatttgatctct

SEQ ID NO: 12503 - DNA, 2095 bp, Oryza sativa
  ref <308>: DATABASE ACCESSION NUMBER: AK109851
  ref <309>: DATABASE ENTRY DATE: 2002-08-28
ctgatctcatccattgatcctcctcgttgtaggaaatcaccaccaatcccaccgattcctctccaccgctctttccgcccgtgcgatgagtcctccgcgtgaatcctgccacctcctcgctccgctcgaatccccgctgctgccgcagtgcaccactggaccagcgccaatccccgccgcctcctcgctcctcctctctctacttgaatcctcgctgccgccgcagtccaccgctggaccagcgccgccgctgccgcgcctccatcgccggaccacctcactcgctgctgcacctcctcgagactccccgccacacgccaccgcatcgtgcccctccgctcccaggccggcgctcacctcgctcctctgttcaccatcgcaggggtcggtgagctggtgaaagcccccgtaagaccaaggattgtggcttccgtgacgaccccaactccattgtgccccacgattttgactccctctgcctgaacggtgacccttacccgtctgatgtacgtctttctgtttctgcccaacctctctgtctttctattgctgaaggatttgcagtggtggttggttaatggttaggcagggtggtttaatctggtatagaatcctaactcagcttgtttccctttgtcgatccattgctttcactattagatgatcatatttggatgccaaatagtgtgctaaagatgatgtccatcatatgctaatttaaatgccaaattgcaacttgttactcaaagtattggctgattgtacagctctgattcaaggaactctcttatattatttggattatgggagcttcctgttcatctttgcaagctgattactctgaccacaatcaaggtatgtagccgctctccgctcacattggccttaaggtgttatcggaatttactaatatcatttctgggataccttttctatactgtattttttgcatttgcttgtcctcacgtaagattcgttgtgtccaatgtttagcataactttgtagagtggatattagtgaccatttgtatgagcatatgggtcaatggatcaatgtatgatcagtcctgcctttggacatcaatatgttattttgcaaacagattccttagtttgttacacactaatatgagataattcttgaaaattctagaaggctggctaggtttctagataatccttttatttgatgtaatcatctcttgcctggcagctacagcgtcaatggtttgctggcccctccttatttcaaatattggcttattcatgtcctatacaggaggttccggttgtatttatataggggaatgtgttctctgatttaacagtaccctaagttttcgtatctggacatctgtgctgaaacaaaatgtcgcttgacagttagctttactggtggtcatatttatccaattttacattgctctttcatgtgtttacaattaagggttcctggaccgaagcaacgttactccctttcacgtatgatgaaggatcattaatgtgttcctctttccttcctttctatgcagtcagggtggattgtctgaacatggagtactgcaatggtctggtcaacctattgcatatttgcgttgcagcttctagctatcccaattgatgtaccccttaaattaatcgtgtatttgattgggggatatatgcgtgacttcgattgccacatataaaaaaaggtatgcgatatctagaaaacattcttgatgttactgtgactatgtcgaactattgtgaatatttgatttccttatatatttactaaccagggcggaaatatatccacacaaacaaggtacactatgcttgctctcaaataaaaaatgattcctttatttagtgattatgctctccctctagaagtcattatgtacaattccattcgtttgcaagatattcaatggaatttctatgtgaattaattgttgtgagtatgaaggtgcagttgacaaaggtcaaggagaattggtgaactaatcagtacaacaactattttttttcgaccggaaatactgccaggactttgtcccgcagtgtaattttataaaatgaaaaggttatttacaaattacagaataat

SEQ ID NO: 12504 - DNA, 1723 bp, Oryza sativa
  ref <308>: DATABASE ACCESSION NUMBER: AK109852
  ref <309>: DATABASE ENTRY DATE: 2002-08-28
ggagctcatccacaagctcgccgagccagccgttgcaccggccgcgccggagcgagcacacggcggccgcgtgcgtgctccaatatgcccacgtcgcggcgcgcgctcgccggcggcgctttgtccatgcacgtcgcctacttcctcgccatctcctgcctcggctacggcctcctcggggtgctcaaggtgcgggagcccggcgccgcgccgcgccgcatcgaccgcttcttcaccgccgtgtcggccgccacggtgtcgagcatgtccaccgtcgagatggaggtgttctccaacggccagctcgtggtgctcaccgtcctgatgctcctcggcggcgaggtgttcgtctcgctcgtggggctcgcgtccaagtggtccaagctgcggagcgacgccatggacagatcccggcgcgtcgagagccacggcgacgtcgcgctcgccgacatcgacggcggcgacgtcgagaacccgacgtcgtcgggagaggaggcggcgagccgacgccgcccgatggacgcggacacgctgcggcacaatgcggtgcgcgcgctgttctacatcgtgctcgccatcttcgcggtggtgcacgtcgtcggcgccgtggccgtcgcggcgtacgtgctcgcgtcgccgggcgcgaggcggacgctgggggacaagtcgctgaacacgtggacgttcgcggtgttcacgacggtgtcgacgttctccaactgcgggttcatgccgacgaacgagaacatggtggtgttcaagcgggacgcgccgctgcagctgctgctggtgccgcaggtgctggcggggaacacgctgttcgcgccgctgctggcggcgtgcgtgtgggcggcggcggcggcgacgcggcgggaggagctcgtggagatggcgagggaggggggcagggcggcggcggccgggtacgcgcacctgatgccggcgcggcggtgctggatgctggcggcgacggtggcggcgttcgtcgccgtgctgatggcgctggtgtgcggcatggagtggggcggggcgctgcaggggatgagcccgtgggagaaggtggtgaacgcgctgttcctcgccgtgaacgcccggcacaccggcgagtccaccgtcgacctctccatcctcgcgccggccatcctcgtgctcttcgtcctcatgatgtatctacctccgtacacgacgtggttcccatttgaagagaattccactactaaggatagtaatgcagagaaccagggaatcagactgctcgagagtacacttttgtcacaactctcctacctgaccatctttgtcattgccatctgcatcaccgagagaagaaagctcaaagaagaccccctcaacttcagtgtgctaagcattgttgtcgaagttgtcagtgcatatggaaatgtggggttctcaatgggctacagttgcagtagacagatcaatccagaccatctctgcacagataaatggactggtttcgtagggagatggagcgactctggcaaactgatactcatttttgtgatgttctttgggaggctcaagaagttcagcatgaaaggaggcaaagcctggaaacttagttagatcttagatgcagtaccagctgaacattgcaggtccctgagggtaggaaaaaagtataaagatgtactctttctcttccgtttgtttgtatattcattttcacatagacaggaaccttccactgtcatccttgcac

SEQ ID NO: 12505 - DNA, 2010 bp, Oryza sativa
  ref <308>: DATABASE ACCESSION NUMBER: AK109853
  ref <309>: DATABASE ENTRY DATE: 2002-08-28
atgtcaagggattgccggagtcgcacgccgtcttccaggacgcaagacaagaacagatcgttgctccttgacaaggttcgtgcctcccacgcggaggcgctggaacggctgcggccggcggcggacctcgacgccggcctctgcttcggcttgctggatcccgtctccaacgccatcgtcaacgccgccgtcttcgccgaagcggaagatgggaacgacaggacggggcgatctctcgacggcgcggtcaccttcctcaccacgttcttccctcacctcccggactgggaggccgtgcgctacctgctcgacgccgacgctgacgtcctcgtcgcggcgcgcctcgtcgtgcgggaccgtggactgaggagattcgggttcgcctcggacaccgccggcgccgccgtaaggttggccctcagatgcgccgcgctggccgtgaagcatccgcatcccgaccggctcgtccacgcgtggctgtccctgtctcgccgcctcgacgaggccgtgtccgcgctcgccaaccacgacgtgcgcggcctcgtcgcgctggtcgtcgacgaggcggaggcgccggcggcggccaacatggagagggcgtgggagctggcagcgtcccgatttctcggccgggacaacggcatcgccgcgccgccttaccggcacgccatgcctctccagaggacgctcctctacgcgatccaggggttctacctccgggcgctcgcccggctgccctccggcgagctgcggtctcactaccaccggagcctggtgaaggccggccattgctacggccccatggaccccgtctccaacatcatcctcaacgtcgtctggtacgacgccgcgcacccgccggtggaagagctcgagctggccatgatcccgcccaagagcatgtccagcatcgccacgcgttccttcctcggcctcgtctccttcctctgcacccgctaccccaacctcggcctccatgacgccatccggtgtttgctcgacttcgacggcgacctcaacgccgccgcaagagaagcagatcggcggcagcaccgtccctcctgcactatccaggagtcctacgccgccgccgccgcggcggcccggcaccccaaaccggacgaacaagtggagttcctcagctctagcagagccatgacgacgccgctgctcctgcagaacggcggccagctctcctcggaagacgttcgccgcctcgccgccgccttactgcctccaactccctccgccgccgtctcgccaatgcagcgcaaaccaacgaaaccacggcggcgaagacagctcaaactgaaggcgcagatcatccgtgatcagaacaagatctgcaggaaggtgaaggctgcattggacagatacgcgttgcagaacaacgaacccggtggttacgagctccatgtcatctgtggcatgaacaattgcgtatcaggacccgtgtattgcactgacgatgacatcgtcagttatactcctctgatatactttcgttgtcatgtcaatttcttggctcgccggagagactccgatccatctgccattgccggcgagggagctcttcaactcttctttgcagaatgcggtaactatcgcctcaaccacgacggcatttgctgcccagtaaccatatcgccaccatgctcagaacaagtgcgttgcctttactgcgaacatgaaggggttgggattatgcatccgtcgatagaaaatttccatgggcgtgaggtggattttgagaagatggtatgtggagaagatacctgcggagacgaatttgatccagaaattgatgaggaaccgttttacaccaacgatggtatcgttaatagcctcaaagtgaatattttgtccgggttagaagaggaattcatttatcgcaatagcgatgaaggcaccgacgaggaagaaggtgactctgatgatgatatcgattttgtgtgagttttcttttttttttacgaactggcaaaagaatttgtcaatttcattgagaag

SEQ ID NO: 12506 - DNA, 2122 bp, Oryza sativa
  ref <308>: DATABASE ACCESSION NUMBER: AK109854
  ref <309>: DATABASE ENTRY DATE: 2002-08-28
atgcccccttcaatctcgatctgttaattaaatccatagaagagtgaagcctttatttttctcctttttcgaggagaagagtgaagcctttcaatctcccgttgatcacacctagacaatggaggttagcatcggcaagccagatgacgggcaatcgcttcttgctaatgttgaggcctccgatgaccatgccgcctttgatgccatggccacaagctcgcgccgtccacctagcttgcgccctctgcggcaccccaatgtgacatcccttgcaccattgccaccactccatcgctgtgtaccacgacaaaccgaggtgatattcccgccacttgactcaccggactcctccgagctgaagaaggttatgtccatcagcctgccagcaacaccaaccggctttgccgcacctgttgccggtgccagcgactcgtcgggcatagatctccggaggcaagccatggcgtcgaacatgacacaaaggctacagcagcgctcgccaacgtcgcagagcaacaacggccggcggctcacagacgagacaacagcgttccagtcacccccgcctacccccggtggcggccggtcgtcgatgagccgggacaaacgctatgattcattcaagacgtggtcggggagactcgagaggcagatcagccacctggcgggcatcgggccggacatcccttcacctgcagggcaagtcgtggatgccgccatggatagtcaccaccattctcacactgtgtccacgcccgaggttggccgcttctttgccgcactggaaggccccgaactagaccaactcaggtcggaggaggagctggtgctgccggtggataggacatggccattcctgctgcggttcccggtgtcggcgttcgggatctgccttgggatgggcagccaggcgatcctgtggaagaggatcgcggagtcgccgccgacgacgaggtacctgcacgtcgccgccgacgtgaacctcgtgctgtggtggctctccgtcgcgctcacctgcgccgtctccgccgtctacgcctgcaaggtggtcttcttcttcgaggccgtccgccgcgagtacctccacccggtcagggtgaacttcttcttcgcgccgctgatcgcctgcctcttcctcgccatcggcgtgccgcggtccgtcgcgccgtcgacggcggcgctcccggcgtggctctggtacgcgctcatggcgccgatgctgtgcctggagctcaagatctatgggcagtggatgtcgagcgggcagaggcggctgtccatggtggcgaacccgtcgaaccacctgtccgtcgtgggcaacttcgtcggcgcgctgctgggcgcgtccatggggatcagggagggcgccgtgttcttcttcgccgtcggcgtggcgcactacgtcgtgctgttcgtgacgctgtaccagcggctgccgacgaacgaggcgctgccgcgggagctgcacccggtgttcttcctcttcgtggcgacgccgagcgtggcgtccgtggcgtgggcggccatcgccggcgagttcgcgctcggcgcgaggctcgcctacttcgtcgccatgttcctgtacgcgtcgctcgccgcgcgcgccgtcagcctcttcggcggggtcaggttctcgctggcgtggtgggcgtacacgttcccgatgaccagcgccgccgccgccaccatccgctacgcggcggaggtggaggacacccgcctcgccagggcgctctgcgtcgcgctcgccgccgccgccacgctcaccgtcggctgcctcttcgccaccaccgtcgtgcacgccgtcgtgctccgcagcctcttccccaacgacgtcgccattgccatcaccgaccaccgcaaggtgaagcccaagcccaagcccaagaccaccatggaggtgcactacaagatggatggcaatggcgacatcgagggcggtgctcctgccatgacgccatcgccatgcatgccgatggcgacggcagcttagaggatttcttttcttttctttttgacctgccaagccaacgcgtccacatgcacatgcatggttttagcggtttgaatttgataagatgaatatttgaaatacaaagtgcctatgaaaatttatattgtt

SEQ ID NO: 12507 - DNA, 1638 bp, Oryza sativa
  ref <308>: DATABASE ACCESSION NUMBER: AK109855
  ref <309>: DATABASE ENTRY DATE: 2002-08-28
atgtcacagaggcgcgccttacccgtgtctccggagagtggagtggagaagaagaactgaagaagccgttcgttctggagcgcgccgccatccgctcgaacctttcccctctttgccttgcgcaccaagttttttttcttgaggagttagattgagcaggagaagagccgcggccggtgtggatttttgtgttggtcggtcgcgaggatcgatggcggcgggggaaggagacgtggggatggaggtggagacgaaggcgccagcgatgccgccgccgccgccggcgtcgtcgagcgcggccaggaagaagaagcaagctcgcgcgaagaacggcgacacgcctgagcctgacgccgccggcggtgcccgtgcccgggcgtctcggcgagcgaaacggggaccgggcagctaccgcggcgtgcggcagcgccggtggggcaagtgggtctcggagatccgcgagcccaaccgcgggaagcggcactggctgggcaccttcggcagcgccgtcgacgccgccctcgcctacgacaaggccgccgcgtccatcctcggtccccgcgcggtcctcaacttcccggcattcagccctcctgccgccgccactgcgccggagcaacgccaaaccccgggctgttctcctgcagccgtcgccggcagcggcggcggcgcagtgttcgaggagcgtgacgtgaagccggtggtgttgccgttgccgttgccggccatactccaggatggcggcggcacggaggcaatggcgcagcattgggattgggagtgggacgcgtcttggcctgagctggagatgttcgagtgtctggatgacatcgccatgtacctcgacgtcgacgctgtgatgacgactcgggattgcaaggttgaggagctcgacgccgacatcgtcgactcgccgctgtggacactgtcggactgaaatggcaaatgtggcagccatctagacaggtttcttttggaactctctacagcatcagcaatttacagccacaaaaatggagctaaacaaactgagtttaatatattctcgaggataccaagttctgaacctttttgacatgtcattgatttctcctctcttctcgccctccgaccactcatcccctccacgttgcagcaaaccgccatggccaaagcagcctgacgaggcgggcgggccgcggggggcaagaagagccagcggcgcggcgaccgcgccattgccggcgcgcgcagtggggcgcggatgcagaggaggcagacgccgaggaatcgttgggaatggataagatcgactgctacgtcgtgccgcagaccacgggcaccggccggaacatcttccagggcggcagcccgctctcggcgtcgctgccgctgctcggcgtgcagctcgtcctcatcgtcgccgtcacccgcgtcctctacttcctcctcaagccgctgaagcagccccgcgtcgtgtccgagatcatggcacgtccaccccctcgagcctcatctttcttcttatgcttacgtttaccagccaaattttatacttccaatattttgaggttttttatcaaagttttttattctttgtttttatatcgctaagaacacgtatataaaagttttattcacatattacttttcgtttgc

SEQ ID NO: 12508 - DNA, 1735 bp, Oryza sativa
  ref <308>: DATABASE ACCESSION NUMBER: AK109856
  ref <309>: DATABASE ENTRY DATE: 2002-08-28
aatccgagagggatttttcctcgcaaccaaccaaaccaaccaaacccccaaccaagcgagcaagccgccttcgccgggggggcccccaccctgacggcaaccctagccctccgatcaccggcgctgagactgatcccgccgccgtaggaggaggaggaggaggtggtggtggtggtggtgatggaggggggcggcgggggcgggtcgctgccgccgttcctgagcaagacgtacgagatggtggacgacccgtcgacggacgcggtggtggggtggacgcccgccggcaccagcttcgtcgtcgccaaccagcccgagttctgccgggatctgctccccaagtacttcaagcacaacaacttctccagcttcgtgcgacagctcaacacctatggctttaggaaagtagatccagaacaatgggaatttgcaaatgaggatttcataaaaggacagcggcaccggttgaaaaatatacatagacgcaaacctatattcagccattcatcacacagtcagggtgctggaccattaacagataatgaaaggaaagactatgaggaagaaatcgagaggctcaaatccgataatgcagcactgtcctcagagcttcaaaataatacgttgaagaaacttaatatggagaaacgaatgcaggctttggaagagaagctatttgttgtggaagatcagcagaggagtctgatatcatacgtcagagagattgtaaaggcaccaggatttctttctagctttgtacagcaacaagatcatcacaggaagaagaggagactgccaataccaatctccttccatgaggatgcaaatactcaggagaaccagatcatgccttgtgacttgaccaactcaccagctcagacattttacagagaatcatttgacaagatggaatcatccttgaactcattagaaaatttccttcgagaagcaagtgaagaatttggtaatgatatttcatatgatgatggtgtcccaggcccttcttcaactgttgttctcacagagctccattcacctggtgaaagtgatccccgtgtttcatcacctccaacaaggatgcgtacttcgtcagctggtgcaggagattcgcactcctctcgtgatgtagcagagtctaccagctgtgcagaaagtcctcctattcctcaaatgcattctcgtgtagatacacgagcgaaggtttctgaaatagatgttaattcagaacctgctgttacagaaactggtccatcaagagatcaacctgctgaagagcctcctgctgtcacacctggtgcaaacgatggcttctggcagcagtttcttaccgagcagcctggatcatcagatgcacatcaggaggctcaatcagaacggcgagatggaggaaacaaggtggatgagatgaaatcaggagatcgacaacatctttggtggggcaaaaggaacgttgagcagataacagaaaaacttggacttctcacctcaacggagaaaacctgacataattttgtttttctttttgtagatgaaaaactattaattcaggaacgctgacattggtgccttcctcagtgagatatgttgactaacatctatttcgcagtgtaccgtattttttccatcatgtaccgtaatgtatcatagtgccatacattcatctttggtccattgacactttctgatatcattgtgcgtgatttctaaaatattctcaagtttggttaaatgttac

SEQ ID NO: 12509 - DNA, 1648 bp, Oryza sativa
  ref <308>: DATABASE ACCESSION NUMBER: AK109857
  ref <309>: DATABASE ENTRY DATE: 2002-08-28
acagccacaggcaccacgcgcactctatagtactccatccatccatctctcctgcagctgcagtgcaggcgaggctgcctgctagctcgatcgttaaatactcagcttgcgctagattataaattcaacaagagagaggtagcgatcgatctatctcatcaacaagatcgagccaattaattaagggcgcatgacgatgaagatgaagcagcagatgatgaacaagctcggcctccttgtggtggcggtggcggtggcgatggcgcctgcagggagctttgcgtcgtcgtcggggaggggggctccgatggtgccggcggtgatcgtgttcggcgactcgatcgtggatccagggaacaacaacaacctaaagacgcagataaaggcgaaccatgccccctacggcatggacttcgccaacagtgaacccaccggccgctactccaacggcctcattcccaccgacttcatcggtacggtatcatactctctcttcttcttctcacttcaacaatgcaacacttcattaagagcatgcatgcagcagcagcagcagagctggtagtgcgtgcactgacatgaaaacaatactatataatagcacagactctccgtactcgaccgcatccatgcattgtttactgtacttacaactaccacgaatgccataacgaaaacaaaatggtttacatgcatgtatgttctctgccgttagacataccgtcatttgacttttattaattaatttatttaaaaaatagacacatatatttatagtgatgggataaattaacttcccaactagctccctttaaaaaagaacatgacaaaagtttccaaaatcacatactcctagattcttaggataagatccattcacctaaattcacttttgaaaagaccgtcgacagttaccaatttcaaaagtgtaacataattacacatagtattcataccatgttcttcctaggtagtatcaatgatcaagaattggaacatatagctagacaatatgcattatgttagaaaagtggtttttttttctgaagaccatatatatgattacagcaacgttaaattaaccaacacaatcaatgcactggtccttaagacaagaaaccttttgatgccatttatatttgtgagaacgagtataaaattgtgttcttctttctccaccatacatgcatgcatgcaaataatgtagcccgcatagtatatatactagtatagtagtagtgagaaattaattaatggaaatactagctacaactacgtacaataccaagtataggtggagatatatgcatgcatgcatgagtaggtgcgtgcagggcggcgttattagctggccgccgcgtggtgtacatgcatggcgatggtgatggttaatttggacgacagacgacatcgacatgcatgcatggacaggccatctccgcctcacctccgatcgatcaatccgccatcatcaatttcattcatcatttaatacactacagttgtatatcacgcgccattctttattttgcatccatctctcatccttattccatgcaggactgtatatgtgcatgagctatcattaattaatttagttgccggtactgcagttgctgacttgctgtactacttacctacttttttg

SEQ ID NO: 12510 - DNA, 2381 bp, Oryza sativa
  ref <308>: DATABASE ACCESSION NUMBER: AK109858
  ref <309>: DATABASE ENTRY DATE: 2002-08-28
aagactacgcctccgcgctactcactcctcgcgtgtacggctccgctgcctcactccaccgctgcccctgccagagccgagttcttctccagccgtcgtcgccgcactccaccgctgccccgccggagccgaggtcttccccagccgccgccggaacccgagaccacccttgacggcacagaggtcgttccaagccgccaccgcactccaccgcagcctgcccccaccggcacaatggtggttccatcttctgccggaccagtgcccgggattgcccccgacggtgccgaggtcattcccagccgctgccgcactctaccacagcctgcccccaccagccacgaggtgtgtccctaccgctgtcagtctccttctgccgcaaatcacatcaggatacctccgcagcatgcccccgccggcgcagaggtggttcccccttccgccggagccacgcccgggacttccccctccgaggccgaggtggttcctccatccaccggaggctggagctgcgtctgggcctgcccctccggcgccgaggtggttccccgcccacctttgcctcccacctttttttgctatttgttcccgaaagtgcgttatgcaggtactgtagatgctcgataaaatgcttactcgatggaacgacgcgacggcaggaggtcacaactaggagttcagcggttgtggaggggcaatgatgttggatttggcagtgcataaggccccagattagtgtctgctcccatatggtttgtaaattgtaattcggattccaggcaatccattgagttgtgcagcggcatttcactcttccagttgcaattgacattgttatctagatttttgagattttcataaaactcatccaggtcgcttaagttgtgctgcaggcaagcttcctgaatcctgagagaattttgcacatgtattgcactttcaggttttataaaaatctccactgtgccaaaaatgtagcacctacctgggttcatctttatttctctcaccaatattgcagttcagcatgcatagacacaatgcaggtccctattcagctcaaattgacattctggacattggaccacctcacctcgcgccgcgacatcaccaccgttactgctacatacaaactgctgcattcccctttctgttggattgtagctggtgggggaacattgatttgttctttagaaattcagtaaataggcatttttttgtttagccattaaactttggaggaactacagactaaacttgtagatgcagaggccataatagatttgtaagaggcaatggattttagtattcagtaatcttgatttcagcttgtcaatttgatgcgtgattgggttttcagggtcagagcaacaagcgtgaatgcgtgattgagcggatacactactgaggtactcatcattgagtttcttggcaagatcgatcatggtgacatttagactaaaccgacagacatggttgtgtcaatagctcttgttttacatggacctgtaatgcaaaaggccaaactgaattaccttattttacaccaatatttcagtttggtgaagaggaatgtttctagcatagcttgtcttcagtgtcttgctgaactatttgttcctgcatgatagcttgcacagcggcactgttcaaaattgagagaatttttttgttcatccctgtttttattatgatcccaaagatcaccacattgtctgacatttgagatggaagaaagataacattaagatgatcattttgtatgttgtcccaaactgagcacaatggctgatttcagatagaaacatcacctattgtcagttgccaggctgaagcattagaagggacttgtcttatttttaatattgaagcccaacgggtagatcttggaagattatttggggttttccaaaaagaagtgtttgaaaaatattttgattttaagattagagacatgaagctgtcttgatcagaggcaattctctaggcagtttggattaagatgctttgataacctgcctgcaaatctctaataccgaggcaaccttcagaaattggctctatctacaaatgccattccaagatttaagatgcatatacatttctctcctccaaccttttgaatgccaatccatcagaactttctaacgacagctatgagctttgaaataagggttttggaatgaagaaatgtcaacacagaatggatgacattttctgagagctaaccttccaatacgacgtctagagcatgttctataaggacttattggtggtctggtggatggctttccagttgtacattacaaactaggttactgagcgcgtgatgtatatacttatatcgtgagcattaatatgatgaaaaaatgtgttatttg

SEQ ID NO: 12511 - DNA, 1571 bp, Oryza sativa
  ref <308>: DATABASE ACCESSION NUMBER: AK109859
  ref <309>: DATABASE ENTRY DATE: 2002-08-28
gtgtgtgatgcgatttttgtttattgaggttttcctgggtcctgtgcccccggccatggcgtctgatttgtcggagagacccaaaaaaaaaaggagaaaaaaaactctgcatttctcgatgatagcaccagctaaagcacattcgctggagtacatatgcacgcctaaagctccgtgattatcatctcgtcctcgcatcgtcggagttgtcattagtctagtcgtctccctcgtctccggtgagctagctggtggtgtggtggttggttcttgggagcaatgggggcgtgcgcgacgaagcccggtgacctcaaggtgaagggcggcgaggcgccgctcgtcaaggaggacgccgccgtggcgccgtcgccgccggccgctgaggagaaggagaagaacgtcgacgaggctccggcggcggcggcggcggcggtggtggtggcagccgtggagggcgagccggctgaagccggtcgccggaggtctctcagcgacttgctcaaggaggatgcagagagcgagggatcagaggcggctccagctccaagtgcagaggcaaccaaggccgtggaaactgaatctccggctgccgctgctgaatctggaatagcagcagcagcagcagaagaggagaaagccgaggtggttgagccctcgcctgcgacgtccgagcaagtcgcagccggagaagaagaagaagaaaaggaaacagcagcagcagcagcagaagaggagcaagtcatggcggttgagacctcgcctgcggcgcccgagcaaggcgcagccgtcggagaagaagaagaagaagaagaagaagaagaggaaacagctgcagcagcagaagcagaagaggagcaagtcactgtggttgagccctcgcctgtgtcgcccgagcaacacgcagcgggagaagaagcagaggaaacagcagcagcagtggagcaaatcactgcggttgatccctcgcctgtggcgtccgagcaagagacaaccggagaagaagctgaagcagcagcagcggaaccagaagctgcccaagaaggcggcggcggcggcgcgcaggaggtagcggaagaggagaagcgcgtggatcctgactcggttcaggttgccgccgcggcatcatcaacaccatcaccaccatcatcagctgatgatgatgaggaggagaagagcaaggaagaagctgctgctgatgtttcagctccggcggcgcctgatgaaaactgacgcctctgcgcttctgcttccgcgagttcagcgttttctgaactctgaactctgaagacatttgttttgtttcctttttcttgtttctgagagatactactacctggatgcacatttggattgtctgagattgtttcaaatatgtcgtgcttgcttgcacaaatctttgagagttttggtactcttcccttttttttgtgttttgtgttctaggtgagtgtatcaatctgtattcagtttattgaacattttagtatactgtttgtgatttggagcgtgtgaaactacacagtaggagcactttgcaagaatctgtggagaacagctcgttcttatccttg

SEQ ID NO: 12512 - DNA, 1425 bp, Oryza sativa
  ref <308>: DATABASE ACCESSION NUMBER: AK109860
  ref <309>: DATABASE ENTRY DATE: 2002-08-28
tcgtccatccttctcccaatcaagcatccatccatcctccccaactatatataaaccccacacctttccctcgccaccgccctcgatcgtcttcttcctcctcctctcaatctcttcttccttctcctgcagccgccatttctagctagctatacgatcgatctatacatatatatcagaaggaaggaagaggctaattaagctagctgttgctagagctagcaagagcgaggagattgagcagctaggtaggtagcaagaaggagaagaagaagaagatcatcaatgagcatctcggtgaacgggcagtcgtgcgtgccgccggggttccggttccacccgacggaggaggagctgctcaactactacctccgcaagaaggtcgcctccgagcagatcgacctcgacgtcatccgcgacgtcgacctcaacaagctcgagccatgggacatccaagagaggtgtaagattgggtcagggccgcagaacgactggtacttcttcagccacaaggacaagaagtacccgacggggacgaggacgaacagggcgacggcggccgggttctggaaggccaccggccgcgacaaggccatctacaacgccgtccaccgcattggcatgcgcaagacgctcgtcttctacaagggccgcgccccccacggccagaagtccgactggatcatgcacgagtaccgcctcgacgaccccgccaccgacaccgccgccgccacacccacggttacttctgctgctgctgcggcggcggcgatggcggcggcggcggacggcgggcaggaggatggctgggtggtgtgcagggtgttcaagaagaagcaccaccacaaggaggccggcggcggcggcggcaagcacggcggcgacggcagcgccggcgccaaggcggcgcacgcttactcctccagcgacgacgcgctcgaccagatcctgcagtacatgggcaggtcgtgcaagcaggagcacgagctccccccgccgccgaccacctgctgctccaccaccaccaccgcacggactgggccatgatggaccgcctcgtcgcgtcgcacctcaacggcgccaactccgacgcgcccgacgaccagctctgcttcgacgccgccgacgacgacggcctcgcctactactccgccgccgccacgaggctgctcggcggtgccaacgccggcaccgacgacgacctgtggagcttcgcgcggtcggctgcgccgccaccgccgccgccgccgccgtcgtcggccacgccagagcgtctcagccacgtggcactgtaacacatgattcgtagctgtacgtacacgtacacgtatacgtacacgtcaggctacgtacgctcgagctgccaccctagctgctagtacagtaattacagagacaagacaagtaagaagaaaattgtaagtg

SEQ ID NO: 12513 - DNA, 1800 bp, Oryza sativa
  ref <308>: DATABASE ACCESSION NUMBER: AK109861
  ref <309>: DATABASE ENTRY DATE: 2002-08-28
aacactaagctagcctagctaatggagaacctcctcctcttggacttgacggaattcatggcgtccgtcttcccgtcgacgatgcccgacgtgtccttgccccagatgccggccttgaacgggttcagccggctcaacgtccgcaaccacgagcccttcttccccctcgacgacgacgaccccttgctctgctgctgcatccccgacacgtacgcccgcatccgcgccagctccgaccgcagcgcctcgttctccctcgccagcgacgcctcctccttcgcctgcttcctcgccgaccccgccgccgacgacctcatcacgccattcccatacgcgtcccacccgccgccgccctcgtctccgctgcggagcttgagccggtcgtagtagagcgcgctcagcacggcctgcagcgggagccgattgttctgtgacgcgtggaggcgaccctggtacgacagcttcagcgggtccatcacgctgcacaccttctccctctccatctcctccagcgccgggtgcgccttcaggtagatgtcgacggcgcggtacaggcagtcgtgcgtcgcgcgcgcctccttcggcaccgcgccggcgagccccacgaacttggagatcggcagcgactcctccgtcgcgatctccgccgcgacctcgtccacggtcttcgccaccgtctgcatcgcgccaccgccgccctgcagcgccccggctccgctcagggacgccctccggctccggccgttcgcgccgcccgatgacgccgccgagtcgcgctccacgaaggcggtgatgatgcggcgcacggtgtcgacgttctggacgcgctcaccggcgctgtcgagcgcgacggtcagcaggtcgcccgcggtggcctggtcgagcaccgccgccacgcggagctccaggtcacggcacgtcttggcggatgcgcagatggtgatggcgacatggaggaggcggcagaggaacgcggcggggaggggcgcgtcgtccgtggaagggagcacggcaaccacggactcgacaagcgcgcggtgcatcccggagtgatcagcagcatggccgtcggcggcgagcacttcggccagcaagagctcagcgtatgcggtggctgcagcgacaagcacctcgggctccgcgcggcggcagcgcagcgccgtgatgaccttgtggaacgacgccggcgagagggccgcgagctccgccgtccaccactcgggcggcgacctcgtcgggaacagcacctcgttacagatcctgagcgcgatagcgtcagctgatcgctgcacgacgccgatctcctcggcggccgggaggagcccctcgcagtagcgcagcacggcgacggcgccgggcagcgtgcggaggccgaccttggccaggaactcctcgacgcggcgcgccaggccgccgtccgttgggtgcatgtcgaggaaggcggcggcgcagaggagcgcggccgcgttgcgcacggatatctcgaagttggcgccgtagcagtagcgcgcagccttgtcgaaggcgtcggcgccgccgggcagcgcggagaggtcgaggtcgacggtggccgtggcgccaccgcgcgccgccgcgacggccttgcggatgtagccgcacttgggcaccatcaccccctgctaacacgtaggagtagtagaagaggaagaagattttggacgtcagagtttgatcaaaatcagggcaaaacagagtatgttcttgttcttagaacttagaagaacaaattgtatattgacgacttgacgtgcaatatttttacgtgttagcggaaaaaat

SEQ ID NO: 12514 - DNA, 1439 bp, Oryza sativa
  ref <308>: DATABASE ACCESSION NUMBER: AK109862
  ref <309>: DATABASE ENTRY DATE: 2002-08-28
atcgtcctctgcggctctgcccttcccctacttctcctaatacgccagcaattagtgcccctgcctgccatgtcctcttccgccgccggcaactcgtcgcggtcggcctccacctccaccatcgtggctgacacggagaccgggtaccacctcctcaagatcgacggctactcgcgcaccaagggcacccccaatggcacggccatcgcatccagccagttcatcgtcggcggccaccgctggcgcatctactactatcccaacggggaccacaccgacaatgcagattacatgtcgttttacctcttgctcgacgaaaagaaaaacaccaagaccaagagcgtgaaggtgtggacgctgtttcagatttgtttcgcagaccaggcaaaggcgctgcctacactaacatccaaaacagtgagaacttttggtgatggttcttcttggtcttggggctattcgaagttcatcaaaagggaagatttcgagaagtccaaggatctccgagacgactctttcacaatccggtgcgacattgccatcgtccgcgagttccttgttgagacgaccgaggtgctcccgcccaaatcgttcgtatccgtgcccccacccgacatgaacctgcagctcggcgagctgctggagaccgagaagggcgccgacgtggtgttcgaggtcgccggcgagaggttcgccgcgcaccggtgcgtgctcgcggcgcggtcgccggtcttcggcgcggagctctacggcctgatgaaggagggcaacgccgccgtggtcgtgcgcgtcgaggacatggaagcgcgggtgttcaagctgctgctccgcttcgtgtacaccgactcgttgccggagatgaagaagaaggacgaaggcatcatgtgccagcatctgctcgtcgcggcggatcggtacaacctggagaggctgaagctgatctgcgaggagaagctgtgcaagcacattagcacgggcacggtgtcgaacatgctgttgctggctgatcagcaccactgctccgggctgcagaaagcgtgctgcaattttctcggctcatcggcgaacctgagtcctgtcagcaggggctggctctttgttatgaaacagcttgtgttaggatgctggtgcctccactgagttatgcttaattagtactatgttctagcatgtggtttagagacctttgtcatcacatagttctcttctatatattttagcaatgcatggagacttgctgttgtacaccctgtctcggtgtcttggcttgtactatcactatcaggcagagctgcagaggtatatgaccttagtaattccatgaaatttacgagtcatgaacatcatcctaaggaggtaaaagtaattccagtttgaccgtgtgttgttactaccactgtaactttacatgaaaaaattacttcttgatttggatttgg

SEQ ID NO: 12515 - DNA, 1401 bp, Oryza sativa
  ref <308>: DATABASE ACCESSION NUMBER: AK109863
  ref <309>: DATABASE ENTRY DATE: 2002-08-28
attttccatccatttttccgtcatcccagttattcctatcgttgctgtcccgtgcatctccgacaccacgccaccgcaacgacgagcaaaccggaggcgatggcggcggcggaggagcaacccgagcactcctgggggctggagtgcgccgaccagcagcactcctgggtggcggcgaaggagctcgaccgcggcaagggagctcggcgtgcttgtggacgctgttgaccaccttgaggacgcgcttggccggaggcggtgggcgcttccgtggcggcatagctcggggacagcgacgggcggcgccgtgccggacgccgtccacgaccgtgtcggcctccgggagaaccttcggcagagggccgtcttccagcggctgcgtcgcaggacggcacctcctgatcaaccaaacgcaaagatcgatggttgtatgttgattggtttagttagctagctagctagcctcgcgcgctgcatctgtagcagctagctagctactccctgagctcgttgggtgtttctgcctgagctccctgatgagtgatgagcggaggtgcatggatagatatgatgtgtgtctcactcgcctgccgccctcccccttgcttccgcgcgcgcatccgacgatcctgttccgcgccgaaccccgtcaggcccggccgcgaccgcgccgggctgtccttcgcccgtgccagccgtcgcgccagctccccatcctcttctccgttttgtcgcgtgcgcctcatcggcttcgactccggtggtcgagctgctcacgcgcgtccgggggatggtgcctccggcgccgggcgcggccgccgccggcgaagggcttcctgggcggtggatgatgcgaacgctggacgccggcggccgccgcggcggggcgcagcagaggtggcggcgatgcagctgcttacgacggccagcaacggcaagggcggcgccgtcgtgtcgccgcaccccaaacgcgtccatctactgcttcatccaccgtaggcaccagcaccagcaccagcaccagctcgatgaggtggcgatcgagtccatcgccctcacaaggtaccacgacggcgcctgcatgctcggcgccaccgactgccccgtctgcctcggcgagttccgcgatggcgagctcctccgccttctccccaagtgcggccgcgcgttctacgtccctgcattgacgcctggctccgcgccgttggccgcggcggacagcgccggagggctgggagacagccagctgccgctcgatctaacagaaaaagtaacggagacgacagaaatcgtgatggagtggcatggttctaattttagaagattatagtagcatctacccgattacataaatagtagtggtatttttttaatatgacatatttacaatgacatggatcc

SEQ ID NO: 12516 - DNA, 2144 bp, Oryza sativa
  ref <308>: DATABASE ACCESSION NUMBER: AK109864
  ref <309>: DATABASE ENTRY DATE: 2002-08-28
aaattaacgtatactccatggcgaggacggcggcggcggcggtctccgacgacgacgacgatggcccgccggcgtacaccgtgccacggggcccccgccgtgaccccaggctcaaggacctcggcatctcctgcatgctcaacaccgaggtggccgcgctcctcgccgtcatccgccgccgcccggacccctactcctacctcccgccggcggtcgccgccgcggaggaggcgacgttcgccgggctcatccagtcgctgaagaacctgcgggggctcctcttccagccccggcacggtgcctggcgctgctccgacccggccatgtacctgaagccgttcctcgacgtggtccagagcgaggagtcgccgccggcggccaccggcgtggcgctgtcgtcggtgctcaagatcctgaggatcgacgtgttcgacgagtgctccccgggcgcccgcgacgcgatccaggcggtgctgacggcggtgagcagctgccgcgtggagcgcatcgccgacccgggcgccgaggaggccgtcctcctccgcgtgctgcaggtgctcgccgcgctgctccgcgcccgcgccgcgccgctcctctccgaccacgccgtctgcaacgccgtcaacacctgcttccaggtggtgcagcacgccgccagcggccgcggcagcgagctcctccagcgcacggcgaggcactgcatgcacgagatcctccaggccgtcttcgcccgcctgcccgacatcccggccgccgacgccgccgacgccgacgacctgtccgtggccggcttcggcgcgcgctgcatggccgacatcttcaacttcctctgcacgctgctgctcaacgcccccgacatggtggccaccggggacggccacggcgcgttcatcaccgaggaggacgtgcagctcttctccctcgtcctcatcaactccgccatcgagctcggcggcgaggccatcggcaagcaccccaagcttctccgcctcatccaggacgacctcttctaccacctcatccactacgccactgagtccagccctctcgtcctctccatgatctgcagcacggctctcaacctctaccacttcttgcgccggttcctgaagctgcagctcgaggcgttcttcatgtacgtgctgctccggctgtgcggcggcggaggcggggcgcagctccaggaggtggcgatcgaggggctgatcagcttctgccggcagccgacgttcgtgatcgagatgtacgtgaactacgactgcgacccgatgctgcggaacgtgtacgaggaggtggggaagctgctgtgcaaggcggcgttcccggcgtcgagccccatgacgacggtgcagctccaggcgttcgagggcctcgtcaacatgctcaccaccatcgccgacaacgtcgaggtcgacaaggcccccgaccacgccgcctacgccgtcgacatctccgactaccgcctcttctgggtggagcgctgggacgccgccgccgccggcggctccggcaacaacgagacgtgggtggacttcgtccgcaagcggaagctgaggaagaagaaggtggcgatcgcggcgaaccactacaaccgcgacgagaagaaggggatggagtacctccggctgagccagctggtgcccaccccgccggagccccggagcatggccttcttcctccgctactcgccggggctggacaagaacaagatcggcgagctcctgggcgacccggaggagcagagcctgagggtgctcaaggagttcacggagacgttcgacttcaccggcgtgatcctggacacggcgctgcgcacctacctggagacgttccgcctccccggcgagtcgcagaagatacagcggatcctggaggcgttctcggagaggttctacgagcagcagacggcggaggtgttcgccaccaaggacgccgccttcatcctctgctactccctcatcatgctcaacaccgatctccacaacccacaagtaggggtgcaagtgggcttgtccgcaaacccgcttatagacaaaattagtacgatttgaccagcgagttatctattaatttgacatattaatatgtttatggatcgacccacttgtatatctaaatgggtttatcatttatttgacttactt

SEQ ID NO: 12517 - DNA, 1732 bp, Oryza sativa
  ref <308>: DATABASE ACCESSION NUMBER: AK109865
  ref <309>: DATABASE ENTRY DATE: 2002-08-28
gatcagcgccgaggaagcgatccaaaccgttgctcagctccttctcgcagagtcgccgtcctcccctcccctcgccgccgccgccgccgccgccgcgccaccaaacactcgagctcgccggacttagggttttagcttccttgcctcgccgcggcggccgccgcctgcctaggggcttatggttactgctgctgccgcggctgcatcgaacaaccactagaagctggctgcttagggttctactagcttcctgcctcgccgccgccgcgatggatgcgctccgggaggcagaggccaagctgaccgtgtacgtgcacccctccaacgccgccgacgtccgccgcgccgtcgcccgccagctgagctcgctcctcttctcgtatgaagatcgcttcgatggcgtactattggctcatgaagcaactgtagagagtgaacaaggcaaaatcctgaatggtttggtaccatactttggcgtgcccgtgcacgcaaatctgctgctttactctccgaaaccagacatgatgctggaagggaaggttgaaatgcttggaaaggaatcaatacatgccattgtattaggggtattttcagccgccatcatgttggatgatattcatgagaagttcaagttcaaaagaaaaaagtatggaggaaaatttgtaagccggtcggacaaacagcacgtgattaaaaagggaagcatgatacgattttctgtgaaaaggtatgggctgatctttagtccccttgacagtttcaaaattttcattcattgtttgctttccactgtgaaacacctttattcaaaagttatggcacttgtatgttactatatttgtaatttgttagttgtatgcagtacttgctgtacgttgttcacgaacatgcattgttctagcatgttagaattgtttttcccctggtgtgcttattatgacaggagccctgaaaaaagtcattttgatacaatggctcttaagtctaataataaaacaatgtgaatggttttctgaaatacacacatgcatttacatagcacagctaatctatatagcaaaagcttcttttagcttcctgtgttatgtacaagaaatgaccagcaatttattccccggtacaactgaatggttaaattagggactatgggatgattggaaccagctaatgtcaggctccatattccgagtgacagattgatcatgttctcttcttttgatgttcaatcacagggtggatgcagaaatgaattgtcacgtaactggttctttaatcccacctcacactggatccatgctttggttgtcagtacacgatgatgaatatgcattggaaatcaacagcgggaaaaggtcaagggataacaaaattaaaactgagcagcacgaacaagatcacagtgtgaagagttctggaagaaaacacaagtccaagtcccgaaagaggagttttgaggaaagatgataccgattttatggagcagattgtttgagtagaaattatagttgatagctgggagctgcgtctgcttcctgtgaatagccactgcagagatacgctgctccagttgaaatagcctgattaggaagctgcttcctgactgttttacagtgtattatcagatgtcaccctaattttctgttgtaccatcgactgccatgatgatgtaaaacaaatcaaggatttgatgtgtaacatttacctgttctaatggatgttgatcttatcccag

SEQ ID NO: 12518 - DNA, 879 bp, Oryza sativa
  ref <308>: DATABASE ACCESSION NUMBER: AK109866
  ref <309>: DATABASE ENTRY DATE: 2002-08-28
aatattccaaactccaaaaaaaacccattcattttgtgtacacaatcggttgatgggatcaggtctctcgtgcaatcaccggagcagcacgttgcttcgccatcatcagccggcggcggcgccgccggcacaggtcatcgccgccgacgggtcgctgacggaggtcgccgccgccgccgcctcctgccctgtcagcgtatccgacgtgctcggcggcaatgccggccggctcttcctgtgcagctccgacgcgctctacttcgacgtcgacgtccccgccctcgacggcggcgagctactccggccggggcagatatacttcctgctccccgtgtccatgctcgggcggcccctctccggcgtcgacatggccgcgctcgccgtgcgcgccagcgacgcgctggtggcgagggcgcggcctcgccaccagcgcggcggcggcgtcaagaaggtgcgcatcatgccgatgctcgcggcgaacggatgcggcggcgacgaccgcgacggcgaaatcaacgagaagcttaacgagaggactctcggcgagtcggtgatgacacggccatgctgtccggcgagctccggcgacaaattagcggcggcggcgccgccggtgaagaggctgctcagcaccatcgacgaggacgccgagtgataaaatggaattgatcgaagcataagcatgcggatgatcgacaagttgaaaagaaattaagattgttgatacttttttttgtttactttgttaggtgggttgacaaatttttgggggtagaaatttagttagttaaagagccaatgataccaaggaaatgtcttgtttatttggtcatatgcctttgtcaatttgatacaaggtgaaaataatgtgattcattt

SEQ ID NO: 12519 - DNA, 1779 bp, Oryza sativa
  ref <308>: DATABASE ACCESSION NUMBER: AK109867
  ref <309>: DATABASE ENTRY DATE: 2002-08-28
aagtgcagaaccctctcggcctcctttctctctctgtctctctactccaaaatgctctgccaccgtggcctctccgccgtcgcctccggccgtctccgccgcgccctcaccaccgccgcctcgcgtcctccgtgggcgctgatccaccggatctcgacagcggacgggtccaccggagccggcgtgtcgctcgccctcgcgccgcccccgcgcgcctcccgcgtcaccatcccggcgaaggccatagcgctcaacgaccgcccgatcagcgccgacgagagccgcgtcgccctccgcggccgcggcgtcctcgccgcgagcggcgacggcctcctcctcgtctacaccttcaaggcctgcttccgtggcccggctcaccccgtcccagagcttccgcttgacgtcatcatcccagagctcgccaggaccaccgtcgagaccacctacgagcacttcgcgagcttcgtctgcaacccgctcaccggcgagctcttccggctgccggacttcgacggcacggagaacaccgtggacgtccaccacaccggcatcctcacccaacgcgacggcggcggcgaggacgggccgccgaagaggtacgccgcagcgcagctcagcaacgtcgacggcgacgacgagggccggcgattcctgctgcgcaggtactcctcggagacaagggaatggagcaagctggtcatgccgtctccgctgccgcccgggcgggcaatgggaatgaaccacgaggtggtggcattcggtggccggctgtggtgggtggacgtgagctggggcgccgtcgctgtcgacccgttcagccaccggcctgagccccgttccatcaagctgccggcaggtagcatcctctctgagaaaccgtgctcgagagagatggaacgaatcgtcaagcaccggcgaatgggggtcagcaacggcaagctgcgctacgtcgaggtctccgatcaggagccgttcgttgtcatgtcgttcacgctggacgacgagagtggccactggacgctggatcaccaggtggcgctgtctacgctcggggccaaagggggatctcctaaggggataccgtacatcggtgccattgatccgtttaacgcggatgtcctgtacctcgcgattgagagggttagtgttagcgtggacatgcgcttgaagaaggtgattcagtgctctgagctatgcagcgacgttttcccgacagtgagctcgtcaggtgtcttgcttccatgtgtgctcccaccgtggctcgattctttcccgatccctaatgcaggcaagaacaatatgaaaaatgagacgctggctgacattctggtccgttcagacagaggcaagtaaagatgatgtttattagggttattaatattaagacaggaattttgatggattaggaagcttatagtggtagttgccaaactcacttttttgggggaaaatttggagacaaggagaagtttgcttttaggggcttgatgataaactattttattttttgggaaaattatgggagtttcgtcagttattttggggtttgcctgcagacctgttattcgtagtagaatggcgattctatcagcgagtcataaccgtcacagttcagtaacacactttctatggataggtctctgcatgttctttagatcgtgacagatcaattagggcctccttattcttcctgttcagtaagatttaggagtctgtgattgtactgtttgactgtttgaacatatcagtaattcagtatatgcagggccaaatgtgaag

SEQ ID NO: 12520 - DNA, 2369 bp, Oryza sativa
  ref <308>: DATABASE ACCESSION NUMBER: AK109868
  ref <309>: DATABASE ENTRY DATE: 2002-08-28
acacacagtagcagtagtgtggaggtcggtctcgatcgccattgatggccactcgtttcctcgtactcctcttcttgttagccacctcggcctcctcctcctcgacatccacgtcgctcgccaccaacactaccgacgtcggccgcgatggcggcgacaatgccgtcagcttcagcttctccagcttccacgccgaggcgcgcggggtcaacgtgacggtggtcggcgacgccaacatcaacggcggcgcgctccagatcaccccggactcgctcaacgacgcgtcgcgctacctcaccaacaagtccggccgcgtcctgtacgccgccccgttcaagctctggcaccgcgagaagggcggcggcgaggcggcgaacggctccaccgccggcaagagggttgcctcgtttagcacggtgttcaccgtcaacgtgttccggcccaatggcacggtgcccggcgaggggttcgcgttcgtcatcgcgccgtcggcggccgcgccgccggccgggagcactggcgggttcctcggcctcaccaacgccgccaccgacggcaatgcgacgaaccagatcgtcgccgtggagctcgacacggaggagcagccgtacgacccggacgacaaccacatcggcctcgacgtcaacggcgtcgtctccgtcgccaccacctcgctcaagccgctcggcatcgagatctcccccgtcgaccccgtcaagtacgacgtctggatcgactacgacggcgccgcccgccgcatcgaggcgtacatggcggtgtccgggcaggcgaggcccgcgtcgccggttctcgccgcgccgctggacctcggcgccaccgtggccgagtggtcctacttcgggttctcggcgtcgacggggctcaagtaccagctcaactgcgtcctcgcgtggaacatgacggtggagaggctcccccgccgcgctcgccgccgcattgggttacctgtacgtggcgaagcggcggcggaaggtgagcggcggcgacgacggcagcggcatcaccgggacgatgatccggagcctcgccggggggccgagggagttcgagtaccgggagctgaggaaggcgacgaacaacttcgacgagaggatgaagctggggcagggcgggtacggggtggtgtaccgcggcgtggtggtcggcgaccacaccttccccggcggcgccgggagcgcggtggaggtcgccgtcaagaagttctcgcgggcgagcacccaggggcagaacgacttcctcgccgagctcagcatcatcaaccgcctccgccacaagcacctcgtccgcctcgtcgggtggagccacgacaatggcgagctgctgctggtgtacgagtacatgccgaacgggagcctggaccagcacctgttcggcgcggcggcggcggagcggcggctgctgggttgggacctccggtacagcatcgtcgccggcgtggcgtcggcgctgcactacctccacgatgagtacgaccagaaggtggtgcaccgcgacctcaaggcctccaacgtcatgctcgacgccgccttcagcgcgcgcctcggcgacttcggcctcgcccgcgccatcgagaccgacaagacctcctacatggaggaggccggcggcggcgtccacggcaccgtcggctacatcgccccggagtgcttccacaccgagaaggccacccgcgagtccgacgtctacgccttcggcgccgtcgtcctcgaggtcgtctgcggccgccgcccgcgctgcgacatcgacggcttctgcttcctcgtcgactgggtgtggcgcctccaccgcgacggccgcgtcctcgacgccgtcgacccgcgcctcgacggcgcgttcgacgccggcgacgccgagcggctgctcctcctcggcctcgcctgcagccacccgacgccggccgagcggcccaagacgatggccatcacgcagatcctgctgcggtccacgccgccgccggaggtgccgccgttcaagccggcgttcgtgtggccggccatcgacggcgggatcgacacgacgacgtccacggcgtccagccacgtcagcacgaacatgacgtcgacgtcgacgtggagcggcaacttcatgaggggaagccggagccacgcgccgccgacgccggagcaagacgcctcggactccgtggtgtgacggcgacggcggccgccggcgctgtgacacgtggcgctttgacacgtcggatgatcgttgccgccgtggagtctaactgtctaaaccggggtaatctccacggtggcaacaatgaagtgctatagtacagttttattcttgtggaattaattgtgttttattttgctcaaaaattactgtaactacgtttttagtag

SEQ ID NO: 12521 - DNA, 1470 bp, Oryza sativa
  ref <308>: DATABASE ACCESSION NUMBER: AK109869
  ref <309>: DATABASE ENTRY DATE: 2002-08-28
atccaacgcatccattccgtcctcttcgattgctgctttcccgtcgcgaccatggctcccgccggcgactacggcgcctcggtgagcatgatgatcagctacggcggcgcgatcgtccaggccgacggcaaggccaaggcggcgtactacgccggcggagtccaccgcatcgtcaaggtcggcatgtccgagcggctgcccggcctccgcgcgcggctcgcggcgctcgccggctgcgccgacgtgttcatccgctacgcgctccccggggagggcctcggcgtcatccgcgacgtggcggacgacggcgacctgtggggcctcgtgtcgctgctcttctactacaaggaggtgcccgtgtcgtccaagcccggccgcatcagggtcttcctgttcgccgccgatcacgacgcgccgccgcaccgaaccgcgtcggcgccgtcgttaccggtgctggtatctggaagtgcctctgctgctcctcccgttacactggggttgccacgcagcgcgtcttcaccgtcgctggcgacgtcgggctcgggcaccgccgtgaggatgaaggtgagctacggcggggagatcatccagcagcagcgcggcggatcagcggcggcgtcgtgctactacgccgggggagttcaccggatcgtcagggtcggcctgtcggagcgcctcgccggcctccgcgcgaggctggcggcgctcgccggcttctccgactccgacgacgtccgcatccagtacgcgctcccgggagaggagggcctccacctccacgacgtggcgagcgacggcgacctgtggagcctcgtgtcgctgctcttcttccacgaggcggtgatggcctccagcaagcccaagcaaggccgcatccgcgtgttcctcttcgccgcccacgacgccccggcgacgtcgtcgacgtcgcccaccgcggcgccgctcaggaggagcgcgtcgtcgccgttcttgccgacattggtggaggaagacgaggacgacgacgacaacgacggcaacacggacacggcggctgcaactcagacgagcactagccgtgtcaccgccaccgtgggcatgcggcggagcgcctcgtcgccggcgctggcgacgacgtcatcgagctcggacgcggcgactgcctcgacgtccggtggtgcaacatccggttcatcaggagacagcgacacaccggcgatgacatcttccacggcagcggcggcggcggtgcagttcggtccggtggtgcttgtgccggtgatggtggtgttcccggtgatccccgtgtacgcgattggcgtggtagattatcgtagtgtgctccttgtagcgtagtgaaacgccttgtttcctactgccaatctgagctatgtacttgtctacttgattttgtacaattcattcaaggttattattgtaaaccacattaccaatgtactcatcgtgtgttcactgttcaaaaaaaaaaag

SEQ ID NO: 12522 - DNA, 2048 bp, Oryza sativa
  ref <308>: DATABASE ACCESSION NUMBER: AK109870
  ref <309>: DATABASE ENTRY DATE: 2002-08-28
agcgccgccgtggacagggtcaggagaggggaggcgaagcagcacgacgcgctgcgtggcgcgcaggtggtcagcctccgcgtgtcgtcgttccgcgacatgccgagggaggaggcggagcggcggctcgccgagctccggtgcctcgtgaagagccgcggcgcgcgggtgctcctcgtcgtcgaggacctcaagtgggcggccgacttctgggccgccgcgcacgccggcgccaggagggtcggcagcggcggcggcggcggctactactgctctgtcgagcacgtcgtcaccgaggtgcgcgccctggcgtcgtgcgacggcggcatctggctcgtcgggttcgggacgtaccagacgtacatgaagtgcagggcggggcatccgtcgctggagagcatgtgggggctccagacgctcgccgtccccgccggcagcctcgcgctgagcctcacctgcgccttcgacgacagcgcgctgggcgcagtcaatcagtccatgaaagcgagccctcacaccaccgatgggaaccgcccggcgccgtcttgcgggccgcttttgggcggcagccacctcctctccagatgctgcggcggcgactgctccgccgcgacgacgacgctcgagcacgacaccaaggcgtcgttgccccgctccttcgtgtcgtcgtcgagcctcccttcttggctccagcattgccgcgaccagcagctgcaggagtcgacacatttcgcggatcttggcaagacatggggatccatctgcggcaagccgtctcagcggatgacgctgcatttctcggcgccggtgtcgccggcgtcctccatctcctcctacgagcacggccacggccaccagcagcagcagcaccagcctcaccactcgtggcttctcgccgacctcgacgccaagcacccatggaagcccaagcgcgaggacgacgacgacgagaaggccaagtcgcacgacgactgctccggcgcctccaatggctcggtggaggtggagtgccgttccaggttcaaggagctcaacgccgagaacctgaagctcctgtgcgccgcgctggagaaggaggtgccgtggcagaaggagatcgtcccggaggtggcgagcgccgtcctccagtgcaggtccgggatcgccaagcggcgggacaggtcgaggtcgacggaggcgaaggaggagacgtggctcttcttcctcggaggcgacgggcacggcaaggagagggtggcgagggagctcgccggcctcgtcttcgggtcacgcaagagcttcctctccgtcaagctcggcgcctcctcctcctcaccgtccgcgtcgggctccaccgaggatcaccaccggagcaagcggccgcggacgacgacgacgtcgtcggcgagcgaggcctacctcgagcggctctacgacgccgtctcggagaacccgcaccgcgtcatcctcatcgaggacgtcgagcagggcgaccatcgctggcaggtgggcgtcaaggaggccatcgacagaggggttctccggagccaggccggcgacgaggtcggcgtgggcgacgccatcatcatcctgagctgcgagagcttcgaggcgaggtctagagctggctcgccgctgatgaacaagaagatgaaggtggagaaagaggaagccaacacaagtgatcatgatcacaaattagaaatcgaatcaggcgccccctcttcttgcttcgatttgaaccttgacatggagagcgatcaagcagcagatgagctcagctccggtgatgtctgtctgctcacggcggtcgaccgggtgctgctcttcagaaggcaggatgaaatgtaacactagtgtacatgaaggatccatgtttatcagctagggtagctagctcattgctcgtctaattagattttcctttcatttgttttgatggttttttttgtttctagtattaactttggctttagaggatcatggcattggtgcggttggacaatggcatattatgagcttcgttaagatggagctctgttatatatttgtggtggtggtgatcaaat

SEQ ID NO: 12523 - DNA, 1606 bp, Oryza sativa
  ref <308>: DATABASE ACCESSION NUMBER: AK109871
  ref <309>: DATABASE ENTRY DATE: 2002-08-28
tgagctgcataacaatggaggatgcctggctctcctgcctgaccgactgccacgtcgggcctgcctttgcgggcccacctggcagtttcccgggccgataaaacgtgggccctgggccggcggacccccacccgatcagagggcggcctcgaagttgaggcgcgaggtgtaggtggccgtgggcttccagttcctggggatgacgtcccgggccgtgagcgccttctgggccgacagcgtcgtcaacctcaccgagaagggcccgacaagcgggccccgcacgaggcaccacgtggccccccacacatgcttcatgtccagccactccactgagttcgcctgcaccccgccatgtgaaaggcagcacaaacagattagaaacagatcaacaatgagcaactaggatacccgatacccttcaggaaaagaaaaaggaataagcattaagtaagtagcagtaaccttactacattcagaatagattatcacagaaacgtacagtttcaggttaagcagagcagcctgaaacctttacagcaaagcaagccatagcgctcaacgctggcatgcatcgtcgtctgggattccgaatctttggatgccactaggctaccaagcccacaacacagagtcttcatcacaagcgtgcctcagtttgcagggtgggggtgtcagggtttaacaaccgtgaaaagcattagcaagtgcaaaagcaagggcaccatgcagtgtggctggtaaaaactgtcgacggagaccaacgcaagtgcatcagtgcatgctctatcttctttgctgttgttaaggagagggggagaccgagctaaagcggcaaaatcattgacggctctttggtgaaaggatggctagggttcatgtgctttgccattgcattggggttgtagactgaatgagttgctgctctacagatctagtgcacaaagccggaatttttttttatgcacacattccagataggaatcatttgacaaagagaatcatgcttttatgcaaaggtttgactatgtctggagtctggtagctaagcgaggaagtgaaagaaagcaggatgctttcttgaccatgtgtgccgtacttactatcctgtctcgcaagtgctcccttcttttgtgtaaacttgtattggaacaaaggactaaatcctgacaaggcatctgaggcattaattagttggaaaccgttggtttcacttctcctaagatgctggttttggttaggaatatgtgatcctgtaacttgtggaaaatgtgattctagaacttcaggttgatctagaaaggacagcagagagacccaagtatccaacagtattatgctagtcattcagtgaacactgaacagaggcctgaagggtaaaagcagcaaggaattaggcagtacacatgtctccaaccacatcggcccactagagcaaagagggtgaggaacttgtcacatgctgcacacatgtttgcaaagggaagaagctgtggtccaattgcatccagcaatggatttgtcccaggcagcactgagcatgtttcccagcactatgggcaattaaaagcaaaagatgaccccattttccatttctaccagctaaaag

SEQ ID NO: 12524 - DNA, 1797 bp, Oryza sativa
  ref <308>: DATABASE ACCESSION NUMBER: AK109872
  ref <309>: DATABASE ENTRY DATE: 2002-08-28
aaggccgatggtcgcattttgaaagcttgctcagtttcgatcgcctccgtcgtcttcttcccttctccagatgccctgggcgtcgcaccgccatgagctgagcttgggacaccgccgcttgtcgacgaaccggagcttaccgaacgtgctcctcagctgccgccactcacagtccagacgctccaggaacctcacccgcaacgtctccacgacgtcccacgtcacgtcgtcgccgaacgcgcggagcctcccgccccggacgcacagcttcctcaggccgccgccgcgcgccgggtgcacgacctcctgcagctcctccgccggcacgcgccgcaggtcgagcttcgcgaggcgggggaggagggacagatccatcctcccgccgccgccggcgtgggctgcggcggcgccccaccgcacgctcagcgactccaatgccgcgaacccgtgcagccgcggcagctcgtcgtcgggcgccacgggaagctggcgccccgtgctgacgctcagcttccgtagcagcggcagtgccgcgaggtcggcgaggcggcacggggggatcttcttgccaccggcggcgctggcgaccacgaagccctttaggacctggagccggtggagcttgcagacgccgtggggcatttggtcgagcaggtagcactcggacgcgtcaaggtactcgagcttccccagcgacgccatggacgccggcagggtctcgaggttgtggcacgccctcaagtcgagcacgacgaggtcgcggaggtcgccgatggactccgggagcgactcgacgagcgagatgccccggaggctaaggtacctgaggttccggcacgccgccgccgccgcggcgcccaggacaccatccggccggaccatctcgacgtggtgctccggtgacgtctgccaccgcccgagctggagagtccccatcccccgctgctcgcccagccacgcctcgtccatctccaagtatcgctggctcaggttgtacaccgtgacatactcgccgccgccgccgccatggcggctactaccacgggtcctgcacagagtgacgcgccgtgtcgtgccggggaggcactcgtcggtgggttcgccgtctcggtcgaaggcgaagtagctgaagctccgcgcggccgcgacgaggaggtcccggaccgacgggtggaccctgcagtagtgcgccgtgtggcagtgtgggcggagcatcgccggctggaggaggccccgggagaggaggtcctggaagcacgccttcccggcggcggccgaccgcacgatgccctcgccgatccaccagtggatgagcagcctcctcttgatcgccttgccgctcgggaacacggcgaggcaaagggcgcactgcttcagctgcgggtccagggactccaagacgctcttcaggtggccggagccggaagggaacgcctcgtcgccgccgccgtcgtcgtcttcgccgccgcgggtgttggtcgtcatccgcatcaccttctcctgcagagctgctcgcaccagctgcacggctgatttgatctgctccatgaaggagcagagctcgatgtggtccagatcaagaacgtcatcctcatcttcgccgtcgccgtgaccatcgtcatcaccgtcgccgccgtacctgtgcaaggtccgaagatccatttgcatctcttcgaccatcgtgtcaatcttctgcagccggtgttggatagcagagaaaacatcgattggttcccggcgagctaacatggttgagtgtagacacgaaggggaaaatgaggcaacctgaattgtgct

SEQ ID NO: 12525 - DNA, 1721 bp, Oryza sativa
  ref <308>: DATABASE ACCESSION NUMBER: AK109873
  ref <309>: DATABASE ENTRY DATE: 2002-08-28
gaggaagccaacatggagaaggccagctgcctggaggaagccttgctgctcccggagagttgcaaggaggaggagatcacagcgagcgatgaggtgaagcggcagctgcggctggccgggccgctcatcgccggcagcctgctgcagaacctgatccagatgatctccgtgatgttcgtcggccacctcggcgagctccccctcgccggcgcctccatggccagctccttcgccgccgtcaccggcttcagcctcctgctgggcttggcgagcgcgttggacaccctgtgcggccaggcgttcggcgcgcggcagtaccatctcctgggcgtctacaagcagcgcgccatgctgctgctcaccgccgtcagcgtcccgctcgccgtggcctggtactacaccggcgacatcctcctcctgttcgggcaggacgccgacatcgcggcggaggccggcgcgtacgcccggtggatgatcccggcgctgttcgcctacggcccgctgcagtgccacgtccggttcctgcagacgcagaacatggtggtcccggtcatggcggccgccggcgcggcggcgctgtgccacctgggcgtgtgctgggcgctggtccacgccgccgggatgggcagccgtggcgccgccctcggcaacgccgtgtcgtactggatcaacgtgggcgtactggcggtgtacgtgagggtgtcgaggtcgtgcaagaagacgtggacggggttctccatggaggccttccgtgacccgctaagcttcttcaggctcgccatcccttccgctctcatggtctgcttggaatggtggtcatttgagctcctcgtgctcctgtccggccttcttccgaaccccaagctggaaacatccgtcctatccatcaccctcaacactgcaaactgcctgttcatgatccccttcggcctcggcgctgccataagcacgcgtgtgtcgaacgagctcggcgcgggccgtccacgggccgcccgactcgcggtgcgcgtggtgacgttgttggcgacgctggaagggttgggcatggcgctggtgctggcgtgcgtgcgctacgtgtggggccacgcctacagcaacgaggaggaggtggtcgcgtacgttgccaagatgatgctggttcttgccgtctccaacttcctggacgggattcagtgtgttctctcaggtgtggcgagaggctgcgggtggcagaagatcggcgcatgcatcaacctcggcgcgttctacgtcgtcggcgtcccggcagcctacctcgcggccttcgtcctgcgcgccggcgggttgggcctctggatgggaatcatctgcggcgtcgcggtgcaaaccctgctgttcctggccatcacatcacgcacagactggcaaaaggaggcgaaaatggccaaggatagggttttcagctcatctcttccgaccgatctcgcgacgtgagaggttgcacttcagtcaggagtgttgtctgaaagcaagcaaactgagtgtggtttcagagttagcgtggcgcagtgtgtgaaccatttggaagcgagaagaagcggaagccggaaaaaggtttgtgggaggaggtgattttggctcggatgagagtagcggtggacatagatcgctatattggacatttcaaaaggagtttatactaacaaaaaatatatggctcttgagtcttgattaggtggattttatcatcataatcatagttt

SEQ ID NO: 12526 - DNA, 1428 bp, Oryza sativa
  ref <308>: DATABASE ACCESSION NUMBER: AK109874
  ref <309>: DATABASE ENTRY DATE: 2002-08-28
atactcccctcgctcctcgggaaaatcttcatatcccgctccaaccacgccggcctgcgagcgtggggcaccaccaccgtctggctccacgccgtgccactgctgatgaacgtgctgtgtgcggggatggtggccgacctccccgccgccggcacagccacctccgacgacgacgacgaccacccgcgggacatctacgtcaacgtggagaggatgtgcaccgccgcctacgtctcgacggccttgatgacgctcgcggcgtccgcgtcactcttgctcctcgacgcgtcgctctactacgtgctggtcgtcgtcaccttgctgctcctggtccttgggtttctcgcctttctcttctggcaacagatgaacctggacgggaacggatcttctgcagctggcggagagcgacgacggagccatggatgcggccacatcaaggcggcgatgtacttcagcaggcataacgccacgctcacacggttgtcggcgatgtcctcggatgtcgcgtcgttcgtgttcgcggggctgtctggtgctatcgtaggctacgtcaaggcgtccgcgagcacctggcctcccgccggcgccgggcacaggatgcccgaggagttgatgctctacagcggtgccctggggctcgccacggcgctcatcaccgcggtgccgccatgggtggtggagccgaggggccgagggctaagagaccgtttcgtcaacgtgcacgcgcgcgtgctcgcctacgcggcgctgctgttcctcgccctggcgtgcgtcctcgcggcgcaggagatactgcacgggtgggccgtcctcatcgccttcgccaacctcgcgttcgccgccgtctgcttccgtgtggatttcctggcggcggcggtgttgcaggacgacgacgatgccaatggcgccggtgtcgaccaagaaggcggcggcggcgtcaccaatttcttcgtggcgctataccacccgtcagctctgggaatgctaatggcggcgtactcaacctacgccggcggcaaggaggcggcacacctgagctggctgttcaaatgcttcgtgtggctcttggtcggcagcatcgtcacgtacctgtgtcggatggtgattaaggtggagatgcgaggggcgtcgacattggtgcgtaggaaggtggaactactgtggactcggatgagcgtcattctcgcactactcgccttggctttttgcgtaatagccgtggtggttcccgggagccggagcgagattgtagctgttttcgtttaagggattgcgaattggttatttttgctacagtacaccataacttcgtggttttagctgttggatatggcaaaaagagacttttgggtgaaaacacctcaaaagttagatatttgcagtgggcaccgtacccattaaaataataatttccgattgaagagg

SEQ ID NO: 12527 - DNA, 1765 bp, Oryza sativa
  ref <308>: DATABASE ACCESSION NUMBER: AK109875
  ref <309>: DATABASE ENTRY DATE: 2002-08-28
ctaaagtggccaattcttctgataaattggttgctctcaaggcctatcgacgagctcaaggtctttgctatgtttgtgctgaaaaatggtctcctactcacaagtgttcaggatcagtacagttacatgctgttcaagaactcttcagtgttttggcagctgatgtttctgagggtgaacaggatgctgattctatctctagtttgatggctatttctttacaggccattcaaggcacggtttctgcacatactttgcgattacaagggtccattcaaggctttgatgtgttaattttggtggattcaggcagctcttgcagttttctcagttcagtggttttacctcatctcactggtgtgaaatctttacttactccagttcaagtaaaggtagccaatggtgctgttctttcttgtacctctgagttgccggctgcaaaatgggaggttcaagggcatcagttctctactgatttcaaactgcttcctttggacaattatgatatgatcttgggtatggactggttagagaaatatagtccaatggatatcaattggcaggccaaaacaattcagtttggtcttcttgataagtcagtggaacttaaaggagtggtaccggaattggataaatgtgatctggtctctattcatcagttacagctgttgcacaatcaaggagctgtggagtccttggttcagctcactgccagtgacggctctagttcttctcaaaatgttccaagttcaattcagtccattttggatgaatttgctgacatttttaatgaaccagacgggttgccaccttctcgatcttatgatcacactattcctagctggttgaggtcgcgaaggttgacgctgttccacgaccacccggtcctgggggccgggaggtaccgcccgttcgcggcgctgtggagcatgaggatgtcgccgccgtcgaggtggagtatgtgcaccgtccacgccgcgcggtcctggtgcaggtagacgccgctcccgtcctcgccggcgcggaggtccgcagccacacgtggtgcccgtcgtggaacttctccattgcctccggcgagcggcggaggcggcgcgggtctcttgctttcttggcgctcccgtcggcgagaagaagagacggcgcggcgaggggagagcggagggaggggagcagttcgctgcgctcttggtttcttgcgccgcggcggaggcggcgttggccaatggcctcggcagccaacctgcgggcgtcggtgccggaggccgtggcagccagtcgacgatgaagaggcgcccgccgccagccgccaggcgtcctccagagcatctaggccgctattggcgttcagcttcggcggcgcacggacgcagaatccttcctcctgctcggaggaaggccatggcgacgggcggtggtggtggatgctggcgctggcggtgggcgcgagctcgacgcgcctcctcggcgtcaagcggggccttcatgcaacgacggagacccattggttggttgttggtgttgctggcgcgggacgtgttctggcccatctcgtagcagcccaaacgtgttcaaccaacgcagcaagtttcaggatactcgacagggcacgcaagattaacggacgtacggctccgactccgagaggcgagattccgatttgattgcagaactgatgtcagattccgaatcaaaaaacaaaaagtaaaaacgattcggacaatgcaagcatcctcttcctataaaagtctttcttgttttagtt

SEQ ID NO: 12528 - DNA, 1909 bp, Oryza sativa
  ref <308>: DATABASE ACCESSION NUMBER: AK109876
  ref <309>: DATABASE ENTRY DATE: 2002-08-28
atcatcagtcgtgtgtctctcgtgtgttagccacacgccactgtctaattgtctattatcctttgcatgcccctctccagctgcttcatctgttcgtccacaagcaactaagatgatgggtgagaatcgagcgagggtcgtggcgttggtggtggctgtagtggtggtcgtcgttggtgtcgccggcaatgtcgcggcggcgcaggcggcggtgacggtggcggacctgcagagggtggccgggtcgctgcagatgtacgtggacgcgctgccgcagatggccaagatccgtggctatggattccagcgcggccaagccgtgcccatcaacctcaccatcggcatgtaccagaagacctggaaattccaccgcgacctgccggcgacgccggtgttcgtgtacgggcagtgcccggactcggcgacgttcccggggccgacgatcatggcgcggcacgacgtgccgctgttcgtgaggtgggagaaccacctcccggcgtcgcacatccttccgtgggaccccaccgtccccaccgccatccccaagaacggcggcgtccccaccgtcgtccacctccacggcagcgcccacccgccgcagtccgacggcagcgccttcgcctggttcaccgccggcttcgccgagaagggacccgcctggacccaggccacctaccgctaccccaacgtccagcctccgggcaacctctggtaccacgaccacgccctcggcctcacccgcgccaacctcctcgccggcctcctcggcgcctacgtcatcgagaagcccgaggtggacacccccatggacctcccctgcgacgacgacgaccttcacctcgtcatcgccgaccggagcttcaacgtcgacggctcgctctacatgaactccaccggcgtcgcgcccaacatccacccgcaatgggcgccggagtacttcggcgaggccatcaccgtcaacggcaaggcgtggccgttcctcgtcgtccaccgccgccgctaccgcctccgcatcctcaacgccagcaacgcccgctacttcaacgtctccctctccaacggcctccccatccacgtcgtcggctccgacgcgtcctacctctccgcgccggtcaccgtctccaacctcctcctctccccggccgagatcttcgacgtcgtcgtcgacttctcccagtcgccgacggccgagatcgagctgctcaactcggcgccctacccgttccccaccggcgccgcccccggcccgctcaacggcaaggtgatgaagttcatcgtccagccgaacgggccgctcgacccgccggacaactcgacggtgccggaccacgaggtgccgtacgcgagcgtgacggcgctgccgccgacgacgatgacgaggtacatcgtgatgtacgagtacctgacgccgacggggcagtcgacgcacctctacatcaacgggctccgcctggaggacccggtgacggagacgcccaagtccggcacgacggagctgtggcaggtgatcaacctcaccggcgacaaccacccgctgcacatccacctggggatgttccaggcggtgaagatgcagcagctcgtcaacctgcaggccttcaccgactgcatgacggcggtcaacgacgcggtcaagtgcaacgtcgaccagcacgccgtcggccccgtcgtgccggtgccggaccacgagaagacgtggaagaacgtcatcaaggtgcccccgggcttcgtcacctcggtggtcatcgccttcaagctcgtcgacaccaaccagacctaccccttcgacaccaccgccgagccgggatacgtctaccattgccacgtaagcgccacgttaaatgccacgtgtctatcttactgggttaattttttttctaatcgaatttatatgttctaatgtgatttg

SEQ ID NO: 12529 - DNA, 2303 bp, Oryza sativa
  ref <308>: DATABASE ACCESSION NUMBER: AK109877
  ref <309>: DATABASE ENTRY DATE: 2002-08-28
aatgttaatgaatcggtctatctagattcattgtgaaacgaaggaaggagaatggagggagtaccccgtattacctatcatcgtcttggcgtggacgtagatcatgaagcggcgggcgttctgcgccctcatgtagtcggtgtcggggtcggggcgctccgttggctcgtagctgtacccgccggggacggggaggcgctcgcggttgccgaggcagaagaagttgaggtagtcggtggggtcggcgcggatccccttggcctggatggcggcgtccacgtccctgtacatcatctccatggtgcgccgctgccagtccaggatggcctgcacggagtcgctctccggcacgccctccggccacatcggcaccaccacgtacacggcgaaccgctcgccggcggcgatcttgctcgcgatcttgagggagagctccctcgggaccaggtgcagcgcgttgatcccctccacgctcgccacgccgcccttgccgccgcgccacgcgtacgagctccccaggaagtactggttctcgacgtagatgaagtcgcgggcgcgccggatcgcgtggatgtacgcgtcctggatgctgcgctcgatcacctggtccttgccggacaccagccccgccgccgcggcctcgtcggggctctccgggaaccccgccgccgcgccgccgtcgatggagcggaacacctgcacgttccagtgctccgggtcggcctggtcggcgtcgcgcgcggccatgctccggtcgagggtgaccagaaggctgtccttgcccctgccggcctgcttgcgccaccgctgctcgaagttgtcgagcacgtcccaggccgcggggccctcgacgcggcagtggatgtcgtgccatggctccctcggcccgcccttggcgatggacgcgccggggaagttgggctggtggaagtcgccgcggtgggtggtgtcgagcgtccggaacagcgggtgctcctgcgtgtcgtacctcccgtcgcacaggtcgatgccgccgaggaagctcacgaggcccggcgccgtcttcccgccgccgccgtcgacgatcaccgtcttctggtggtgcgtgaacatggtggccgtctcgacgtcctgcacgtagctccggccctggtcggggttccgggggcagaggacgcagtggaccttggtgccctcgaagtacctcgccgtgtcctggtcgtgcgtcgccatcagcccgtcgcggcggatcgggccgagacccaccgacgtccggtcgttccacaccagcagcagcaccatcacgccctgctcggccttcctcttgagcagctcgccgagcgtctccgacgacgacgacggccgccgcaccagcacgacgtcggtgttgacggaccacccggcgacgtacaccatcctccgggcgctgctgatcgcgtcgaacacgtcctcccagcaccgccgcggctcgtaccacctgcgcccggcgagctggatgcgcggcgcgaagccgtcggcgatgtgcgcgtcctggtacagcctgacgcggcacccgcggcgctgcgggaagaaggtgcgcggcacgccctggtacgcgccgctcccgacgccggcgccccagcgcgccgccgggtcggcggcgacgccggtgaaccggagctggacgcgtatcttgtccccgccgtcgatcgggcggtggccctcgccgcagatggggagccacaggtcggacaccggcgcaccggcggcgaggccctcgtcgacggggaggtaggcgcggccgatgagcgtggcgccgacggggttctcggccttgacggtgaagatgacgtcgccggcgtagtgcgcgcagtagatgtggaacgactccttccaccgcggcgtgcccgtcggctccaccgtgcgcgtccgcgcgacgcgggccttgtcgatgtccaccgtcgcatacagcttgccggacagcgggccgaggccgacggcgttctccacctgctgcgtctgcaccgccgccgccgccgcgttaatataatcattaagatacaatacaacactggccttaatttgatggccttatagtattagggttagtttgtgatcaagcttaaacctggcagctgttgcagaagggcagcttcttcttgatccatgagaagaccttcttcttcatcagagtctggttgaagtgtttaaattttcagtttggttaattagattgcattttcaaactgtaatgactaatgagaatcatatcgcagctcacggtggtttatgttcgctcgggtaaaaaatatttgacattcaggatataattcagtcatgctttt

SEQ ID NO: 12530 - DNA, 1808 bp, Oryza sativa
  ref <308>: DATABASE ACCESSION NUMBER: AK109878
  ref <309>: DATABASE ENTRY DATE: 2002-08-28
gtcgccttagcaatcgcctaaacaactggttgcaatggagcacttgtcacgtacgtctatccgctcgagaaaccgatggattcatccatggctgcttctgccgctgctatccgataatccgtctacggcgctgggtgcaacgagcgtacgcgcagggcgcgcgcgtgcagcctggtgagcgtgtgtcggaacctggagaggtcgagggtgacgttctggccgccgaggtagacgcgggcgacgaagccccaccccttgtcgcgcttggcggcctccgggtcggacaccaccacgtcgcggaggccgtacttgcggctcagcgagctctcgtgcccctccgcgtcgtactgctcgtagtgcagccccatccgcgcggacgcctccgcgtagcacccgcgcgcgatcggcgccacgcccagcggcgcgatctgcaccagcgccgcgccggggcgcaggaacaggagcttggtcaggtcggcgccgtgcacccccaccagcacgtcgcacgcgctcaccgacgcgtacgacgccgggagcggcagcccgttcgccgtctccaggatgtccacgtcgaaccccaccgacctcgcgagccgcgccaccgccgcctggttctcgatcacccgcgtccccctgcgcgacacgatcccgagccgtggccgccgtggcgccggctgagtaacgtcgtcgacgacgacggtgtctcctgcggtctcgtacacgccggcgaggagatcgtggaagtcgacgatggtcttgttgtcgcggagcctcgccgggtcgacggagaggatgccgtggaagcgtgtgccgacgatggcgccggggaagcagtgcgtccgcttgtcgtggaggaggtcgacgacgtggtagtccgagaggccggagatgatctcgccgtacgtgcccgcccaccacgggttgtacgagaggacgccgagcacgacgcggcggcggaggtgttgcaccgtcagccacgccggcacgaacccgtcgctgaacgcgtggaagaggttgccggtgtagccccccgccgtcatgacgaggagcggcgcgtcgtgccggacgtcgcaccggtggccgggctcctcctccggcggggccatccggagccgcacctcctctaccctgctcatgatgagcgcctcccacttgcgcgtgtacggacgtatcctctcctccacggtggcgttcgccgccggcggctgcttcgggaacagcaggagcgacagggacgacgggtccgtccgcacgtcgccggccatgaagcagacgtcggtgttgaaatccgagcggtcgcagcagatggtgtcgccggcgagcgacgagcacggcgagcgcagctggttgtcaagaaccaccacttcgccagcattatgatctcccacgacgcgggcgggcgaggtggtgacgttgggcggcggctgggggaagaagtcgaggccataggtgggcgtgagcacgatgaaccgcggggcgtagaggagcacgcagaggacgacggagaggacgaagaagaactggacgaaccccggccacttcttgccgccgccgtcctccacgccgccgccgccgaggtcggggagtttggaggccatgtctcgcgttggcgagatggacggacttggcgtgtgggggaaaaatggaaaggaatcgcgtatactacctggcacggcggcgtctcgatcgatcgtgtggatatttaaagagaggctcggcggctgagtcgtctcactggtcggcgcggtcactggtggtgattggtgaatggtggtgatactacagattgattggataaattctagttc

SEQ ID NO: 12531 - DNA, 1431 bp, Oryza sativa
  ref <308>: DATABASE ACCESSION NUMBER: AK109879
  ref <309>: DATABASE ENTRY DATE: 2002-08-28
attttcctccacccacttcttccccaccaagcaaccgccgccaccaccactcaatctcatctcgccgccgccgccgccgccatgggccggggacgcagccggaagccgcgcaacttcgccacgttccgcctctgcccgcgccccggcgccgccgacgcctccgaccgcgtcttcttccgcgtcgacaacaacccctactacgtcccgggcttcgccgacgacgacgttctcggcggcgccgccgccgcggcggtgggagagggagatgatgacgcgccttcctcctccgcctccggcgagacgggccccctccccgaccacgtccgccgcgagatcctggagctcggcctgcccgacgacggctacgactacctcgcccacctccgcgagatccgcccctcgatctcctccaccggcggcggcggcgcctccgccgccttcctccccgtccgccgccacgcccgcgcgcacttcggcccccctgtggacgtcaaggcctacgacgcgagccgcgttcggatcggctcctccggtaaggagaccaccacggcgacggcggcggcggtggaggtggaggtgacgcggatcgagaatgccatcgatcctgatgtcgccaggttgctcgaggagagcggtgagccggcgctggccggatcggagtcggagtcggagtcggaggacgacgatctggaggaggatttcgtcctcgtcgcaaatcaggacgacgatgattttgttctcgttgaaattgaaaatcagtttgaggaggaagaggaaaacattgctgcggctgatgattcagaggaggacggtttgaagaatggtgagtgcaaagtggggaattcagcgtcagcttgatgaacagcttcctatcgtggtaagattactgcccctgatttactgtttgattatttattgttattgccaatccacatcaagagaatttagagaatttacttctctaaattcctgtacatcaagagaatttagcttggagatatagagcctgtgtttctttccattatctagttaaaaaaaacatgtttgatgtttacgattttagttctaactatcaacacaacctgcttgcgtgcatcttctgtttatcgcagtatccctgtcgatgaaaaatccaatttttaactttttcaggcacttgacttcagatttggctctgtaattcacagagcctgtgctatcgaagaacaggcggaaagttatgacgcagccagtgagtgagtgagttattcattgtagcgagacgatgaactcataatgtctcgtcataatgtaatatcaatcatcagatatcagttagattagtaatagtaaaatcctaccacaatattcctagcatttcttgtgactttgccttcgtgcaatattcctctaccaccacgatttaatatatttctgaaaatttggagagcc

SEQ ID NO: 12532 - DNA, 2064 bp, Oryza sativa
  ref <308>: DATABASE ACCESSION NUMBER: AK109880
  ref <309>: DATABASE ENTRY DATE: 2002-08-28
agtcagaggcatcctttgccaaaaacatttatctgcttcaatggcaacttcttggtctgttgctttcactatcttcttctcctgtattctcctgcttgaaaccatctcttcttcagcatctcttgattgctcatatggttcagctcaagtgaagatactgtccagctcggtggtcagtgagcagcaaaatgtgtacctcttcttgaagccgtttcagagcacgagatcatgcagcgcgaggcggctcgccggcgaattcgtcaatggcgtcgtcgtgcccaacctgcggctcaacgtcaccggcgtcgtggtcacggccaacgagcggcagctcggcgcgctgcgctgcacgctggagtcggttcaggcggagctcgccgtcgccggattgggtcggagcgtcaaggtctcgccggagctctcgctgccttctctgcgagccatggcgaagtgccgccgccgcggcgagaagcattggcgcagagtcatggagttcgtgaggaggtcaggctcgtttgtcgtggtggagatgggtgcagaagagaaggcagacctcgccgtcgccgatgtcgccgccgcgttcgaggagggcgtcggcgtggcgttccgtatcagcggccgcgcggctcggagcgcggcggaaatggcgaggctgatcggcgatgcggataaggggaggaggtggacgggtgttcttgcggaggttgcgtctccctctccccggcgggagctcgccgcggcggcaaggacgacggcgcgcgacgtgttcgcgccggtgactaacccgacgacgacgccggcgacgaacccggtgacggtgcccgcgacgaacccggcgatgaacccggtgacgccgggcatcgtcaccgtgccgtcgaccaacccggccacgggatactccaacaaccccaacctcccgccgctgtacccggagccgacgccggtgacgatgcccgacccgacgacgacgacgacgccgacgccattcatgaacccggtcaccgcgccgaccatgccatccccggtgaccaaccccgccacgacgccggccgtcacaaacccaacgacgatgccttacccgtacccgccgcagcaaggcggcgtcatgccgacgactccgacttaccagccgccggcgacgatgccggcggcgggcgggcagacgtggtgcgtggcgaaggcggggctgatggacgcggcgctgcagagcgggctggactacgcgtgcggcatgggcggggccgactgcacggcgatccagcccatgggggcctgctacaacccaaacaccctgcaggcccacgcctcctacgccttcaactcctacttccagaggaacccctcgccggcgagctgcgacttcggcggcgccggcatgctcgtcaacatcaacccaagttcaggaacttgcttgtttcaggcatcatcagcaggctacggcgcgggatacagcccgggggtgacggggacagtgccggtgggcggcggcgcgggcgccggcgccggggtcggcgtcggcgtgacgccgatgggaccggcggtgggcggcaccggaggcgccggagtgacgccgatgggaccggcggtgggcggcggatcggggtcgacggtgctcaacgccaacagccccggcgggaactcgatgtacggctccgacagtaacccgacgagcctcaccggcgccgccgccgccgcgctgtcatccggctgggtcctgtgccttgtctggatattcacctttgcatatgtcaaggagaaagtgtaggccttcttcttgctgctgctgctgctactgatgatgaacaacttgttctacttgattcagctgtgtacagatgcatactagatgatttgagtgaattttcataggggagaagaaggatagatgttttgtgagtccgtctgtaatctgtatatgactgtttatgagctgggtaggcagaatgatgcttaggcatcttagccatcatatatgttgtaggtgagcatagagatccttctctatggagacatgcttcttgttgtagtgcttgatatgatatcagttgatactattcttgttct

SEQ ID NO: 12533 - DNA, 1806 bp, Oryza sativa
  ref <308>: DATABASE ACCESSION NUMBER: AK109881
  ref <309>: DATABASE ENTRY DATE: 2002-08-28
gcatcgcatcctccgccgccgccgccgccatcaccctcctctccgccgcattagcagtagaatcctaagccataatggcaacctccgccgccgccgccgcgagcaccttgccttacctcgtcgccgccgcctcctcctccgcggcggcgcgccgccgcggggcccaccggatccgggcgtcgtcggcggcggcggaggtggagggggcgatggacgtggtgtcggaggcggagctgcgggagaaggggttcatggggctccggaagacgaagctggtgtgcacggtggggcccgcttgcgtgggggctttgccggcgctggcgcgcggcgggatgggcgtggcgcgggtcaacctgtgccacgggggccgcggctggcaccgcgccgtgatgcgcgaggtgcggaggctcaacgaggaggaaggcttctgcgtctccctcatggtcgacaccgaggggtcccagctcctcgtcgccgaccacggcggcgccgcctccgtcaaggccgaggatggctctgaatggctatttacaagtaaaagaaccgatgaatctcatccattcacaatgcatgttaactttgataagttttctgaagacattctagttggtgatgagcttgtaattgatggaggaatggcaacatttgaagttattgagaaggtcggaaatgatttgcgctgtaagtgcacagacccaggtttgcttcttcctcgagccaaactgtcattctggaggaatggaaaattagttgaaaggaactttgggcttcctacattgtcagcaaaggattgggctgacattgaatttgggatagctgaaggagttgattgcatcgctctttcatttgtaaaagatgctaatgacatcaagtatctcaagacttacctctccagaaaatcattagaacacatcaaaatattcgcgaaggttgagagtcttgaatcactcaagaaccttaaagacatcatagaggcatctgatggagttatggtagcacgtggtgatcttggagttcagattcctttagaacaaatcccagccatccaagaggcaattgttgatctttgtcgacggttgaacaagccagtgatagttgcctctcagcttcttgaatcaatggttgagtatccaacaccaactcgtgcagaggtagcagacgtttctgaagcagtacggcaatatgctgatgccgtaatgttatcggcagagtcagctataggtgcatatccccagaaagctctagcagtcctccgtgctgctagtgagaggatggaatcatggagccgtgaggaaaacatgcagaaacttcttccacaacatcagcttgcaatagctttgcctgataggatctcagagcaaatttgcaccagtgctgcagaaatggcaaacaaccttgcggtggatgccatctttgtttacacaaagtatggtcacatggcgtcgcttctttcgcgcaaccggcccaaccctcccatttttgctttcactgataatgccaactcaagaaagagcatgaacctctactggggagtaattccacttcagctaccactgtcaaataacatggaagataacttcaatcaaaccatcaagcttatgaagtcgaagggttcagtgaaatctggagacacagtcttggtcgtcgccgactctgatctgaaccgaccccgtgctgctacctcagttttccaatccattcaagttcgaatagtggactaggttagtcattgctgagctagttgctagcagctgcagatctggatggatatttacaaattatacgatgattcttgaaattgttctg

SEQ ID NO: 12534 - DNA, 2714 bp, Oryza sativa
  ref <308>: DATABASE ACCESSION NUMBER: AK109882
  ref <309>: DATABASE ENTRY DATE: 2002-08-28
ctgaacaccctcgccgccgcgacacacatcgccgtcgtcggaggaggagacaccatggcggcggcggccttctcatgctgccatggcgccggcggcatggtggtgatcgtggtggtggtgatggcgatgttgggaggggtggtcgccggcggggagccgccgttctcgtgcggcggggcggcggcgggcggcgggcaggggtacgcgttctgcgacgcgacgctgccggcggagcagcgggcggcggacctggtggcgaggctgacggcggcggagaaggtggcgcagctcggggaccaggcggcgggcgtgccgcggctgggcgtcccggcgtacaagtggtggtcggaggcgctccacgggctggccacctccggcagagggctccacttcgacgcccccggctccgccgcgcgcgccgccaccagcttcccccaggtcctcctcaccgccgccgccttcgacgacgacctctggttccgcatcggccaggccatcggcacggaggcgagggcgctgtacaacattggccaggcagaggggctgaccatgtggtcccccaacgtgaacatcttcagggacccgcggtggggccgtggccaggagacccccggcgaggaccccaccatggcgagcaagtacgccgtcgcctttgtcaaggggatgcaggggaactcgtcggcgatcctccagacctccgcgtgctgtaagcacgtcaccgcgtatgacctcgaggattggaacggtgtccaacgctacaatttcaacgcaaaagtgacggcgcaggatctagaggacacatacaacccgccgttcaggagctgcgtggtggacgccaaggctacgtgcataatgtgcgcctacactggcatcaatggcgtcccggcctgcgcgaacgccgacctcctgaccaagaccgtcaggggagactggggcctggacgggtacatcgcctcggactgcgacgcggtcgccatcatgcgtgatgcgcagcgctacacacagacgccggaggacgccgtcgccgtcgccctcaaggccggattggacatgaactgtggcacctacatgcagcagcacgccacggcggcgatccagcaggggaagctgacggaggaggacatcgacaaggcgctcaagaacctcttcgccatccggatgcggctcgggcacttcgacggcgatcccaggagcaacagcgtgtacggcgggctcggggctgccgacatctgcacaccggagcacaggagcctcgcgctcgaggcggcgatggacggcattgtcttgctcaagaacgacgccggcatcctcccgctcgaccggacggcggtggcctccgcggcagtcattggccccaatgccaatgatggcctggccctcatcggcaactatttcggcccgccgtgtgaatcgacgacgccgctcaacggcatactggggtacatcaagaacgtgaggttcctcgctggttgcaattcggcggcctgcgacgtagccgccacggaccaagctgctgcggtagcgagctcttcggattatgtcttcctgttcatggggctcagccagaagcaggagagcgaagggcgcgacaggacaagcctgttgctccccggggagcagcaaagcctcatcaccgccgtagccgacgcggcgaagcgccctgtgatcctggtgctcctcaccggtggcccggtggacgtcacgttcgcgcagacgaacccaaagatcggcgccatcctgtgggctggttacccagggcaagctggtggtctcgccatcgccagggtgctcttcggtgaccacaaccccggtgggaggctgccagtgacatggtacccagaagagttcaccaaggtgcccatgacggacatgcggatgcgtgccgacccagccaccggctaccctggccggagctatcgcttctaccagggcaagaccgtctacaagttcggctacggtctcagctactccagctactcacgtcagctggtctctggtggtaagccagcagagtcctacaccaacctacttgctagtctgaggacaacaacaacatcagaaggtgatgagagctaccacattgaagagatcggcactgacggctgtgagcagctcaagttcccggcggttgtggaggtgcagaaccatggccccatggatggcaagcactctgtgctcatgtacctccggtggccgaatgctaagggcggccgcccgacaacccagctgatcggtttcaggagccagcatctcaaggtaggggagaaggccaacatcaggtttgacatcagcccatgtgagcacttcagcagggtaaggaaagacggcaagaaggtgatcgacagagggtctcactacctcatggttgacaaggatgagttagagattagattcgaggcctgagttttagatggagggaaggaattacaggtggtgcatacggtgcaattctttcactgtataatttatttgttgcagtggttatgattcagttgcctcggaaactgaggtttctaggctccaggagatgtgtttagcaccttttcaggtatagctcacacattattccagaccagaaatgtctcccagactcccggtatctttgaaatggatagtctggggaacatgtaaaatggattattgatttaccacctcacaattaacgagcaataatattttatacccttctctgtatttagagtgcaatgcaaact

SEQ ID NO: 12535 - DNA, 1801 bp, Oryza sativa
  ref <308>: DATABASE ACCESSION NUMBER: AK109883
  ref <309>: DATABASE ENTRY DATE: 2002-08-28
gcacgcgcggacagagagccagagacccgtgtgctgcgaactcaccgcttggtgccgtacgtcgtcgccgccgtccatggctctctcggccgagacgggcaaagttgtccagtggcggcgctgggcgttcgccaacctgggctcggtgctgtccaacttcggctcgctgtggctcctcctggcgccgctgctcgccgcctacgcgccgcggcggctgttcaagacctacttcaacctcttcctccgccggcacgcccggcgcctcctcgccgtcgtcgacccctacgtcaccgtcgacgtctccgagccgggcggcgccagcgcgcactactcccggtacggccgcgtcaccgacagcggcgacagcacctacgaggaggtgaaggcgtacctgagcgacgggtgcgcgggggaggcgcgcgagctccgcgccgagggcgcgtccgagggcgacggcgtcgtgatcagcatgcgcgacgggcaggacgtcgccgacgagttccggggcgccgcgctgtggtggacgtcagtggtgcgggaggacgcgcaggggcagcagagggcgcacacccggcggtgccagcgcctcacgttccaccaccgcgaccgccgcctcgtcgtcgacgagtacctgccgcacgtccgccggaagggccgcgagatcctcttcagcaaccgccgccgacgcctctacaccaacaacaaatccggcgactccttccggtacgattacaaagcatggagctacatcgacttcgaccacccgacgacgttcgacacgttggccatggacacggccaggaagagggagatcatcgacgacctcgacgcgttccggagcgacagggacttctaccggcgcgccggcaagccgtggaagcggggctacctgctgcacggcccgccgggcaccggcaagtccaccatgatcgccgccatggccaactacctcgactacgacatctacgacgtcgagctcaccgtggtgaaggacaacaacgacctccgcaggctgctgatcgagacgaccagcaagtccatcatcgtcatcgaggacatcgactgctccctcgacctcaccggcgaccgcgccgccacgcagcggcgggggcgccagaacgacagggacgacggcagcaggcgccatgaccgtgacggcagcatggtgaccctgtccggcctgctcaacttcatcgacgggctctggtcggcgtgcggcggcgagcggatcgtcgtgttcacgacgaaccacgtcgacaagctcgacgcggcgctgatccggcggggcaggatggacatgcgcatcgagatgtcgtactgcggaatcgaggcgttcaagaccctcgccaagaactacctcgacgtcgacgaccaccggctgttcggccccgtcggcgagatcctcggcagggagagcatcacgccggccgacgtcgccgagtgcctcatgacggccaagcgcgccggctccgatgacgagtcctcccgcctcgagatcgtgatcgacgagctgaagcagacggcagaggcgaatgcgaaggcgaaggctgaggcagaggcgaaggcgaaggccgaggcagaggaagaagcgaaggcggcagaaatggatcgtgacaacactcgggaagaacaaaatggacgaaagtctcccaaaatttgaagatactggagatttgcaaatcgtctttacggatttgctaggttctgcgatggacacgcaaacgagtatttactgttcagtctcatatttgaacacaacgggacaaaaattgctgtggaacaattgcaaaggagtttcctc

SEQ ID NO: 12536 - DNA, 1374 bp, Oryza sativa
  ref <308>: DATABASE ACCESSION NUMBER: AK109884
  ref <309>: DATABASE ENTRY DATE: 2002-08-28
gataccaacaccaacatcaaacacagtgacaaaccacacaactacccaacgctcagaagggaagcacgcggacacctgcatgacggaggtcgacaaggtcgctcgccggttcaggaattaagccagcggcggagtgaagaagtagatgtcgccgaggcgatcgttcgtcggcgagttgccgccgtacaccagcagccctcgccggccgtccacctcccccgccgagaacgcgcaccatcccctcggccccgggtggtgctcgcccgcgtcgtccagcctcgcccacgcgcccgtctccgtgtccagcgcgaacgcctcggcggagaatttgccggcgccgaggtgccccaggtcgctcgggtccacctcgccgccgaacaccaccacgtgcttcccgatccccgcggcacagaacacgctgcgcggggacggcttgtcgccgccgccgccgccgccggtggtctcgaccgtggaccacgcgcccgtgcccgggtcgtagcagtgcacgtcgtccagctcctcgccggagaagccgtacaccacccacaccttcccgccggcgacggccagcccggggcctccccgcggcttgcacgcctcgcccggcgacggcagcgcctcccaccgcccggcggcgacgtcgtaggcccacaggtcgttgaggcggccggcgtcgccgcacccgccgaacacgtacaccttcccgccccccgcggcgtcggccaccatggagtggtagctccggtgcggcgggccgtcgccggcgccggaggacagcagcgtccatctgttggtcgccgtgtcaaacgagtagagctcgttcagctccttgtgctcctggtcgcgaccgccgaacatgtagacggtggcgccgacggacgccatggtgacgccgacgcgcggcggcggcacgtcgccggaggcgtccagcgccgaccagcactgcgacttgaggtcgaaggcgtacatggcgttgtccaccggcacgcgcggcgtgaactcgccgccgaacgcgtacgccgtgccgccgacgagggtgatggcgtgggagcttcttgctcccggcccatctcccttctgctctagctgcgcgtgattaattaattaattaactgatgtcaattactaatcaaattagacaaaactggatgctgcaatctgcaaagaaaattactactctctcgctgagcaatttgtgttcgaagattattagtatttgctatgaaattcttgcgttctatacaggattgtaatttctataaaatttccaggaattcactaattagtttaagtgacatctaatatgtggatgtctatatgtggcggcgctttttatttgcatatgttcatgagcctaatggcccgaatttctgc

SEQ ID NO: 12537 - DNA, 1500 bp, Oryza sativa
  ref <308>: DATABASE ACCESSION NUMBER: AK109885
  ref <309>: DATABASE ENTRY DATE: 2002-08-28
ttctcaaaccgaactccccccacttcttcccgcgtccacagcggcttgcggcgggggcagaacacaccatggaaaccatggcaaaagcaccgggccctgtgtacctcctcttcctgctgctcgcgctgccttgctgcctcatcccgcaccgcggcgcggcccagcccgcggcgaacgaggcgcggctgctcctccagatcaagcgcgcgtggggcgacccggccgtgctcgcgggatggaacgacacggccgcgcccgcggctcactgctcctggccctacgtcacatgcgacaccgccgggcgcgtcacgaacctctccctcgccaacaccaacgtgtccggccccgtgtcggacgccgtcggcggcctctccagcctcgtgcacctcgacctctacaacaacaacatcaacggtacgttcccgacgagcgtgtaccgctgcgtttctctccggtacctcaacctgtctcagaactacctcggcggggagctccccgccgacatcggcgtcggcctcggggagaacctgacaactctagtcctcagcggcaactacttcactggcaccatccccaagtcgttgtcccgattgcagaagctggagtggctgatgctggacaacaacaacctcaccggcacaatcccgggagagctcggcgacctgacgagccttacgacgctgacgatctcgacgaacaagctcggaccgggtcagctgccggagtcgttcaagaacctgactaagctgacaaccctctgggcgagaaagtgtcagctcgtcggcgacatgccagcctatgtggccgacatgccggacttggtgacgctcgacctggcggtcaacaacttgacaggaagcattcctccggggatctggagcctgaagaagctgcagtgcctgtttctatttgcgaacaagctcaccggcgacatcgtcgtcgccgatggtgctttcgccgcagtgaatttggttttcatcgacctgtccgcgaatcccaagctgggtggaccgattcctcaagactttggtctcttgcagaagcttgaagtcatccacctgtactttaacaacttctccggtgagataccggcgagcatcggtcggttgccggcattgaaggaaatacacctattcaataatagtctcaccggcgttctaccaccggagcttgggcagaagtcaccggatttgtgggatcttgaggttgatttcaacaagttcaccggcccgattcctgaggggctgtgtgacggcggcaagctcaacatattcaccgcagcgaacaacctcttgaacggctccatcccggagaggctcgccggctgcaccacgctccagaccctgtttctccccaacaacaagctgtccggcgatgtgccagaggcgctatggacggcgacaaagctccaattcgtgcagctgcagaataatggcctcaccgggactctgccttccaccatgtacagcaacctttcgagcttaaccgtggagaacaacc

SEQ ID NO: 12538 - DNA, 2459 bp, Oryza sativa
  ref <308>: DATABASE ACCESSION NUMBER: AK109886
  ref <309>: DATABASE ENTRY DATE: 2002-08-28
accaagcccacgcgccgagcccgtcctcctctccggcgtcccggccgcattcatggggcggcggcggcggcggcgttgtagttggtgcggcccgcggcggaggcgcttctccggcgtccgctctaccccaatctacccgtggtaggtaggccgatctccggattggtgaacaatggcatttcatttacgcttttagtgttatgtggtttcgtttggggacgattaggaatcttaaggatgctgcgtgtttaggaggatttgctcatgttctttgctgttgaggttttgttcgatcccttcaaacttctaggcattgagtagaaatgtttgaaccaatgaccaactgcatgttcactaatttcacgaaataatgcgatgctttgagcatggttcagatgagattttcatggtggtaactggcaaggtgtccacaatccccatagctatgcagatgtcgcttgtgtgtgcttcatgtaattgcgttttgatgtggactatcattaagctataaacatgtgtaaagtggattggtaactgattctattctcttgcacattttctgatgatttgtcatctggtggatacccaaataatgaggtgctcccttttgaactttttatatgaagttgccgcttttgcctcatttcagctatactatattttctgtttatggttgctatggggtccagagtatactgtggtattagcgcaccggcttgattgaattaaactatgttagagaaataggtcgatgtttataatgtttgcactaggatgtactgctacaaaacttgtggagtagagtagacaagagggggatgatctaggtaggagagctctacctagaagaaacatcattgacatgaaacattattgtgaatcatccatgacattgttaaaagaaacatcgggctgtaaaagtattataagcattagagttgccctataaatctaattctatctaatataaggatgttgtggttgtattttgccacacagttactttggttctgctatggtttcataattgtttttcagtgtagacagatatgataaccaccgtacggaattagactaccagaaatcctcttacgttccgacattgttaataccacaatcgatgccaatgcaccgaattctttgcataatcttattctgcacataatcaatgcaggttagaactgcaatcctccataaatcaatgaagaatagtgagtcaaaccatagccaaaatccaataacaatccctatgattgtggcttagtaaagacctaaattcatccttatttggttcagatccaaatctggaactttcaattgggcatgcactcaacacagttccacaaagcccataatcgttgctgtaaattgatggatcgttcagtgtctcaagctggccacctgtgggtgcccttcctgacagagtgacaggtggttattagagagatgtaaggagctgagaaatgttaagctagagatgttggtcgtaatatgacctgaaaatgcattgcaagataaatccagggactctagggcattcatattgccaatatcatttgggatactgccagatatattatttcttgataattttaggaactggagacccttaaggtttgcaaactctgcaggtatctcataagaaaaaatgttgcttgtaaatcaataactgccagaagtggaattgtgctttcaaatgtataagatctgctcttccaaattagttcaattctgttagaatatggggacaaaaagtaatttgaatatgtgaacgcaacatatgttgatccaatgttgagccttttgttctgttgcatcattgatctgaagttagcaaaatgtgctgtgtgctggttgaacctaccaattgattgtcagctagatcaagtagctgcagttgagaatgatttgatagttgccagggtatgtatccttcgaacatatttgagcataactgaagaattttaagagaaggcaagctttcccatatccttgaagaaatttcagcagatagcctattgtcccggagatctaccattgttaagttcttgcagatgggaagacttttgcttgttgaggttgggactttgccagagaaagcattgcttgacaaatctaggaaaaacaattgttgaagatttgaccagcaagtagggaggtccccatagatctgattgcttgatagatccaagaagttcagtaaaaccaattgacagaactcctgaggaagcatccctgtaaattgattcgaatcgcctgtgcaatgtcaccagagaagtggttttgccctatccaagcatacgccaattttggacatggcagaagcattcccaacaagtagttatttctcaccagcaatttctgaagctgaaatccactgcatagatcaggtggtaattcccccaataaattgttgttggactagtctagaataaggagtgcgatgcttttctagttcc

SEQ ID NO: 12539 - DNA, 1443 bp, Oryza sativa
  ref <308>: DATABASE ACCESSION NUMBER: AK109887
  ref <309>: DATABASE ENTRY DATE: 2002-08-28
ctacacactcctcctcctcctcctcgccgataacgatggcaatcgccgccgccgtcgccgccgccatggcggggcctcgccggcgcaggatgctgctcctaatggcgaactacgcggcgctgctggtggggtcggtggcgtcgagcctgctgtcgaggttctacttcacgcacggcgggcggaaccggtgggtggtgacgctggtgcagtcggcggggttcccgctgctggtcgccggcgcgctcgccggcggccggccggcgtcggcgccgcggccgttcacgtggctgtcgcggcggttcctcgccgtctgcctcgtcatcggcgccctgatgggggccaacaacctgctcttcgcgtacagcacgtcgctcctccccgtgtcgacgtcgtcgctgctgctgtcgacgcagctcgcgttcacgctggtgctcgccgtcgtcatcgtccgccacccggtcaccttcgtgaacctcaatgccgtcgtgctgctgacgctcagctcggtgctcctcgcgctccggtcgggggactccggtgagacggcggagggcggcgtcggcggcggcggcaggaagagctacctcgtcgggttcgtcgtcacgctgggcgccgcggggctcttctcggcgtacctgccggtgatggagctggtgtaccgcgaggccgtctccggggggttcgtcctggccgtggaggtgcaggcggtgatgcaggcgatggcgtcgctcatcgcggcggtggggctggcggcgtcgggcggcgtggcggacgacgtgtccggctgggtggacggcgggtcctcgccggcggtgtactgggcggtggtggcgacgctggtgctgacgtggcaggcgtgcttcatgggcaccgccggcgtgatctacctcacctcgtcgctccacagcggcgtctgcatggccgccgtgctcaccctcaacgtactcggcggcgtcgccgtgttcggcgacccgttcggcgcggagaaggccctcgccaccgcgctctgcgcctggggcttctcctcctacctctacggcgagtacgccaaggccaagaaggtcgccgcggcggcggcggttgcggcggcggaggaggaggagagcgcttccgacggcgagggcagcgtccacaagagcctgacaggtggcggcgcggccggaggacacgtcgagacggcagtttgaagagaacgagccatgtgatgtgatgggctgggccgcgcgcgcggaaacgaagggagggagcgagcggtgcaacaaaaggaaaagaaactgaagcaacaaaaagaaattggcaggatgcgatgccattaggtgtagttgagtcatgcatgttgcatggattaggcttacttgcaagggacaaaaattgttgcatggatcagtagaccgactgtctgtgcttgtaactgatgggttagcttgatttgttcaaaaaaac

SEQ ID NO: 12540 - DNA, 1110 bp, Oryza sativa
  ref <308>: DATABASE ACCESSION NUMBER: AK109888
  ref <309>: DATABASE ENTRY DATE: 2002-08-28
aatctggacgaaggctcagaagtggtccaccccccaaatcgcacgcacgcacgcgcgcaatggtcaatcgaccaagcaatcgagcggagcactgcacaaaatttctcccgcttccgcttgcaaatccaatcctaagctaaagtttgatgccaaaatcgcatcgagctcacatgacaaaactaatcctgcgttgcacttgcacacgtgcgtgcggcagatcaccttgggtgatcagcacgtgcggcgaggcggcgcggcggcgagtcggcggcggtggtggcgatgctaccggcgaagggaggaggcgcaggagctggagccggaggaagggctgcgccagaagccgccgctgtagaaccgggagcgcatgatctcgagctccagctccgcgtccgcgtccgtttcgccgcgcgctgatgacgccgccgccgccgccgccgccgcctcgtcgtccatcatatcgaacgccgacgcggccgcgatcatcgccttggcgctccccgacggcgacgacggtcctccttcaccaccaccaccaccgcctcctcctcctccgcttcggctcttgcgacgccgctgccgccgccgccgccgcctcatcacccgccgcatgacgcccgcggggagcctgacggtgacgagcagcaggatctccagcagcgccagcgggcagcagcagcacaccgccgcgcagttcgccgccgcctgccccgccgcctcccctcccccgcaccccggccgcggccgcgcctcatcctcctccacctcctcctcgccgcgctcccgcatgtgctccgatcctctccgcctcctcgccgatcggacgagagagtccacgggaacctacccgtgggtgcagtggtatttagcgagacgcgacgcgacgcgagggaggagagagagagagaggacgacggtcttacggcggttggtggcttgtggaggagagagaaagagggaggagatagatggttagaggcggcgagatggcgtggcgttggttgcttttgcagcctgcgccacggaacggaggaaaagatcaaaccgcaattttctgttactactagtacatttaatttatttaatttaagggaatttgattaaattgac

SEQ ID NO: 12541 - DNA, 1992 bp, Oryza sativa
  ref <308>: DATABASE ACCESSION NUMBER: AK109889
  ref <309>: DATABASE ENTRY DATE: 2002-08-28
acttgttaccatggcttcttcctctccacttctcctgctgctactgctgctcccgctcgccgccgccaccgccaccgcgtcgctcccgccgctgccgctctcgacggcgtcgcggtgggtggtgggcgcggacgggcggcgcgtgaagctggcgtgcgcgaactgggcgtcgcacctggagcccgtggcggcggagggcctgtcgcgccgcggccttggggacatcgcggcgcgcgtggcggcgatggggttaaactgcgtcaggctcacctggccgacctacctcgccaccaacgccacgctggcgaacctgccgctgagagcgtcgctggaacgccttggtatgccggagtccgtggccggcgtccgggtcaacaaccccggactcctcgacctgcccctcatcgatgtgttccaggaagtggtgtcagctttggccaagaacaatataatggttatacttgataaccaaatgacaactccaggatggtgctgcagcgaaaacgacggtaatggcttttttggtgacaagtactttggcccagaagaatggttgaaaggccttagtgcaatggcaacaatgtttaggaacacaaaaaatgttgtgggcatgagtttaagaaacgagctccgaggctccaaaaatgttagtttgtggttcaggtacatgcaactgggtgctgaagttgtgcatgcggcaaaccctggcgttcttgttattttgtcaggcctgaacttcgacaatactctggatttcttggtcccaaatcaaattcagctaacatttactggaaagttagtctttgagcagcactggtatggtttctcagatgatggaaactggggatctcagaaccaaaacgatgcttgtgggatggttgttgattccataaagaaaaaaggactgttcctacttcagcaaggctggccactgtttttctccgagtttgggtttgacatgtctgggacacatgtcgctgacaatcgctatcttacctgcttcttaaccgtggcagctgaaatggatctggactgggctatttgggctctgcaagggagttattatatcagggagggtactctagcttatgatgaatcttatggattgctatcctgggattggtgtacagctagaaaccccagctttattaaaaggattaatgctctgcaatcaccattccaaggtcccgggcttccaaacagtcaacagccttacaatgttatattccatcctctatctgggctttgtgtcttggtgaaatcttcagaggcacttgagttgggtccatgtgataaatcaaatgcttggaattataccaaaggatacgagttaatactcaaacaaactggacaatgcctccaggcgaagtctgttggtgagaatgcaaagcttggcaccagttgcagcaaatccagttcaaagtggaagctactatcaaattcaggaatgcatgtttcaactgaactcaccaataacggaaccagagtatgcttggaggccagtcctgatggaaatatcacgacaaatcagtgcaagtgcctaaccgtagatccgaattgcaatcctgagagtcagtggttcaaaattatattaagcagtaaacacataccaggcggcacctccattttgcagttgccatctcatggtccctggtctccaacatcatctagttaatcttggactatttcgaaaatatcctgtttgaatttgatcaaggacgaatatgacagagcaagtgtcaagttccagatggttattcaaggcaattggatgactatagtattgcagcttgtaaaataatacacagaacaccgtatgtgtacagtagtagtaccattgatttcttgttttctagagtcctgttgaaatatgtcctatcatatgtgtacaaaaattaagaataaaagaatgtacagataaataccctgcttttctttgatactacagagaataaaagggatatctttttatagttggtgtcatatgttgac

SEQ ID NO: 12542 - DNA, 1514 bp, Oryza sativa
  ref <308>: DATABASE ACCESSION NUMBER: AK109890
  ref <309>: DATABASE ENTRY DATE: 2002-08-28
aggggcaagagccactggtggtggggctaggggggtcacgtcgccagcgatggcccagacagagttgggcgttggtggtggcgggctggcggcgctggcggcggcattccgtgacccgccgcagccttttcacatcggggcgcggtggattgcgagcaccaccgcgtcgccgttttctccttcttccccgccaccggcgtcgagctcgcgctggaggagcgcggcctcatcggagacacggctgccgccacaaggattacggccgtgaggcagctgtcgccaccgcctccgcagtcgacgtcgtcgcccgtgcagctactcccagtgaactggaacgcgtcccagatgttggggacgaagttggcggcgaggaagatgaccgtgaggagctccgccgtgatcgcgccgaacctccggttgtcgcaggagaagggcctcgctgaggggaagaggaggccgtccatgttgaatcgcagcgcgcggaacacgatggggaagacgagcatgtcgtccagcgtcgcctcgccgaagaggaggaagccgaagaagctggtggtggtgtacacgaccaagccgagtagcagtgacgcccgcactattggcctgatcagggagtggtccttgagctcgttgtgaattgtgtgcactgaatgcagtggcaagttaatcacattcccacagaaaaatgcaaacttagctggtaattaaaatgtaccgttgtaatggaaaatgtaggcagtcacaactcacaagaactggagctgcagtgggaagtctccaggtggagctccagtcatgaacatcagggaacagcttaggcatcggaatctgccctttcatcagcttgatggtggcgattccgacagtgatcaccacgaacacgacggccagagcaaccgacacggccggcgtgtatttcagtggatctgaactcatcccagggaaaaagaacacaagccattagagtcacaacgaaatgttcagtgaagctgaccatcacgccgacgttgttgacgatgacgcagagctagaggatccccctgccgaaagcaccgaaggcgtcgcccatggcctcgccgtacgaggtggcgcccacagcgcggctgaaccagacgaggagctcgatggaggcgtccgtgagcactgcggcgagcatcaccaggatgaggcccggcacgagactgagcaccttcatggtggccgggagcgccatgatgcccgcgccgatgatggtggtggacaggttgaacaccgcgccggagaaggacgcgcgcggctcctcaccccgccgcctgccggccgtgcagctgctcccccaccggcgtccgtgaagaaaagaggagagagaggaagagaggtggagaggggagggggaagaagaggctgacgcgtggggcacacgtgggtcccatgctgagtcagctgtcacatcagacaaaaccggagttaaaaccgccagagatttgtactggttttataagttgagggatgctttatatctggttttacggttc

SEQ ID NO: 12543 - DNA, 1754 bp, Oryza sativa
  ref <308>: DATABASE ACCESSION NUMBER: AK109891
  ref <309>: DATABASE ENTRY DATE: 2002-08-28
aagttgagtacaagccgggaacaacaaacgtggtggcagacgccctctccagaagggacgaacacctggctgaagctctcgccttgtcagcccctcagttctctctgtttgatgagctgcggcacgaggtgctcacgtcgcccgagctgactgccattcgggatgacattgccaaggggtcaaaaccgccggcctgggcgttcacggacggcctcatcacgttcaaaggccgtatctttgtgtctgcatcatcaccatccttgccggccatcctcgaactggcacacggcctggggcacgagggcacgcagaatacgctctctcgcctccgagctgacttccacctcgcacgggacagggcggtggtacaagagcatgcccgagcctgtttcacgtgtcagcaaaacaagacggagcacctacaaccggccggcctcttgcaatccttgccggtgccatcggcggtgtgggctgacatcgccatggattttgtggagggtctgccacgcgtccatggcaagacggtcatcttaacggtggtggaccgtttctccaagtttgcccactttataccaatggctcatccctacacggcaacctcggtggcagcggccttcttctcggaaattgttcgtctgcatggtgttccagcttctattgtcagtgatcgtgatccggtcttcaccagcactttctggcgggagttgttcagattggccggagtacgactgaacttgtcgtcggcatttcatcctcagtctgacggtcagtccgaggtgacgaacaagatcattgcgatgtatctccgttgtcttaccggcgatcggccgcggcactggctacggtggcttccatgggcagagtactgctacaacacgtcctaccagtcatctcttcgcacgtcgccgttccgtgtggtttatggccgtgagccgcctacgctgcgcgcctatgaaccgggatccactcgtctgctggcagtccaacaggcgatgcaagatcgagatgaatttttgcgtgagattcgtgatcgcctggagcaagcgcagcagacacacaagtcggcgtatgatggcaagcatcgggcattggaattcagtgtgggcgactggttgtggcttcgtttgctccatcgcccgattgcttcgctcggggtcaccggccgtggtaagttggggcctaaattttacgggctgtacagggttgccgagcggattggttctgtggcatatcgtcttcagcttcctccgggtgctcgcttgcatgatgtgtttcacgtgaggttgttgaagccattttgtggaactccgccggattctgttccaccgttaccgcccattcaacacggccaagtgtgtttgcagcctgctgcagttacgcagagtcgattggctcgtggagttcgtcaagttcttgttcagtggaaggataagccttctgccgaagcttcatggatgcctttggatgaatttcgcactcttcatccggattttcagctcgaggacgagctgcttctccaggggggagagatgtcatgtggggattgcaatacaagcgtcgcagcaacaggcgggcgacggcaaggcgtgacgaggaatagttttttacttctgttttgattcggttcagagtttgttagatagtttgttagtttcttattccgtaagttgttaggagtctatcctttagaattgctatataatctgtaagacagtttggttttggaatcaatcaattacgtgagattaatctgc

SEQ ID NO: 12544 - DNA, 1994 bp, Oryza sativa
  ref <308>: DATABASE ACCESSION NUMBER: AK109892
  ref <309>: DATABASE ENTRY DATE: 2002-08-28
tttgcgatgagctcgtcgccggcgatcgccgcggcgtcggcggcagtggtggcgctggccgtcgccaaccgcgtgctgtacaagctcgcgctcgtgccgctcaagcagtacccgttcttcctcgcccagctcaccaccttcgggtacgtcgccgtgtacttctcgatactctacgcgaggtaccgcgcgggggtggtgacgggggacatgctggcgctgccgaagcgccggttggccgccatcggcttgctggaggccctcgggcttgcggccggcatgtctgcaggagctatgcttcctgggcctgctattcctatactgtcccagtcattcctggtgtggcagcttatcttctctgcgctgctgttgggaagaacgtattcaatgaggcaaatcattggttgtttccttgttgcttctggtgtgattcttgctgttgcaagtggagcgaatgagggtcaatttctgtctgaagtcaagtttatttggctagcactgatggttgcatcatcagcatttcaagcaggtgcttcaattctgaaggaatctgttttcattgatggtgcaaagcgtcttaaggggaggcgcccagatatctttgtggttaattcgtttgggtcaggatttcaggctctctttgtctttcttcttctcccacttctttctaatttgaagggaataaagtttgctgagcttcctgcttatttaaatggtggtgctgagtgcttcctaaatgtcgatgatagtctgattgattgtggaggagctccatttctaccattgctgtttatattggtgaatatggccttcaatatcgcattgctcaatttggtgaagctgtcatctgcgctggttgcttcgcttactgctacttcagcagtgccaatatcaatctacatactttcacttccgttgccctacatccctcatggcgcagagttaagttcatctttcatcctaggcggtgtggtattgctgatggggctgattatatataaccttccgcaatcatcgaagaaacaatccaagattgagtgaagataaagtgactgaatcaaccaaacactgtccggctcatctgacacgctacgggattttactgatttatttgagttgcaacatagtgaaatagggttccaaactgaagggcatgacataacacattcaaatttgtgaatacgttgatttatttgaactcaaaattcaagcagcacgtgtacgtaggatggccgtcaggccatatatagttatattatactcctgtagcctgtgtgttctcaaaaatataaaaataattgtaatggatttggtacaaattgagactaattctacaattccagtacaaatcccttacccagtggccagttccattgatttaaaacccaaatgcaacacaacattcatgcacagaacaatcagaaactgccttaggcacagtaatcccatcagagatgtaccacctacgtaatagataagaaaacttatgtcaggactcatgagtaaagcagaattcttgtgcttaaactactcatcagcacatatatacatcatcagtgagtatgcttctggcatcacactccagattcctgtgatccagtctgcagatgaatagctgattaccatccaatctcttcatggcttcatactgaacctgctggtgtggttattagtcaccacactgcaaaactgcatgctgtatcgtctggagtttggaccctccctggaatccgggtctgcatgccaatctagctatgatcagttcgaattcaacaaatcaacaatcacaattcacacttcacacatggtctattgctgaaaaaaaaaaatcaaacatggccaaaaagaaaaaactggatgctttgggatggaaccattctagtggactaggtgcaaaggagtgatgcctttgcttgtatatgtttcgtgtttgtcttttgcgtatgattatgtactatataagtaatgcattgtggttctgaaatttcagacaagat

SEQ ID NO: 12545 - DNA, 1615 bp, Oryza sativa
  ref <308>: DATABASE ACCESSION NUMBER: AK109893
  ref <309>: DATABASE ENTRY DATE: 2002-08-28
aagcttagctgcactgcatcaactgcatctgcatgcatgtatttaacagacaccactggagcttcgctaatggcgacatcgtagctagctacacacactgtacatgctgctgatctcctgcgaaaactgaagataacagccagctctgcatgcttggctagcctagctagctgcaggattattgctgtggtaattattgattttgatgctagtattagcatgttgaggaagagagctaagccaagtagcagtagtggaggcagcaacaagcagcagcacgagattgcgtttgatcacggcggcggcggcggcggcgcggctgccatttcggctcccaagctgttggtgccttctagctccggcgaggcctcgccggaggccgtcctgatgagccccacctccactctccagacggccagcgcgacgtccccgtgtagtggacgtaccaccggcgccgccgccacggccgtcccgttctcccgccgccgccgccacggcggcggcggcgtcgggcgcgggccggccgacggggatggacagtgcaggacccaccgcccttgggacgcgacgaggcccgtcgggctcgggctcgtcggcgccctgaacgacgacgaggacgacgacgacggagaggtcgacgccgcccccggcgacgccgcggcgtcgtctgtcctgaccgggcagatcaggctccgggtccagacgaactactacgcgccgtgcacggagttcggcgtcaagagcggcggcgccgccgtgcagtacgcgcctcctcctcgccgccggtggatgtcgccgagggagatgatggaggagatgtcggaggactacacctgcgtcatcgcgcgcggggccaacccgaggacgacgcacatcttcgacaaccgcgtcgtcgagagctccggcgacggcgagtacttctcgccggagctctggccaccgagcgccgccggcaagggcgacgacgacggcgacggcgacttcttgcgctactgccatggctgcagcaaggaccttggcctaggcaaggacatcttcatgtacaggggtgagaaggccttctgcagccacgaatgccgctaccacgagatgctattcgacgagggcatcgaagaactctgacaccgatcgactcgccagatcttctattttgtaaactccaacttgctgattcaatcagccaggttaattttcagaaattggagaagaagatcagcgtgatcctgaaactggaagtggctcaaggcctctccctcctcaattccaaatggcaaatgttcagatatttggtctttgtcagatcatcttaattaatctgctcccttttctggttcttgtagagtggtagctaagctcattaggtgagcaattaggagctagtgttcagacttcagagttgagatccatgtcgccttcagagattggcattgtccctgtttttgtttaagtatgtataagagtggttcatgcaactgttgcgttccatgatttgcatgtcagtgatgtcattagtgctagtgaccagcactaatggcagtgctagtgggtcagtgtggtaatagtggtacggattgattggactgtccatctctaagcagcaagtgtacagtgttgc

SEQ ID NO: 12546 - DNA, 699 bp, Oryza sativa
  ref <308>: DATABASE ACCESSION NUMBER: AK109894
  ref <309>: DATABASE ENTRY DATE: 2002-08-28
aaaatttagctcgccatcacgcagatcgacatggctgctgcttctctccgtctggtcgtcgtcgccgccgccgtcgcgatctccctccggggcgccgccgccacggcggtgaccgtggaggacgcgtgccggcacacgaggcacgaggcgtactgcgtgaaggcgctgtcggcgaggccggagagcagggcggcggcgttggacatgccggcgctggcggaggcggcgctgtcgatggcggcggagagcggggcggcggcgacgtcgttcgtgaggaacctggcgaagatgcccggcggcatgccgccggagtgcctggaagggtgcgtggcgaagttccaggaggcggtggcggagctgaggcggtccgaggcggcgatggaggtgcgccatgacgccgccggcgccaaggcgtgggtgacggaggccagggcggacggcgagacgtgcatggacgagtgccggatgacggagggcggcgccgccccggagatcgccgacaggatcgacgagctcgccaagctctgctccatcgccctcgccctcaccaatgcgtccatgagcaaacatccgtagcaaatcatcgtgtataacaaaaacgagatttggagggggagacctctatccaaacatttattaaaaagaaattatgagcgtgttaaagattgaacacgagatctcggaatcgggattgaaacc

SEQ ID NO: 12547 - DNA, 1562 bp, Oryza sativa
  ref <308>: DATABASE ACCESSION NUMBER: AK109895
  ref <309>: DATABASE ENTRY DATE: 2002-08-28
agctcaccttcctcctcaccgccaagatcgcaagaacgcaacaagagaggaggagattgatgtcgtcttcggctgtgattccgccgccgtcgccggagaggagggtgccgatggtggctgtgccggtggtggccgacgatggaggcggagggcatggggcgaagggggaggagagtgtgagcgggagcgtcgcgggcatttcgccgagcatcctcatcatcgccgtcatcgtcgtggtgatgctcctcgcctccgtctccatccactacttcatccgccacctgtgccgccgctcgtcggcgtcggcggccgcgtcgtcctccgcgccggtgctccccgtcgtggtgcgccccgcgtcgtcggcggccgtgggggagcaggtggtggggaaggcgtcggcggagcgcgcggcggagatggagcggctcatctcgcggctgccgctgttcacgctggcgtcgtcgctggcggcgctccccaagtcgtcgcgcgactgcgccgtgtgccagagcgcgttccgcgacgacgacgagctccgcctcctcccggcgtgccgccacgcgttccactcccgctgcgtcgacccgtggctccgcgccaacccctcctgcccgctctgccgcgcctccatcgcgctcccgcacccgcccctcccggacctcctccgcgtcgagctcggcagcgtcagcagccgccgctccaaccccaactccgccgccgccgtcgccagcgcgccgcccgagggcgccgccgtccgcgcctacccgctccccaccctccccaactccgagtacctcgtcgaggaggagctcgaggtcgtcatcaagcaacccgccgccgccgctgcgccaagaaccggcgagccaagccagcatccgctgccggcggcgcaggcggagcgtgggcagccgtcgtcggtgaccccgacggcgtcgttcagctcggcgaggtcgcaggagcggtggagcaacaggtggagcagcagatggagcagccggtggagcagcgggcggtggagcagccggtacgacgccggcacggtgacggcggccgccacggcggagtggtggtgggacatggacggcggcgcggcgcccgccgcgcggcggcgcgaggtggaggagcagggcaacgcgttccacggcttcatgcgctggctcacaggggcatactagtaatttaccactcgatcaatgcccagttcactcgctcgtcaacctcgccggcgccggcgatcgccggagaattgaattcaactgaatttgaaatgaattatgaatttctgatgcggctcggctctgcttttgggcattcgtgattaggagtaattaatagtgtctccttttctcttttttttggctgtgaattcttgtattatttttttcttgagtgcgtggatttcgagggtggaggatgcatatggtgggaaggtttttgatgccgtacggatttgaaaactgcttcttcctccgaattggagaatgtcggcgggaagattgaggaattcggggactttgaggcaaatgaactgaactgcccaataaaaaaacagaattatttcc

SEQ ID NO: 12548 - DNA, 2182 bp, Oryza sativa
  ref <308>: DATABASE ACCESSION NUMBER: AK109896
  ref <309>: DATABASE ENTRY DATE: 2002-08-28
cgccggcgaccacgagcgcgtccccgacgaggccgtcgcctccgactccggcgctcccttcccttcccttccgacgcgcgcgacgccttctccggggagaaaatatggattacctcaagacggtggttccatcacagctgatggccgagcgcggcgccaacctcgtcgtcatcaacccaggatcttcaaatgtgcgcattgggttcgcaagtcaggatgttccattcaatataccgcactgcattgctcgacatatcactcagcagaaggatgatacaccaaggctttctgtgcgagacaagatgctcaactgccatgcaactccatcgcagaatgcagagcgggagagggcatatgatattattgcatcgctgctcaaaataccctttttggatgaagacatgccttcagcgaaccaggcgttacctcctaagatgggacgtgttgatgccctttcttcacagcaaaacaaagatgatagtaaattcacatggacagatgtaatggacagaagtattaaatcatctacaccaattgaaaggccagttgacaaggatgctgacgtggatcccctgcaaagatcaactcctgacgatactgagcctaattctgaagaaaacatgtataaagaaataatatttggagaggatgctttgaaaatcccaccttctgagtcatactgtctgagtcacccgatcaggagaggccatttcaatatttctcaggattattcattacatcaggttttagaagatttgcgcactatttggaactggatattgacagaaaaattgcatataaatccaagagatcggcatctgtattctgcaattcttgttctaggagagacatttgataaccgagaaatcaaggaaatgttgtcaatcgtactttgcgatttgggttttagcacagcagtgatacatcaggaagctctagctgcagcatttggaaatggcttgtcgacatcttgtgtggtcaacattggcgcgcaagttacacaagtagtttgtgttgaggatggtgttgctttaccccacacagccctggcgcttccatacggtggagatgacatatctagatgccttctttgggttcaacgtcgtcattgcacatggccaaacttccaaactgatccagtgaacaagcctatagatatgctaatgctcaacaaactaaaagagtcatacagccagataagaagtggaagttttgatgctgtcagtgttgttcattcatatgagcatgaaaaatcagttggtcatcagaaaacaaagctatcggctctgaatgtacctcctatggggctactttatccaagggttcttgtcccagaagaataccctccacctcctcgatcttggttccaagattatgatgacatgttagaagatacatggcaaacaagtgacagtctttactcaagtgggaatggtgggttcggtatgtgggacaattatccgatgtttcccaccagattaaaaatttgataacatcggtcttgtagaagccattgttagtagtatcctttcgacaggacgtattgagcttcaaaggaagctattctgcagcattcagctggttggtggtacagcttcaacagcaggccttgcaccagttctagaacaaagggttctcaatactattccatcaaatcaaccgatagagaaagcagaggtattacagtcgaggagttatccattatttgtcccatggaaaggtggtgtgattttgggcgtacttgatattggtcgtgatgcttggatacatagagaagattgggctaaaaatggtgtccacatagggagtgggagaaaatatagggattcttattttcttcaggcacaggcaatgtgttactacaattcataacaggaacatccttgacagctttccacgactgtttagcaaaacgagttactgaaggttgaggggcagcaccggtcagcttcaagaaaatctaggtccaaacttgctgagagaagacgcatgagacaaggatgtgctcgatggtttcatcctcttgatcacatagtgggcaggttgtcaggtgcactagtccgtgtttggcaagacagtccgctagtatacagcttaaacgctaagctatataattcattttctaaacatggtatacagtgccaattttaaatcatttatcttaactaattaaaatattctt

SEQ ID NO: 12549 - DNA, 1731 bp, Oryza sativa
  ref <308>: DATABASE ACCESSION NUMBER: AK109897
  ref <309>: DATABASE ENTRY DATE: 2002-08-28
gagcgaggccggccgccggccgccgctgctcgctatgctcttcggttcggtgtatgggtggagctggcatactttgaacatgggggaatattacactatgttatccagaagcttcaactcagcatatattgaatccgcatgttcatgacacgttggaattatagagctttcaacaagacacatagtcctcaatgtgcaaacaattctcaaagcaacatagggaatggcctacagcatgtctttgtctttggaatcctggctttaggcaaacatgcctaccatctagctttattgttttactacgagattacacagatgatatgctggattgctattccagttctattcctgttctggagcctcaacattgaggtcaaaaccaaacggtgggcggctatcttcttgagcaatcggcgctgtattggagccgccaccaaggttgttcctcttccaggatcaggttcttgtcaggttgtttctccttcaagactatgctgcttcgctcgagctgtttcttctccaggatcaggcctctttcaggatgtttctcctccatcaggtgatgactcctttcaggttctttttccaggacaaggcttctctcacgctgtttctccttgaggaggatcctcttctccttatggtggccggccatgtgcccgcccagcgcctggtgtgtggagaactcctcattgcaatgcttgcacatgtagtggtgacgcttcttctccttcttcaccttcctctcttcctctctaggctccttcagcttcctcttccccttcttcctcctccgtgcttcatgttcgtcgcggacaatggcgcgggagctcccctcggctccttccaccatgtttgtggccagctggtctcctgctccagctcgttcgagcttcggtggagcttgcagttgccgttgatcccggtcgtaccgacgcctaagtgtgagcatcacacaggcagccaatttctcgtaagtggttaaagagatgccaggcgttggcattgaggaattactgtcaccaaccggtcgtagtgacgacgatgacgacggtggtggctgtggcggtgggctgccggccggtataaccggtgacgacgacgacggtgtgctcgacatcttgagaggtggggtggcacccttgtaacctctgttgggatggctccgcagatggccaaacatagatttgtcgtttttgaatcgtttgtgacatacctggcactcgacgtcgccagcagaaccaccgtcgccgtcgacatctacatcggcttcagcttcgccggcttctcctcctcgcggcacacctccatgatcaccaccagctcctcctcccggttgcggccaagctccatgatcagccagatcttcatcaccggagcagctaccatctacaagctcgtcgcgggcacgccgcgacataaggctcggatcttggaggtacacaaaaacacctccgatctgaccgacggcaagccgcaacgagttggcaccagcaacctgccagcaggcggagcaaacggcctgcaggatcaccaacgaacagagccagctacacccactcatgtatggcaaaaataaaaaaagcaaagagctaaacggaggtggaagacgatgaatctcgctgtgtgaacaggagcagattcactgggaggcgatggtggagtaaggaagctagaagcggcaaactcttcgttgggggtgaataaaaaggtgaaccgatttgtggctgc

SEQ ID NO: 12550 - DNA, 1502 bp, Oryza sativa
  ref <308>: DATABASE ACCESSION NUMBER: AK109898
  ref <309>: DATABASE ENTRY DATE: 2002-08-28
aagctaagaatctcgtcaggagaagaatatatatattgttagtgcatatgtccaattcactttcttggctccccccggcaatggcgacacagagagagagaggtagacggtggccgtgcacggtggagaagcagggcacgtgcattaccatccactcgcctgccggccgccggccgccattgccatggatggttcttcatgtgcccgtcttctccaccgagcaccaactgtctcgatcggcgtctgaaactctgaatacatgaattcccccatggccaaaaccttcctcccaggtttgcatgttgatcaattttctcctcttctgcttctccaatttcttcttcgctggagatatcgtagtagtagcattctttctcaagggaattccttctttctcaagggctgttcttgagagagtgttctctctgtgattaattcttctagccgattcaccggtttcgccgtcgttttcgccgcgaaaaaatgtacaggcgagtaggcgaccaccggaatatactggtgattaattagctgagaactgacgagcaacaggacactgttctaccgtgtgatcatactgtgattgatgcaatactgtcggttgctgctgccaagctggttctgttctctctcgcacgcaattgagcaaattatattatattttattttatttttccttgagatcgatcgattgtgatggccatgcttgccaccgtgtgctttctctgcttatcaactgcctcagtttgggagttattcttcgtccatgtcgccatcaaccagctgacagcaatgcacactgcatataatagttatgaaaggaacaattctagagctgttactatctttttatttttctcattattaattttagcctatgcaccaaaccaattctctcagaagatcgaggtaattgcaattgttaacattagtgcttatatatatctgtgtctctccagctcagttcgaatttaatgatatatatctgtgtctctccagctcagttagaatttaatgatatatatctgtgtctctccagctcagttagaatttaatgattcttgtatcaatttgagttcaatgcatgatcagtttatccaaagactaaactgataataaaggaagaagggaatacacttcagattgagagctgatctgacatcgggatcgtgcctacattgttggtttcatcagaattggatgaacgaggtcacaacattgttgtctttgttgatctgcttcaacaattttggtcttgagatcatgtgcgatggcgcaaggcgaagcagagacgcaaagcatgcaatggttacaaaagctatctatctgtatttcaactgtgcaaatgaggccatcatgggagcacagttcaaccgggccacagaagcagtagagaacttacattgagatgtgtttctattttctttctgtaagaaaaacatgtacaaatcatggagtaggtgcaattttcaatgcatggcattcattcacctgatctgatt

SEQ ID NO: 12551 - DNA, 1497 bp, Oryza sativa
  ref <308>: DATABASE ACCESSION NUMBER: AK109899
  ref <309>: DATABASE ENTRY DATE: 2002-08-28
taatcatttatctacaaattgagttgcaatctaccttgtttttgcttgtgttttatgattcatatgaagggattagccttctcagcgaggtcaaccgagcagcgcacggttgattaccaaaggagacatggtaatgcaattgcagggttcagattgtgttgattggaagccggatcgtgtgtctagtttccaccaaatcgagagttatcagcacctatcgaaagatcgagacctaggtccttagttagtatcagagcacaaattgcttgttaggtataccttctttaagattattagtttcttttatatatacctataactataaaactttcacacaaaattattgcatccattacctagaaattttgagccattgaattgttctattagattttgctttattgaattttatgttgcatgtcgtgtcgagtactagtttagttttagatttattttttttagttttgagtatttcatctcttcgtcaattcgggtttagggttcattagttaagtcgtgtgagttgtatgtcagttttggatgtagttttgcatcatgtcgattgttgttgggacttaaaaaatcgaactaaccatcgccgggtttccgtttttatggtttggagaagttttcatcgagcggttttggagttgctcggttggtaggatttcctattgtcttttgtatttcagtccctataatatttatatttacatttaagtctctatttgagatcattggcctgtttctgttgaaaaataatataaaaaagaaaaaaacgcagaaaggtgatatcagaaaacagaaaaaatatcgcaaaaaaagagaaaagagcaaaaaaaaagtaatggtattattctaattcaatatatttataatggcatgaatcaaattaatccgatctctatcccagtctccaaatcctccgagggcgtcgactctaatggctgcgccgagtctgtcacgctgccgccgctgaagacgcgatgggcgacggcgacggcgacggcgagcaagccagtactgcaggcgccgcgatggcggtttcccaggtccggcgccgtcctctgaggtcaggatggtactgcttttctgaccttgcgtgtgcctgtaactgtaatctcaatttcctgtgtttcctttgaatgcgcgtggcatgtttgtggaaatgcctctgtgggagtagcacgcagtacttacgcacgcacgcacatgtgtgcccattttgctctatgcatatccttatgcctgcatgttgtgagttgtgctgctgattaaccactgcagaattattggttttttaagttagaacaatattttggtgtgttccagcctgctgtctgttgtttgctgaccattgcatttgctgctgacccaaacaagttttaggaccaagaggttgattctgtgtggacttaattatggtaatgaaagtagctgtacataatagttgcaatgcagaacagctttgcagtctttgcactaatttcaggaagg

SEQ ID NO: 12552 - DNA, 1805 bp, Oryza sativa
  ref <308>: DATABASE ACCESSION NUMBER: AK109900
  ref <309>: DATABASE ENTRY DATE: 2002-08-28
gtgggttttccaaaccagagccgatttccttggcataagctgcagcggttccctaatgtgttttgcttggatcactatgcagaaggacatgacaaccattatgataatcaggttgctcgtgtctacgtcaaagattccagattgttttacagctttagtgagagcacaaaagaattagtacaagaaggagagttcttacaatctttctatgttcaaattgcaccatccaccgttaatattaggaagctagaggatgaagaagacaagttgaccagcatgctacaggaattagcacataagagatctccttatggtgatgtgtaccatcgttgcatagcattggaattttcagtgatgtacatggccagatctgccattcatcaaaccgcgcgtcatgtgcatatgtctacaatagataagtatcctcatggtttaaagtatcttctggaagttgccaaatcaatttatgtgataaatgattcttttgtcgactgccttactaatctgagcaacttggacgaactggaggaatgcaagcttcatttttgccatcggatgaagcatgtatttgaaacaacatatcacatgtggagagatctaccgaattcatgggactctcaacacaaaagtgcatgggcctctcgactcaaaagtgcatgggcctctcaactcaaaagcctaattcatttctacatacttgcatacacaaattcggctattgaagctatcggattcacttcactaaaccacctgcacttggaacattgcccaagactggagagcatcatgccacgcaattgtgcactaccaagactcacaactcttaacatcctattctgctaaaacatcagcacaatcttcttcaaagatcatgaaaagggagcaatcaacgttgagttcccaagccttcaaaggatgcgcctccaggagctgccactattgaagcacctctacgacggcgacgacattgtcttatctgcaccgacatggaaggagctccatgtgcgtgggtgctggagcctacagcatctcccacgcctcagtcaagaagacctaaaccaggcggtgcaggtgagcggagagagggcatggtgggagaagctcatctgggacgatgactcatcactcactcaccgtagctactacaactgcaagtttcccccgccatttgcctccttcaacgagcgtgccacagtgacgagctacctcaggtgaatcgcatccaaactcatcaatctattcacccatatatgggatcatgacttgtcaagtgacttttctcatgacgtcctcagctagctagatcatcaaccatatactcaccacaggctatcacatgtacacctagcctgattggcaatattccaccatacaaccattgtagtaccatatacctatcacataccattatactgccgatcaatccaccacatctcacaatgtgcatcaccagtttcatacatgcatgtgtcaagagaaaaggaaaaaaatgcttgcccgtgttctagtaccaatatgagttctttgccagagttgctttgttggtgtgcttatacacatcatataaatatgtctaaataaaagtttagcttccttgattatagccgaccagtctctcggtcagccatcaatgacagctaaactagtttgttctgtgtgaaattaagttttcttcctgatattattggaataatatcagtatttctatgtaacaatatcactgctttagtgtgtattgtgtttgttgtaacttgtaaaccatgtaatgtttgtgtggagcatattaatatatgaacccattagtc

SEQ ID NO: 12553 - DNA, 1714 bp, Oryza sativa
  ref <308>: DATABASE ACCESSION NUMBER: AK109901
  ref <309>: DATABASE ENTRY DATE: 2002-08-28
atcacctgccgctgccgctgaagcgaatcgccgccgccgtcctcgaatcgtcgacccggttcgtcttcctccccgcgcgcgcgatccatctattacagcctcgagtaaatttcttgatgtttgggggcggcctgggcctgcgcgtgctccgatggggattttttttagatatatccatcttgcgctgccattgcttccaatcagagaccggattgatcaatgaacaatatggaggcggcactacctgaggacttgctggccaacgtccttggccgcctcccaccgtgcagcctcgccgtgtcacgctgtgtccgcaaggactggcgtgccctcatcgacaaccgacgcctccttcgtgctgacctcctccctctccgcctcgacgctttcttcttcaagggccagatcctcacgtctcacccctacttcttctcgtcacgctctacggcacgccggatcggtggccgcctcgacttcctcgacaccttcaatgacgaagatctacagatcatggatcactgcaatggcctgctcctgttcttcgagcggctcgccaaccctgccactcgccaatggatgcacctgcctaccttcccgatgtcgccatgcgtcacgctgggcttgcgcacgggcttctgcctcgtatgatcccatggtatcgccgcaccactttgaggtgttttgtgtccctttggttcccgaaaacatcttctatagaagcagcgataatttggaccctgacagcaacagcagcgttgatcaggagtcattagaatggccgttgtcatcgcggtgcacaacacacgtcttctcgtcgaggaaatggaggtgggaggagaggtcatttgtccgccaacaaggagtggagcctgccaatgagaccattgccgacctacaatttcatccccagcaattccaacgccgtgccttatatttgaagggagaaatttatgtgcaatgcaagaacaattctcttatgagaataaccctgtcaaatgataagtaccaaatgatcaaatcgccagtagagagcaaaattgatgatggcaacggcgtccttcagttgggaaaatcagagaaaggagtctactttgtgttgcttatgaagataataatttcccccaatttcaagtttggttgctcaataaatcttcatcatgtggtggtcaggttgagtgggcgttgaaggctaacatcagccttgaagcaattatggataattttcctcttaacactgacaatagtttcagcagaccatggatcctaaactatgtgaccgaagaagcaatacgaagggcacaggaggaggaggaggaacttgaatgggactttgaaaatggtatcatccttgaaaccaaagataaggcggaagcacaccatcttaataatatttattttatagggtttcatccttacaaagagattgccttcttttgggtctcatcatcaagagtgatatcctatcatttgaatacctcaaaggttcaagagttgggcatcttattccatttacccggtatagcgcagtcatttctatacacaccgtgctggatggaactatttgaaaataacaattagctgctagctagtagttactttatcaaagttagcacgtattcatacacatttaaataaatatgttcccttttaatatatatatgtatgaacgattgtttaatttaataattcattcctagctccttgcgttgataat

SEQ ID NO: 12554 - DNA, 1517 bp, Oryza sativa
  ref <308>: DATABASE ACCESSION NUMBER: AK109902
  ref <309>: DATABASE ENTRY DATE: 2002-08-28
accttcccctgtcatctcctcctcctccaccaccacctcgccgtcgccgtcaccgcgccaccgtctcctcgatctctcactcccacagctcgctggttgcttcggcttccgctgctcggtcgcggttgattttgggggatgacgaaccacgccggcttcgccgcggacgacgcggtcaccgcggccgtgccggtgcaggcggcgcagggcgggcggcatttcccgccgttcctggcgccgtcgtccaggctcaccgactgcaagaaggcggcggcgcacgtggacctcgccggcgcgggcggggtggcgacggtgcccggatcttggccgcgccacgccaagcccgtctccggcgccgagctcgacgactggatggagaagcacccgtcggcattggcatggttcgagtccgtcgccgccgcggcgaagggcaaggagatcgtcgtgttcctcgactacgacggcaccctctcccccatcgtcgccgaccccgaccgcgccttcatgtccgacgaaatgagagaggcggtgagaggcgtggcgaagcacttcccgacggcgatcgtgagcgggaggtgcatcgacaaggtgttcgactttgtgaagctggaggagctgtactacgccgggagccatggaatggacatcaggggccccaccgcggcagcgtcggagtacaaccacaacatgaaggcaaagcagggtgatgctgttactttccagccggccgccgatttcctgcccgtcatcgaggaggtgtatcatgtgctgaaggagaggatggcgagtataaggggttcgctggtggagaacaacaagttttgcctttccgtgcactaccgctgcgtcgacgaggcggaatggggcgtgctggacggcaaggtgagggcggtgatagagggctacccggatctccgtctcagcaaggggagaaaggtgctggagatccgccctgtcatcgactgggacaaaggctccgcactccagttcctgctcaaatctctcggttatgaggggcgcaacaatgttttcccgatatacattggagatgaccgcaccgacgaggatgctttcaaggtgttgcgcaacatgggacagggcataggaatccttgtgaccaaggtcccaaaggagacagctgcatcctacactctgcgagagccatccgaggtgaaggagttcctgcgcaagttggtgaagattaagatcaacggggacaaagggctgattggcaagtagctgatccaaggcatatagctagctagctagctttttgttccttaatttgtctctttccttttggtccattagaagaagaagaagaacaacaacaagagttatatgcatggatggtaactgatcatgcatgatcgatgcatgcggtggtgaaaacccgggcttttggctttgaaggtgtctattaccgtatccttctggccaaggtcctgtaattaaattttgctgccgtgacaacagaaatctcagcaagagggacacaagtgtggccccttttcttt

SEQ ID NO: 12555 - DNA, 1553 bp, Oryza sativa
  ref <308>: DATABASE ACCESSION NUMBER: AK109903
  ref <309>: DATABASE ENTRY DATE: 2002-08-28
atcatcagtctctcagccaattatcccggtgcgcccgtcgtcccctcacgccgtcgccgtcgccggctcgccgccgccaccgccaacacaagatccggacgccattcttcgcgtgctgcttagctcctccctttccttgcctccggtttccttccctcgggtcagttagttgctcaggcgcggcgcggcgcggcgctacccggaggttgctgcgagctccgtcggcgcacgcatggcacgccgcgtccccgcccgagcacgatccgtcggcggcggccctcgctccgagggtgcgcgacccggaccaaagaccggagcagcaggcgccagcgggggtggcgccgaggacgcactccacgtgttcgacgaattgctccggcaaggcaggggcgggggcgggggcgcctcgatcatccgcagcttgaaccgcgccctcgccgccgtcgcgcgcgacagccccgcggccgccgtgtccggcttcaaccgcatggcacgatccagcgacggcgcggtgactcccaccttgcacacctatggcatcctcatcggctgctgctgccgcgcgggccgtttggacctcggtttcgcgggattgggcaatgttattaagaagggatatagagtggaacccatcatctttactcctctgctcaagagcctctgtgccgagaagaggacgagcaacgcaatgaacatagtgctccgcagaatgacagagcttggctgcgcgccgcatgtcttctcctacaacattcttctcaagggactctgtcatgagagcagaagccaagaagctctcgagctgctgcacatgatggcggatgatggaggagactgccctcctgatgtggtgtcgtacagcaccatcatcgatggcttgttcaaagagggggattcggacaaagcttacagtacataccatgaaatgctggagcgagggattttaccagatgttgtgacttacaacactattgtcgctgccttgtgcaaggctcaagctatggataaggccatggatgtacttaataggatggttaagaatggagtcatgcccgattgcatcacatataatagtattgtgcatggatattgctcttctggacagtcgaaagaagctattggaattttggaaaagatgtgcagcgatggtgttgaaccagatgctgttacttatacatctctaatggactatctctgcaagaacggaagatgcatagaagctagaaagattcttgattctatgatcaagaggggcctaaagcctaatgttattacatacagtaccttgcttcatggttatgctacgaaaggagctcttgttgagatgcgtgatctcttggatttgatggtacgaaatggtatccaacctgatcgtcatgtctttagcatactaatatgtgcatgcactaagcatcaaaatgtagatgtggccatgtttgtattcagcaaaatgaggcagcaaagattaactccggatgtagtgacctacggaacattgatagatggactttgtaagtcaggcagagtagatgatgcaatgcttaatttggagc

SEQ ID NO: 12556 - DNA, 1714 bp, Oryza sativa
  ref <308>: DATABASE ACCESSION NUMBER: AK109904
  ref <309>: DATABASE ENTRY DATE: 2002-08-28
gagcacatagcacgcgcgcactcgtctcgccgcgtccacacccatcggctccaacaccgacgagtagctcggtcgccggggccgccgccgcgcgcgcgcgccaccgtgtcgcgacttcctccgtgaccgggccgatcgatcgcgaggcgcggcgcggcgaggccggcatggcggcaccgggagatggggaagagaagaaggccgggagcgggaggaacaagcacgggttcccgcgcggcttccgcttcgtgccccgggaccaggagctcctcgacatcctcgacgacaagctccgcggcgccccgctcgaccgcgcgctcgacgccgtcttccacgacacgcggatcctcgacttccaccccgccaagctctacgggatgtacgcggaggacgaggagaacggctacatctacttcttcagcacgatagagttcaaggcagccaagcccaagcagaagaagtggccgcggcgcgcggcgcagggcggacggtggaaggccgtcctcggctccagccagatggtggaggttggcggcgtccccgtcggccggaagctctccatggagttcacgtcaagggggtcaggaccaactggggcatgcacgagttcgtcaggatcatcggccccaacatcgaggttgcggatcttgccgtgtaccgcctacacaagctatggacgaacggcgaggagaagccgggagacctcgccgcggacgttgccaagagcacgaaccagagtggacaagcgtcggcggcggactactaccagacttaccagaacgcggtctctcaggcgtatgcgtatgcgccgccgtacgtcctccagccaggatggagccaagggtacccctacgatgtcgcggcggcgccaccgaccgcgccctggcctgtctgttgggcgccgccgtccgcgccgggatcctatgactgctgctacgcgtccacgttttcaaggccgccgccgccaccaccaattgctgcgagcacgctggacaaggcgccgataaccagtaccgaccacggcgcatcaacgaacacttcggcggcgacacccgtggcgaacaacaagccgccgccgccaccagttgctgcgacagcgaccacgctgggcaagaagggggagggcaagggcaaggcgccgacgaccaccagtaccgatcacgccggatcaacgaacacctcggcgccacccgccgcgaactaccagccgccgccgacgacgactacgccgccgctgcagggcacgcagcacgtcttcgcacccggcgtcgttcgggcatgaggacgaggagggctacctcatcgtcgacgaggtcaacacgtggcgcaacacgcagcagctcgtgctcgaggatgacgacgacgacgacgacggccgtgccgccggcgccggtgcaggtgagggtggcgcttcagcctcagggcggtgacagtctgacatcagcagattaagagagaccctgaggcgtatcagttaatcatgcgtgtagttactagttaggctccgatttgagcattggaatttccagatttcccgactgcttagcttggttttgatctgcccgacaaatttccgccaaattcgtagtgttcaactgatcaacttcatgctctttctgtccgttggttattactttacttgttctacgtgagattgcaattctgatctgcaactgcttgtaatctggatgatcaatagctgcttccctgcttt

SEQ ID NO: 12557 - DNA, 1778 bp, Oryza sativa
  ref <308>: DATABASE ACCESSION NUMBER: AK109905
  ref <309>: DATABASE ENTRY DATE: 2002-08-28
gtttgcagaggcggagggtgatgatgcatggcgagcagccatgcgtgaagagatggacgcggtgaatcgcaatgggatttgggagcttgttgatctcccacatggccatcgcccaattggactcaaatgggtctataaattgaagaagaacgaggccggaaaggtggtcaagcacaaagctcgtctcgtcgccaggggatttgtccagcaacctgggattgattttgacgaggtgtttgcgcccgtcgcgcgcatggagtcaattcgtctcctgcttgcggtcgccgcccaaaaagggtggcacgtccatcacatggacgtgaagtctgcctttctcaatggagatttggcagaggaggtgtatgtgaagcagccccctggttttgtcgtcgccggagaagaagacaaggtcctccgcctgcgcaaggctctttatggcctgcggcaggcgccaagagcctggaatgcgaagcttgattgtactctgaaggagctcggtttcgaccaaagcaagcatgagcacgccatgtaccgacgaaacaatggtggctctgctctactcgtcggggtctatgtagatgaccttgtgatcaccgggccatcgacaagagcaattgaacaattcaaggaagaaatgaaggcaaagtttcagatgagtgatcttggcttgctctctttctaccttggaattgaggtgaagcaaggagatgatggaatctccctgaaccaggggcgctatgctcagcgcattgtggagtcggctggcctcaaggactgcaacccttgcgccactccaatggaagaaaggctcaagctgagccgtgatagcacggcacctcccgttgatgcaacaaaatatcgacggctggttggtagccttcgctatcttgtgcacacacggccagacctagcatttgctgttgggttcgtgagtcgcttcatggagcggccaactgaggagcacatggtggccgtgaagcgcattctacgctatgtcgctggcacgatggagtacggacttcattacaaaagggagaaagaggagcagcggctgattggttacagcgacagcgacctcgccggcgacattgatacaaggagaagcacaagtggcatgttgtttttccttggttcaagcttggtgagttggcaatccatcaagcagagagtggtggctttatcttcctgtgaagcagaatatgttgcagccaccaatgctgccacacaaggaatctggttggctcgattgctcggcgaacttcttgggaagcaacctaaagcgatcgagctaaaggtggacagcaagtctgccttggcgctggcaaagaaccctgtcttccatgagcgcagcaagcatattgatttgcgctatcacttcatcagaagctgcttggaggaaggaagcatcagcgccagcttcatcaccaccatggaccagctcgctgacattctaacgaaggcattggggcgagttcgattccatgagcttgttgcaaggattggagtggtcaagattagttcagaatagaagaacaaggattaaggggagattgttagtataatccttgttctagttagttatttggtttccttagacagtaagctataggctgcagctgttactcggttgtcagactgctgctattagtggtagtagtcaattttgattttacctctagcaggaacatagcagcagcagtattgtcggttcagcaaccgacctatccatgtactataaatatagctattgtgctaacataagtaagctttttcagctc

SEQ ID NO: 12558 - DNA, 2052 bp, Oryza sativa
  ref <308>: DATABASE ACCESSION NUMBER: AK109906
  ref <309>: DATABASE ENTRY DATE: 2002-08-28
tgctatgcatttgatgcttccatgcaagaaagagacttaccagctttcagaaggtgttaagctttgcaagaaaaagggtgaagttcccctgttatcagtggaggcattgcatcagctgcacatcttcatatttatacttggtttggtccatgttgtgttctgtgctacaacaatattacttggtggagcgaagataagaaaatggaagctttgggagacagaaatccaacaggaaatgcaacagaaattacaaaaaagagatgctacacctgggcgtattgcacataatcaacagggtgaatttgtcagtgagcgaacaaaggggttatggatgaagctggctgttgtaagctggataattgctttctttaagcagtttcatgattcttaaatcagattataaagcacttagatcagcattcggcttgaaacatttcccaagtcatccatccttcaatttctacaagtacttgattcgtgctcttgaacatgactttaagagagtagttggtatcaggttggtgttttcatagaacagttctaacctttgacttaaatttgtacatgacgttaatattagctagttgtgtgcagctggtacatgtggctttttgtcatccttttcctattgctgaatataaacggttagtctacatgtccccttgattcattggatccagtatagtggtatacagtaaatgattaaaatggcatggtatcttcttattattaccagtacatgctttatttgaacactaccattggtggcttgtgaataacatggtgtttctgcattgtatgctactatccttgtatgaattagcatgccatttgcatatcaactttaggattcagaaagtggtatcagttctcttatggagcaaggtttgtaatagttttctgtggggtgtaatgctcttcatcctttgattattgtccaatgcaggatggcatacatacttctggttagctttcttgcctctgtttctcctgcttgttgttggtgcaaagctagagcatattattacccgattagctcaagaggcagcagcagtggcatcattatcacacggaacagagagaactccttatgtaaagccatcgaaggaacatttctggtttggcagacctgaaattgtcctcaacctgatccatttcatcctgttccagaactctttcgagattggttttttcatctgggtcttggtaacattcgggttcgactcgtgcattatggagaagaaggtgtacgccatttctaggcttgttattggtgtgctcatccaaatgatctgcagctacgtcactctaccactatacgccatcgttacacatatggacggaggcatcaagctgcaagggattgggtcgggcctgcacgagtccgtcgcggggtgggccctggacgcccggaggaagaaggaggagcagcagtcgtcccacggcggcgccaccaccggcgcgacggaggggagcaattacaggagcgaccacttcggggcctcgccgcgcagcgccctggcgccgccgccaccaccttcccccgacctggtcgagatcgtctccgtcgccgccgccgacgacgacggcgacgacagccgccaccgtaggtgatgattgacgaaattatattcattgtgtcgggggcggcgatgatcgatctctgctgcatatgcgtccgtcgcatcatggattcgtacgtcagggctgtctgtaacgtcagcgtcggcgctagctgccgacgggacgcgtcgtccgccgccggccgagccggcaggaaggcaggcgcgttgtgacatgtcgtgtgagacgccacaacgcttgttggctggccggcgctggcctggcctggcttggcttggctcgtgttttctttctgtgtcgtccccggagcccacatacacactcgcgcggcaggtgttcctgatggacatgcctccgtaactccgttttgtaataagaaaataatcctgtaaagactaaagacaaggtagaagcagaatgagcctgtgtggttgtatatatgcatgtaattattatttcctccttctc

SEQ ID NO: 12559 - DNA, 1686 bp, Oryza sativa
  ref <308>: DATABASE ACCESSION NUMBER: AK109907
  ref <309>: DATABASE ENTRY DATE: 2002-08-28
acgcacgcacgtacggcgcgcgctcgcctcactgcatttctatcccggccatcggtccggccgtcacgatgcgccgccgcgtcgctctgtgcctcgtgcttttcgccttcgccggcctgcacgcggcggcggtggaggccgtgacgctgtcgacgtcgtcgcggtggatcgtggacgacgaggccggcgggcggcgggtgaagctggcgtgcgtcaactggccgtcgcacctggagccggtggtgacggaggggctcgggatgcagcccgtggacgccatctccaagaaggtggcgtcgctcgggttcaactgcgtcaggctgacgtaccccatcgcgctggccaccaacgcgtcgctgtcgtcgctcaccgtgcggcgctcgctcctcgcccacggcctcgccggcgcggtcgccggcgtcgaggccaacaaccccgggctcctcgacctcacgctgatcgagtcgttcagggccgtggtcgacagcctcggggagagcggcgtcatggtgatcctggacaaccacgtgagccggcccggctggtgctgcgccgacgacgacggcaatggcttcttcggcgaccggcacttcgaccccgacgcctgggtgcgcgggctcggcgccatggccgcgctgttcgccggcgtccccaacgtcgtcggcatgagcctccgcaacgagctgcgtgggccgaggcagaacgccgacgactggtacaggtacatgcagatgggggcggaggcggtgcacgcggcgaacccggcggcgctggtgatcatgggcgggctcgggtacgacaccgacctgtcgttcctcgccgcgaggcccgtggacgtgagcttcgcggcggcggagcgggggaagctggtgttcgagctgcactggtacagcttcgccgacgcgcgcgcctgggagtccgaggacgccaacgaggtgtgcggccgcgtggcgcggggcgtcgcgcggcggggcgggttcctgctcgacgccgggttcccgctcttcctcagcgagttcggcgccgacacacgcggcggctcgcgcaaggacgaccggtacctcccctgcgccgccgccgtcgccgccgagctcgacctcgactgggcgctctgggcgctgcaggggagctacgccctgtcgacgtggcgcctcgtgtcgggctcgacgatgcacgtggccgtcaacgcgacgacgacgacgacgccatctcgggacggcggcggcgggctgctgtgcctggacgtcggcgacgacggccggagcgtggtgacgaacccgtgcaggtgcctcgacgacgccgccgccggcgagtgcgacccagagacccagtggttcaagctcgtcaccagcacgaggtccccggccaccggcgccgccgcggcggccaccgtggcgcgagggctaattgctgcgtgaaaatcgaccgatcaatcgatcgtgtccgtgcattcgtcatcagagaatcgaaatcttatttaaaatccgcgaacacaacactatactagctgctagctgacttgcattgatcttggatggaagttagagagttcgtgtcacgcacgtggcgcgcgccaagctgcagttcatgtgtggtcgatgtatccatgtactgttactgaacagtgcgcttgagctgaaccattgaacggatcaagaactaattaaatactccctccatactggt

SEQ ID NO: 12560 - DNA, 1859 bp, Oryza sativa
  ref <308>: DATABASE ACCESSION NUMBER: AK109908
  ref <309>: DATABASE ENTRY DATE: 2002-08-28
catggtcactttctctctctctcttcccaccatatccccaattccccatagcttagaagcgcacaagactcaatgcaaaccgctctgattcctcctctctctgctcttctccctctccctagctagagcttggcttgcttcctccaaacacagctcgagatcaataggaattcataggaacaacaatacaatacatacacgcatacataggtagatcatatccccctctctagtatcctatagcttacttctttgtaacagtgcctatcctcgaacatcttgcagaggaggaagaaggaagaagaagaaggaggagttgggagagaggagcaagaaatacagccaagaatttgaggaaatagtgatagttttctatggagttcactacaagcagtaggttttctaaagaagaggaggacgaggagcaggatgaggcgggaaggcgagagatccccttcatgacggccacggccgaagccgcgcctgcgcccacgtcgtcgtcgtcgtctcctgctcatcacgcggcttccgcgtcggcgtcggcgtctgcgtcagggagcagcactccctttcgctccgacgatggcgccggggcgtctgggagcggcggcggcggcggcggcggcggagaagcggaggtggtggagaaggagcacatgttcgacaaggtggtgacgccgagcgacgttgggaagctgaaccggctggtgatcccgaagcagtacgccgagaagtacttcccgctggacgcggcggcgaacgagaagggcctcctgctcaacttcgaggaccgcgcggggaagccatggcggttccgctactcctactggaacagcagccagagctacgtgatgaccaaggggtggagccgcttcgtcaaggagaagcgcctcgacgccggggacaccgtctccttctcccgcggcatcggcgacgaggcggcgcggcaccgcctcttcatcgactggaagcgccgcgccgacacccgcgacccgctccggctgccccgcgggctgccgctcccgatgccgctcacgtcgcactacgccccgtgggggatcggcggcggagggggattcttcgtgcagccctcgccgccggccacgctctacgagcaccgcctcaggcaaggcctcgacttccgcgccttcaaccccgccgccgcgatggggaggcaggtcctcctgttcggctcggcgaggattcctccgcaagcaccactgctggcgcgcgcgccgtcgccgctgcaccaccactacacgctgcagccgagcggcgatggtgtaagggcggcgggctcaccggtggtgctcgactcggttccggtcatcgagagccccacgacggccgcgaagcgcgtgcggctgttcggcgtgaacctcgacaacccgcatgccggcggcggcggcggcgccgccgccggcgagtcgagcaatcatggcaatgcactgtcattgcagacgcccgcgtggatgaggagggatccaacactgcggctgctggaattgcctcctcaccaccaccatggcgccgagtcgtccgctgcatcgtctccgtcgtcgtcgtcttcctccaagagggacgcgcattcggccttggatctcgatctgtagcgacctaaagagagaaaaacaaaggaaagttcatcaacgattcttttttcttcttctgttttgatttggtttgttcttcttctcgcagcaacatcgatctcactttctcttgtgattccattataacctgaaatttgatgacagcattaggatttgacatttttgttttgttggccacttaattggaatctttctgttggtttgagaagatatagagaattattaggaaacttgaaagttttcccc

SEQ ID NO: 12561 - DNA, 1469 bp, Oryza sativa
  ref <308>: DATABASE ACCESSION NUMBER: AK109909
  ref <309>: DATABASE ENTRY DATE: 2002-08-28
actccactccactcttttcgctcgcgtcgcttcccaaaccctctctctcctcaaaaccctagcgtcgcccgcttcgcctgagctccggcgatggacggcggcgaccgcctcagcgcgctccccaacgacgtcctccacctcatcctcctccgcctccgctccgccgaggccgccgcgcgcaccagcgtcctggcccgccgctggcgccacgtctgggccaccctcccggagctccggttcaggatggacgtcagcctcgccgcccacgcggccccggccctccgccgcctcgaggtctccaccgacgcggacgacccggcggcgtcgacggccgcgctccggctcgccgcgccgcgcgtcgccggcgaactcagcttctgcatctggccgcggtgggacgacgcgccgggggaggatgacgggccggcgccggtgaggcgccccggcgtcgtcaagctcccctgcttcgagaaggccaccgagctctggctaatcctcggcctcctcggcgtctcgctgcccaaatccggcgtgttcgcgcagctcaccgcgctcgccttccgcgacgtccgcttcaccggccgctgcgatctcggcgccgtcgtctcctcgaagaggtgccccgtcctgcaaaagctccaagtccacgactcccaggatctgtataacctgaccatcttctcggagtccctcctccacatcgagctgagcgacctccatggcgggatggggcggctcatgatcgtggcgccgctgcttcgggttcttgatgtgcgccattgcttctactggaggacgtacaggtcccattcccttgttcgggatcaaccatatgccgcggtcttcacgcccgcgctggaggatctcatctgggttgatgcgtatgatcctaccacggtccaatttggcggcgttaaacgcctccggaagctggttacccaattacagtgtatggactctctcgctgcactgatcacatgaattcagtaatgctcttgcggcgatttgagacggtatccattcttcagctagaacttgactatccagaggtaactgcacattttccctaaatctggcatgaatgtcattgaataaaacatagagattgaaatatttgtttggtagactctagtcatagtgtgcatggacttcattcagtatataccttcataagtattgacacagctgccctggtgaaatgtgttagatatttatcttttatgtattgaaacaattgcccttggtgatgtgaaaaatagcattttggaggtcctggatctgctatcgcactggtactgaacatatgagatactgaggaacggtattgatcaaccagatttagccaaagaagactagaatttgagtagtctgtcccacaaacaggaagtgggctcagttttggttctatgcatgaatggtggaatatagagtaagacactgcagataaaaaaaaaaaaaaaaaaaaaaag

SEQ ID NO: 12562 - DNA, 1435 bp, Oryza sativa
  ref <308>: DATABASE ACCESSION NUMBER: AK109910
  ref <309>: DATABASE ENTRY DATE: 2002-08-28
atcgatctcccccgccgccgccgccttctggcttctccctccgactccgatccgccgccgccgcctccctacctccatctccatctccatgaccgcctgcgcctcctcctactcaagtccggtccggcaacaacctccttcactcataaagcccggaaactactgagacctcctctttcacatctcaaacagagttcatgggtagtacagctgcagcgggtggtaacctgcgaaccgccctctcgtactgtgtgcagcaagttcgcaactatgattatcaccactatctctgccttctccacctacctccagctatgcgcaaggctgcattcgccttccgagccttcaacattgagacggcaaaggccatggatgttgtctcggaccctaagactggccttatgcgcctcctctggtggaaagatgtagtcgacaaggtctttgcaaacaagctggttgagcaccctgttgcccaggtgctctcttctgttgtgtccgagcacaagattagcaagcattggctcaagaggtctgtggaggcaaggataaacgatgcaaaccgggatgattatgccattcctgagacaatttctgaattggagaggtatgcagaggacacccaatctaccatcctttacatgacgttgcaagctggtgggatacagtcaactatcgctgatcatgccgcctcacacataggcaaagctagtgggctgctactgctactcaaggctttgcctcaccatgtgagtaagcaagggaggataccgtatatcccagcaagtatagctgaggagtgcggtctgcttacacgggaaggtggccgatcagaggtcaggatgggagatgagctcccagatgcagttttcaaggttgcatctgttgctgatgctcacctgcagaaggcgcgggagctggcctcttctgtgccagcggaagcaatccctgtactcctcccaggggtaccagcccaggtccttctggactccttacgacgccgtgaattcaacgtctttgattcacggttgtcaaggggagttcatgggatatctcctttgtggtaccagataaagctcatctggcactcggtgcggaagaagtactgactaactcatccacacaagcacccataaagagctcgggttagttgtgtgtctttttttttaccaaaatgcaataaggttgataaacagattgaaaaactctgacttgttggttggtgcatgtatctgagcaatgtcgatgtacgttcctctctaggatacacaagtgttgttcgaattgttcgttttgtttgcgatccgtttttgcacgaagcagaggaatgtaacagggtggatgctgtttttttctttctgttgagtttgttgtgcaattgcttgccaacgagctactggctttttatgcttgctaagcattggtcatattcacctag

SEQ ID NO: 12563 - DNA, 1584 bp, Oryza sativa
  ref <308>: DATABASE ACCESSION NUMBER: AK109911
  ref <309>: DATABASE ENTRY DATE: 2002-08-28
ttgaagaaattagagtgctcaaagcaagccatcgctctggatacattagcatgggataacatcataggattccggtcctattgtgttggccttcgggatcggagtaatgattaatagggacagtcgggggcattcgtatttcatagtcagaggtgaaattcttggatttatgaaatcaaaaagttcagagtcttcagagtttcagaacactgtagctacttcagagttcagtgcagagaatcagagatggctaagcttgctgtgttgctcacattgctggctctggtgggctctgtgacatgccaaggctataccggcaatgctagcccacccacacccattacatacccaagcccgccaagcctgagcccgagcacgccgcctacttatcctccacctagctcgactcctccgagcctagcaccggtgagcccgagcccgccgacaacccatcttccaccaagcccaactcctccgagcccggctccggcaagcccaagcccgccgtccctagggcttagagttggttattacagttcctcttgcccaaaagctgagcaaattgtgaaggacaccgtcaagaatgctgtgtacaccaaccgcggcatcggcgcagggctcgtccgcctcttctttcatgactgcttcgtcgagggctgcgacgcctccgttctgctcgacccgacgacggcgaactcgcggccggagaggctcggcgtgcccaacttccccagcctccgcggcttcgaggtgatcgacgcggcgaaggcggcgctcgagagcgcgtgccccggcgtcgtctcctgcgccgacgtcgtcgccttcgccggccgcgacgccgcctacttcctcagcaacgccaacatcgacttcgccatgccggccggccgctacgacgggcgcgtctccctcgccgacgagaccctcaccaacctgccgtcgccgttcgccgggctcgaccagctcaagaagaacttcgccgacaaggggctcgacgccgacgacatggtcaccctctccggcgcgcactccatcggcgtctcccactgctcctccttctccgaccgcctcgcctccaccacctccgacatggacgccgcgctcaaggccaacctgacgcgggcgtgcaaccgcaccggcgaccccacggtggtgcaggacctcaaaacccccgacaagctggacaaccagtactaccggaacgtgctcagccgcgacgtgctcttcacgtcggacgcggcgctccggtcgtcggagacggggttcagcgtgttcctgaacgtggtcatccccggccggtgggagagcaagttcgcggcggcgatggtgaagatgggcggtattggaatcaagaccagcgccaatggcgagatcaggaagaactgccgcctcgtcaactagccgccattgatcatcggctaatgatcacagttcacgtcacagaataagctcgtgatttttgtttgtcatatattttccaccgattaaaggtttaattagttagtttaattttgccattcttttgttgtaattctgcatgtatctaatattggaatttcagcaagttttaatgagattattatt

SEQ ID NO: 12564 - DNA, 845 bp, Oryza sativa
  ref <308>: DATABASE ACCESSION NUMBER: AK109912
  ref <309>: DATABASE ENTRY DATE: 2002-08-28
aattccaaacaaagagcccaaatcattacgctgctgctgcttcttctgacgcatcataatacagagaaagaagctcattgcattctcaggttcagaaagaaggaaaagagatggcttcagctactgcctcattgctcacatgcttctttgctctcgcactcttcatgctgcacagcaacgcagcagcagcagcagcagcacccagcctataccatagccagtcatccaagacatggtgtgtcgcaaatccagcagccagcgaggatgctttgagggctaacctggagttcgcctgctcggagagcgactgcgccgccatccagggcaccggcggatgctccttccccgacgacgatggcagcctgccgacgcgggcgtcggtcaccatgaacgcttactaccaggccagggggaggaactcatggaattgcttcttcaacggcactggcctcatcaccatcactgatcccagttctggcaattgcaagtatgcctgagttgagagtttgctccaagttagccagccaatctctggagcttgacaaataaagttttcaagggatgttttgtttgtccaagtgcccctagaaaatatggtgttctatatttcagtgtcagagttgctagaattcaagtcatgtttagcctcaatgtttgggtaatctttagagaggaatgctttataccgagataatattgttccatatcttcagtgcagttcttcaaagttcaaagagtatgaatcctaggcatgtcttaattgtatttgcatagcactatatggtcctgtgctgctgtgaacgaacagtggcccaactataataaataaacatgaagttatgctc

SEQ ID NO: 12565 - DNA, 1306 bp, Oryza sativa
  ref <308>: DATABASE ACCESSION NUMBER: AK109913
  ref <309>: DATABASE ENTRY DATE: 2002-08-28
atgtgtgcgcagattggggggtggaggcggcgacgttcacgttcgtcaaccggtgcacggacacggtgtggccgggcgtgctgtcgaacgccgggagcgcgcggctggccaccacggggttcgagctcccgccgggcgtggcgcgggcggtgccggcgccggcggggtggtcggggaggatgtgggcgcgcacggggtgcgccgtcgtccaggacggcggcgcgggtgggggccggatggtgtgcgccaccggcgactgcggctcgggcggcgccgagtgcaacggcgcgggcgccgcgccgcccgcgacgctggccgagttcacgctcgacggcagcggcgggctcgacttctacgacgtcagcctcgtcgacggctacaacctgccggtgctggtggagccatcgtcctccggaggaggcggtggtggcggcgggtctctgacgtcggcggcgacgtgcggggcggcggggtgtgcggcggacctgaacgcgatgtgccccgcggagctccgggcgggcggcggcgcggcgtgccggagcgcgtgcgacgcgttcgggcggccggagttctgctgcagcggcgcgttcgcgaacccgtcgacgtgccggccgacggcgtactcgcaggtgttcaagtcggcgtgcccccgctcctacagctacgccttcgacgaccccacctccaccttcacctgctccggcggccccgactacaccctcaccttctgccccgcctcctccccaagcggcagccagaagtcgacgacggcgacgccgacgccggcggcgatgatgccggggacggggacgccgacgacgccaacgacggcgacggcgatgcctggggcgacgatgcccgggacggcgacggcgacgacgatgccggggacgacgttcacggacgccgtcccggacaccagcatgccgatgccgatgggcggcgacgccggcggcggcggcgaagagggcgtggtgctgagcggcagcgagacgtggatcgccaacatggccaccggcgagctgacggcggcggcgtccctgtcccggccgtcgcccgccgcggcgctggcgctgttcttggtccacgccctgcggctgctcgtgctccggtgatgcccggcggccatgtcggcgccattgtagtagtaacaaaaacattttagtcatgagacgatgtgttgactagtgtgagtgggggtatttttgataagctttgttgttgtactgtagggggtagtggtagactgtatcggttgtacgctgtagattgttgattaattacttgattaattaggatgttagtt

SEQ ID NO: 12566 - DNA, 1371 bp, Oryza sativa
  ref <308>: DATABASE ACCESSION NUMBER: AK109914
  ref <309>: DATABASE ENTRY DATE: 2002-08-28
ctctcagcctctcactctttcctcctctcctctttctctctctcaccgacggcgaggcacggagcgggagcggcggctgctgcgcggcgcggcgggcgggagcagcacggcagtggcgggctcggcacaggcggtggcggccttcctcgaccttccatccggcgtggcagcggcaggtctcggcaatggcgctagcctcccttcaccaacctcccatgcgggcacggcgacgacgacagcggcgggcggcggcggcaacgggcacggtgacgacgacgacagcgtctggatggcgggcgcgcagcgggctcggcaccggcggcggcggcggcctcccttccccaacctcccatccggtgcggcaacagcggggtcggcaatggcggcggcatcccttcctcgacggcggcaggcacggtgacgacgacggcggatctggacggcgggcgcccagcgatcacgaagacggcggcggatctggacggcagcggtgcctccccccccctcctcaacaccgcggcggcgtgggtggctcggctgcctcgggcggcgctgccctgggctgattcggtgccgccgccgacggcgtgcggtgggggcgacggatccggtgacggcgtgcgggggggggggggggggggtggtggcgatggatctggcggcaggggttttttttgaattttattatttttgtttgccaaatttattttttgcatgcagccagtataagggacgattttcgcaagcggttgcaccggccgtcatgcaaaaagagcgatttttgcagaccttctccgccatgccatttttgcaaaaagagcgcaagatcagtatgatcgatcctatactgtacttgggaatggcggcgaggtggcgacgtcgatcagggtgccggtgttgcacggcacgacgccagcgacgacgagcctgccgagcttcccctgcgccgaggcggccttaaacgccattggtcgtcgtggtgttgtcacgtcgacctgaagctttctgaacgtagaagagcgaagcgaatgcgatgcggtgcgcgagctagcttcagctccagctccagctcgctcgttcgttggactcgctgtcgctggcagtctgagacgggaagaggcgccacggccggctatttataggctccgtttcagttgagcttcggttatagtgctccactgttttttctttgctgtagtagtgctctactgtgagtctgtgatgtactgatactaattgccaggtgtgattttgtgatggtgaattcgccctgccttttggaattggaatcggtcaagctagctctgcgccacacgtatatttgtccctatataaaatttttgaacgaaattgcacgagattgtgcctgtt

SEQ ID NO: 12567 - DNA, 1961 bp, Oryza sativa
  ref <308>: DATABASE ACCESSION NUMBER: AK109915
  ref <309>: DATABASE ENTRY DATE: 2002-08-28
gcacctctgcatctctgccatctccttccccaccccaccgccattgccgccgcggcgatgctgccgcggtttcacggcgccatgtggatgcaggacgacggcggcggcgaccaagaacacgggcaggcggcgccgcctgggcaggagcagcaccaccacgaccagcatctcatggcgttggcggccgcggccgcgggcggcgccgggttcggcgcggcgcaggcgccggcgccgctgctcgatgaggactggtacttcgacgcggcgggtggtggtggtggtggcgcgcatgggtccatgatgctgggtttgtcgtccgtccatggcgggattggggcggggacgtctggtggtgggcatgggcagcagttctcgctgctcaacatgggcgccgcggccgcgccgttcgacgtctccgggttcgacctcgggatcgcctgcggcggcgttggcggcggcggcgacgtggtgtcgtttcttggcggcgggaacgcgtcgaacaccgcgctgctccccgtcgggaacgcggggttcctcggcacgttcggcgggttcggcaccgcggcgtcccaaacgccggagttcggcgggctcgccgggttcgacatgttcgacgcgggcgccgtgaacaccgggggcagctcctcctcctcgtcggcggcggcggcggcggcgtccgcctcggcgcacgtgagcaacaccgcgccgttctccgggcgcggcaaggcggcggtgctgcggccgctggatatcgtcccgcccgtgggcgcgcagccgacgctgttccagaagcgcgcgctccgccgcaacgccggcgaggacgacgacgacaagaagcgcaaggccgccgcgggcgcgggcgcgggcgcgctgtccgccgacggcgccgacatggtgctcgacgacggcgacgacgacggcctcagcatcgacgcgtcgggcggcctcaactacgactccgaggacgccaggggcggcgaggacagcggcgccaagaaggagtcgaacgccaacagcacggtcaccggcgacgggaaggggaagaagaaggggatgccggccaagaacctcatggcggagcgccgccgccggaagaagctcaacgaccgcctctacatgctccgctccgtcgtgcccaagatcagcaagatggacagggcttccattctcggcgacgcgattgagtacctgaaggagctgctgcagaagatcaatgatcttcagaatgagctcgagtcgtcccccgcgacgtcgtcattgcctccaacacccacaagcttccatcccctgacaccgacgctgcccacattgccgtcccgcatcaaggaagagatctgcccaagtgcattgccaagccccactggacaacagccaagggttgaggttaggctgagggaaggccgggctgtcaatatccacatgttctgtgctcggaggcccggtctactgctctctgccatgagggccgtcgaaggccttggtctcgatgtccagcaagctgtaatcagttgcttcaatggctttacgttggatatttttaaggctgagcaatgcaaggacggccctgggctgttgcctgaagaaatcaaggccgttctgatgcaatccgccgggctccataccatgatctaggacaggagagctcaatcaaactccaaaggacagagtagctcaggaattgacaaagtaccggtgtttcctggtcatgtggcattttcgacagaaggaagttcctctttttagtagttttagacctgctcagggcttgctgaaccagtttatcttctagtatttagagtccccaaaaaaaataatgtcagtagtctcttggtgctttaacattgtgttttgaaaccttctgcctgttttttttacttcccggtacatgttttcgtcttgtgtaagtctgaagatgaattcctatcaattaacaggcaaagaaacaggatcattccaagaac

SEQ ID NO: 12568 - DNA, 1444 bp, Oryza sativa
  ref <308>: DATABASE ACCESSION NUMBER: AK109916
  ref <309>: DATABASE ENTRY DATE: 2002-08-28
cttcttttcattcactcgcccgcttcacggcccctgtcaaactcgcgcgaaccatcgcatcccgtacaaggccacagagcccagcaacgccgtcgcagcctcgatcacaaggcgtctagccgatccgtgattgctaccgcttcgccagcgctttgactatggcttccacatcgcaagctgccggctcgccggtcaagccggtcaagctttccaccgccgagggcttcctctgcggtgcgctggccgccatgaccgccgtgacggtgacgaatccgatggaggtgtgcaagactcgcatgcagctgcagggcgagctcatgtcggcggcgccgcgcgtgctgagcggtcaggcgggctcggccgctcctcaggcgggcgcacaggctgccgtgggtgcacgtctgtacaagtcgtcgctcgactgtttcacaaaaaccatcaagtccgagggcctcaagggcgtgcaaagaggtatcggtgcggcgtacgtctaccaggtgctgctcaacggcagccgtctgggtttctacgagccctttcgcaaggctatcaaccgagcggcaggcaagcgtcccgaagagcagtgggcagcgggtgcgtttgcagccggtgcctcgagcggctgtgtgggtgcgatcctgggcaacccgctcttcctgatcaaggcgcgcatccaggcgtacagcccgcactttgtgatcggcaaggcatcgcacaactacaagagcaccgtggatggactggtcaagatcgtccagagcgaaggcgtgcgcgggctggtgaggggtatggacgcagcggtgctgcgaacggccatgggcagcacggtgcagctgccggcgtacaactggttcaagagctatctcaccaacatggacgtcgaagccaacgcgtacaatccgctcaagtttttggccaacaagcccaactcgttcttcacctacctggcgtcgtcgatcttcagcggactgtgcgtgtgcgccgtgatgcagccggcggatacggcgctgacgcgcatgtacaaccaacccgtgcgcgtcgacgagcgcggccgcagcgtgggcacgctctaccgcaatcccttccactgcctctacctcaccgccaaggcagagggcgtcttgggatggtacaagggcaccaccgcccacctcttccgcatcgccccgcacaccgtgctcaccctcgtcatgaacgaagcctacctgcgctggtacaccaacttcaagtccggtcgctctctgctcgatgcccccgcggtcaagaccatgtgatggtccaccctacacactctccgccgctggacctgttttcgccctgctcagctcgtcattcgcctcgtcaccattgcctgaagcgccgcacgggatggccgaaccgctcgcccacatcggcgttgcgcgtcagtagacacaatatcattataatatagatatatcggatg

SEQ ID NO: 12569 - DNA, 1072 bp, Oryza sativa
  ref <308>: DATABASE ACCESSION NUMBER: AK109917
  ref <309>: DATABASE ENTRY DATE: 2002-08-28
aaaaaccggcagcagctgagcagcatcgagcatcgcttgttcatctcatctcaagatctgtctcagattaattacccagagctagctgcatctcaccgggtaggagatttcgattggaattgcaaggaaaggtagctagctagcacttgctaagctaggcgccatggcggagcagcagcagcagcagcgcgacggcgacttcgagccggtctacgagtggctcgacgccggcgcccactatctcctccgcgtcaacgtcccagagttcaagaaggaggagttacaggtgcacgtggaccccgccggccggctgaccgtccgcggccagcacggcggcctccggctgaacaaggtgttccagctgccgccgacgtgcaacctcgacgcgatcaccggcaggctggaggccagcgtgctcgtcctcaccgtgcccaagaagccggcgacaaccgccgccgccgccgccctgccgcccaaggccaatcaggaggaggagaaggagaccaagaaggctgacgaacacgacgtcgccggcaagccgccgccgccgccgccgaagactgacagtgatcagtccgagcggaggacccagctgtcggctagagagaagaaagaggagccgcccaaggctacagcccccgcggcggcgccgccgcagccggcggcgcgagagcgtcatgatgaggaggagaaggccagggccgaacacaaggcgaggctgtcccgggaggcggacaggaggatcgaggcggcgagggcgaggctggcggcgcagcaggccgcctcgaggcccgcgccggcgccggcgccggagccggagaagacggccgcgtggtggaaggagcgcgcggcggaggaagggatgaagctggcggaggccatcgggaagaacaaggaggtggtcgccacggccgtcgccgcgttcgcactcggcgtcttcgtctccaccaaactattctcccggaacaactaattaattaatcaattcacccagtatcattctcacgtgtgtatcgatcgaaatgcatgtatacttgtactacataatatgcatgagttaaaatttccactt

SEQ ID NO: 12570 - DNA, 1464 bp, Oryza sativa
  ref <308>: DATABASE ACCESSION NUMBER: AK109918
  ref <309>: DATABASE ENTRY DATE: 2002-08-28
acgcaatcaccgctgctccttccccctccccccaccaccggcgaaacccagacccacgccgatcccttgcgcgccgccaccagggccctctccgccgctccacagcgtcgccagctgatagtcccgaggaaccccccccccccccgccccccgggtatcgtccgcggcttccaccgatccctctccccttctcgcatgcaccgcgccgccacacatccttcttagatacctagaccgagcgctcgccatcgccgtcacgccgatcctccgcctctcgtgttgccgacgccccgccattgcccgcatcgatcggcgccacacataggtgctgccttcgtggcttagtgccgcctgggagacgatatccgcgaagtacgtgatgcactgatgcacccctctgctgatgaccaccgggacaacctatgcggagctgcgtagcacgcccccctttccccaccgctgcctctttccccaacgacttcactgttttctagatctgtgacgcttggatgttgacgacgacgctgtcacgggctcacggcgctcggccatgtctgggatgtgcaagccagtttcccctgctcgatgggcgtcatgtccagggatagctgatgcggcaggacaactggttaagggaaatataaagcacctgctgcatatgaggagcaccaaaagtaatatgtagaaggccgtgtgtggaattttgctacaaacgcaagatttctgcagtggaatttggttgtgtttcttcatctactggttggatgcggaagcttatcatgcagtagccaaattgctgaaaagtagaaacattggtattcaggcgaaggtattccaactttacttttgggtagtttgtgaatatgggttcatttatgcaaaccagaagtggaagtgggactcataagatattagtgtataatctgcgatacatgtacttgaagtggaagtgaatggcataatggctttgcttaaaattagtttcaatatggcatgatacgagatgccattgtcaggacacttatttaagcatgccattgcatgatatatatatctgttcttcacatccagtacaccggcaggggaagaagagttatatgcagcccatttaatttctaagatttttgtagacagcatcagatagtactgtttgttgtttgccatggaggtgcggcagcagggcaagtaggaacacatgtatactccattccaaacttataacttcactaggccatgcaaacttggataaaataagttaagtattggatggatggaagttgcttctatctatactataaaaaacccttgtagctgattcggtgtgggttgttgcgcccctcgaaggtactcttggcagccaccgtgtattgatctgatcgtcttgatcacagacactgaaactttatagcggtgacttttttcggtggattaatttgttaaatcaaataccacatatattaaggt

SEQ ID NO: 12571 - DNA, 2529 bp, Oryza sativa
  ref <308>: DATABASE ACCESSION NUMBER: AK109919
  ref <309>: DATABASE ENTRY DATE: 2002-08-28
tcgctgtcgcgggatccgagtgcagatgcgtacggcgacaacgactggatcgtcgtggtgcaggtcaagagcagcgcggccggcagcgtgcgtcgtgtcgccctggatatcggcaggttccttaagcacctccgtccgcccgcaatggaagctgaactcgacctagacgccttcctcggtccaggtccatcggctccccgctaccatcccaccaccccgccatccccatcaacccaagcctcagcgtcggcgtcgacggccacaccccgaccaaagggaatgtcgaggatcgaacacgagctcggaaagagtctgcccgactgggcggtgcaccgcatcgcactgcaaaagaagttcccggacggatggaggccgcccaagatcctgtcgcgcgaggcacaggagggcattcggctgctgcacgcatcggatccggaccagtttgatgttgttgagctctcgcagcgcttccgcgtcggcgtcgagagcatccgccgcatcctcagatccaagtgggccatcaccggcgaggcgcgcagtcgccaagacaggcgtgctgccgaacgggcggcggagcgcgaagagtccgaactcgccgaaatcctcagattgcaagaggcggaactcgtagacgagggcgagtcgccccagattgaagaggatgaaatggctgacgagatgcccgatgatgaggagggcattcagcccgtgcggtacgagggcctggtcatgtcggcagccgatgcatccgcgttgggcgtcacgagcaggaccaaggcgggagggaagaagggcgacggcaactggtgtctcgtcgatgcagactggtgcatggtgcatgtcatgaccgaacaggcgcgcttcaactacgacattgagggcatctggcgcgagctcgaggcgggcaaacacgccaaacccaagccgtgggaacaggagaccgcacaagcaccgtcgcggccaaggaccaagcgcgacgtgttcggatcgagtctcaagaagaacaagccccaacgggcagtgggcaggtttggagacgagaggcggttgagtacgagtgcaagacgcaaggtggaggaggtgccagagtcgttggcgagggtcatggcgcgtgcgtacgagtcgttgcagagcggagaggacaaggtgcccgtgcgggtggaggggtggttgcggtcgacgcgcaagcaaaaggcgattacgtttctcgaggtgacggatggatcgttggcgggcgcgcgctcgttgcaggcggtggtacgatcgcatccggacactgcggggctcaccgtgggcacggcggtgcgtctcgtcggcgaccttaagcgcggacgcggttcgaaaccagggcaagaggtggagctggatgcacacacggtcgagatgctcgcgccatgcgaccccacgtacccgctggcgacgctgacgcacaaggtggagcaggcagcgtatgctgcgtcgctggccgaacggcgcaatccgcacctgctggggaggctgccgcggtatgcggcgatggcacgcacgcgcgaccgtgtcgaacgcggcatggcagcctacctcgccacgcgcgactttgtcaagatcgcctgccccgtcctcaccgcctccgactgcgagggcgtcggcgaagtgtttcaggtggtcgccgatgcggatgtgcgcgctcagcagccgatgcagtcgttctggtccggtaaaccggcgtacctgaccgtcagctcgcagctgcacctcgaagccgccggcctaggcttgggcagggtgtggacgctcaaccctgcctttcgcgccgagaggagtgcgaccaaccgccatctggtcgagttctggatggccgaagtcgaaatgtactttaccggcctcgacggcatcctcgacgtcaccgagggcatggtcaaggctgccatccgcagcgcgttggagggggcagaggatatggaggcgttgggggacacccagcatagggagcggttggagcaggtggtgcgggacgagtggaagaggattaccttccgcgaagcgttggacatcctctcgcgtgcaccgggggggacgtttgaggtgcagccgagcgaggaggggggactggcaagcgagcatgaaaagtacctggccgcgcagatgggcccggtgtttgtgacgcactacccgctcgcgcacaaggcgttctacatgaagcgcgccgcgccgctcgaagcgcacctggtcgagtgcttcgatctgctcatccccgagctgggtgagctcgtgggcggatcggtgcgtgaacaccgctccgacgtcctggcagacaacctgcaacagctgggtgcaagcgcagacaagttgggatggtacacggacgagctgaagaggttcggtggagcggtggaacatgcaggctttggaatgggcgtcgaaaggttgcttgcctggatcaccaacaccgccagcgtcaaggacgtcgtccccttcccgcgcacgaaaggccagctccgattctagactcccctccccgcgcctcgcaatgcaatttctcatccactc

SEQ ID NO: 12572 - DNA, 1176 bp, Oryza sativa
  ref <308>: DATABASE ACCESSION NUMBER: AK109920
  ref <309>: DATABASE ENTRY DATE: 2002-08-28
agccgcctccgccgccgcagcgtcctcgcctcctcctcctcctcctcctccaattcctcctcttcctccctccacctcgacctccgccgcccgtcccaccgacatggccggggtcaccagcaagcgccgatcctcctccgcctccacctcctcctcctccggcgacggcgccgccgtctccgaccggccgcggggggtgacccggaagcgcaggtccggcggccgttgcccccgccccgccgcctccctgaggccggccgcgccccgaccctcctctcaccacactgctggattgagagtaattctgcaaaaggaactacggtacagcgacgtaagccagctagggagaattgttctcccgaagaaagaggcagaggcttacctaccaattctgacatcaaaggatggcaagaaaagtttatgtatgcatgatttgcaaaatgcacaactctggaccttcaagtacaggtattggcccaacaacaagagcaggatgtatgtacttgagaataccggggattatgtcagaacccatgatcttcaactaggagactccattgtgatatacaaagatgatgagaataaccgatttgtcatcggagcaaagaaggcaggtgatcaacaagctgccactgtgccacaagttgacgagcatatctctaccctcttccccatttttccaattgcacaagtcgatgactatctctctcccatggcaccacaagttgatatctctgccttcgtgccacatgctgatgagaaccatgagatatttgacgggatactgaattctctgccagagataccagtagccaatgtgaggtattctgacttcttcgacccattcgatgatggtatggacatggcaaacactctgaacgccaacgccaaccagtctgctagtctgcatgtcactgatgataagtctgggcattccttgattcccaacccaaagtctgggcctcacatgtgagactgacagggaagtggtatttcataccatggtcagtttgtatgaagctcagaaaccccttccctggcgccattgttgtacatccaaataattggtgtccttattttgacgctgtatatgctaactgctacatgcagttttatgtgtaaaatattttgttcacaacccaactggaggtttaatcagatgaaacattgtaactc

SEQ ID NO: 12573 - DNA, 1352 bp, Oryza sativa
  ref <308>: DATABASE ACCESSION NUMBER: AK109921
  ref <309>: DATABASE ENTRY DATE: 2002-08-28
catatacaattgggctccctcaaaaatttccaatgatcaagttgagggagtttttgcttatatcacccatacagctggttcaaccaagtcttttctcaggaaaggcaatgaggctcaccctgctgtcggtatagctggatttgctcctcctatgtttgcaaatacctaccagaatggagatgatgacgattttctagatcaggaagaagactccccagatgagaccaaagatgaagaatatgaaagcattgaagagaatcttagggagagcgattttcctgctgactcagacagtgagaatccaggaataagtcatgaatttggaaattcagatgacccaggatcagaaaatggtgatgtttcttttccaagtgacgcacccactcttggtggttccaagttcaatgcttttgcaggaaacatgcatgatacacctggtgaagtaccagcatcatggagcacacgcccacacctattcgcttacgcaaatgataactcagatggtgatgcttttgctgattcaccaaatggaagtccatcaccatggaattctcatactttagatcgaataacagatgctgatgtttcccggatgaggaagaagtggggcagcgctcagatgcctttcgttggtcccaatgcatctcaacagccgcggaaagatgttacaaaaggatttaagaagctattgaaatttgggaggaagacacgaggtgctgatggtttaaatgattgggtatccgcttcaactgcctcggaatgtgacgatgatatggaagatggacgagatttggccatgggatcttctgatgatttcaggaagtcaagaatgggttatccttctgcatatgatggttttgttgataccgatgtttttgctgaacaagaccaatcacttcgcagctccattccaaatccccctgcaaatttcagattgagggaggatcaactcactggaagctcacttaaagcaccgcgatcgttcttctccctctcaacgtttcgtagcaaggggggtgatgcaaggctcaggtgacaatgtgacatacccttaagcaccagagctggagtatataaaatatctcccgaaattaggtaccggtatcaaattttcatggatggtacgcggacactgctagcttgtcttataaatacaatatattctgtatctatagcaattcatataagctgccagttgagcgtttcctctgttgtttgattattctttttcctatcacttgtgtagaattggacctctagatttttttttctttcttttgcggtatttgatttcaattggcccagagacactgtattcattttgttgtttttgtgatatgcttgtatcttcc

SEQ ID NO: 12574 - DNA, 1912 bp, Oryza sativa
  ref <308>: DATABASE ACCESSION NUMBER: AK109922
  ref <309>: DATABASE ENTRY DATE: 2002-08-28
gcaccgccagtgagccagcgacgccaccgcgccgcgcgccatgccgctcctcctccacccgcgcttcccctcctcccacgccgcggcctgcgcccaccgcgccgccgccgcccaccgcgacgcgcggcccgcgcttcgcctccccgagctacacgcgacgaggcggaggcggaacaacgtcgcgtgccgcgcgaccagggccagggaggcgccgccgcagcagcagaatacggcggcggcgctgtccaaggaggcgcacaagtacttcgaccacgccgtggtcaccgtccgcgcgggcgacggcggccacggcgccgtcctcgccatgccggcccccccctcgacggacgcccccaaatccccccgccgcaggtcggacaagggcaagaggagcggcgtgaagaaggtgtcgtacaagaggaactacgacgggtcggtggcgctgccgatgggcggccacggcggcgatgtggtggtgtacgccgacgaggcggaggagacgctgctccggttccacgagaaggcccgatactgcgccaagaggggaggcaacgtgggcgccaccggaaccctgagctcgcggatgcacaatggcttcgccggggagacgctcaggatacccgtgcctgtaggtactgttgtgaagcgcaagaaaggcgctgttcttgctgatttggctcatcccggtgatgaagttattgttgctaggggtggacaaggcgggataagcttgatcgatgtgcctgagtacagaaggaggaaagccatggttttatcacctaatatcatgcgtgatgttagtgacagggtgttaattcatggtcagcctggtgaggaagtaagcttggagttaatcttaagggtggttgcagacgttggtcttgtgggacttccaaatgctggaaagtcaacacttctatcagcaataacacttgcaagaccagacattgctgattatccattcactacattaatgccaaatcttggtcgtcttggtggagatcctgctctaggggcgttgcagttttcctcagaggcaacattggcagacttgccaggtctcattgagggtgctcatctgggcaagggtcttggtcgcaatttcttgagacatttaaggagaactagagtaatcgtccatgttgttgatgctgctgctgatgaccctgtggatgattataagattgttagagaagaactcaggatgtataacccccaatatctggagagaccttacgttgtggttctgaataagattgatcttcctaaggcccaagacaggctatcttcactggcttttgagatatcctcaataggctgtgaagaatgtgatggtaacaatacaagcgaagacagtttaaacggaaatacaggcgaacataatacctcatcagagactaaagttgaaggtggtgaaaaggaacttcgggactatccaagacctcaagctgttgttggtgcaagtgtactgaagcacatcggaatcgatgagatgctaaaggagattagggcagccctgagaaaatgttttgatcacaggttacctgagccatgaatggaagtcagccagcataccagaggctagtacgaagaccatagacaagttctcaagtagcagagacagatcgagctcggctcttgcaaggacaacagggttcccttggtttgcagcaatttcgacggttgatgaagcatgaaaatgaccatcagaaagtgtgatgatatgggagtttatcagtatgagaagatgctattcgttaaaaaaaattattcgttcaaaaatgtatgagaagatggtacgaaatgccagtcagcagacgcgtgtgaataggaaaggatagttctgtgtgttgttagacccttttgtgtacgatccaattggcacgtaatgaagcaagcagctttgatgcat

SEQ ID NO: 12575 - DNA, 1312 bp, Oryza sativa
  ref <308>: DATABASE ACCESSION NUMBER: AK109923
  ref <309>: DATABASE ENTRY DATE: 2002-08-28
gtgtcagagccgtgttcctcgctctcttccctttcctttttttctctctctaaaatcgcaacccacaaatccttctgatccgtttgtgtcagagccaaatcttcttcttcttctccatctctctcctctcctcttctcttctctcgttggaaggtgaggaggtgaggtgaggttgggggcgccgtttgatggacgcgaagaggacgccgccgccgccgacgccgccgaaccctaaccctagcgtaattggcagcggcgccgccgcggacggcggcggatttgggaggggggaagcggcggcggcgacgaagcacatgctggccttccacttcctgcgcgcgctgtcgcggatccaccgggcgacacccgtgacgcggcgcacgcggaccatccgccgggcggcctactcctccatggcgcgggcggcgagcccgcgccgcgcgtggagccgggcgctgctcggccaggtccgcgcgcggaggtccaggacgctgatgaggcgcgccgccgtgctggtgcggaggcgcgtcgtagccgctcctgcgccttctcccgcctccgccagaggcgtcaggattattgctgccggagagacgtcggcggcggctcgggctgttccgccgcctccgcggcagcagggcgagccgccgagggccgaagcgctccggcgcctggtccccggcggcgccggcatggagtactccagcctcctggaggagaccgccgactacctccgctcgcttcgcgcgcaggtgcagctgatgcaaggcctcgtcgacctcttctcctaccaatgatccatccatcgagtaattaacatatgcatcatatggttaattatttattcgttcgtcttgcacgcatcacatgctgctgttgctgcttctgttctacttctctacctacatcatatcgatctatctcttgttcatgtggatcgatcgatcgatgcatatgatggttggttaagataggggattattattggggtaattaaggggaggatctaggagattgggtggagtgttagtatacatgttttttgtttttgttggtaattaagattattggtaggtgatgaaaagattgttggatacatacatccatgtatagaagtataggccgaccggctgggagcacaatgaattgaatcatatataccaagaagaaggctttatagagagagagagagagaggggtaattaattgtaacatataaagagaaggatgaagttacatatactatatgatagtgaattagtgcagtgttaattgttgtcaattgtcagtaaatcgatctatatatctgcgt

SEQ ID NO: 12576 - DNA, 2609 bp, Oryza sativa
  ref <308>: DATABASE ACCESSION NUMBER: AK109924
  ref <309>: DATABASE ENTRY DATE: 2002-08-28
aaagttagcctcatcaattagctgcgtgaggaggatacagatcaatacatggcggcgggagcagccgtgcacgtcgtcaggcggccgccgctacagatcagccggtggtgtacacggtgtggaagaggtccagcataggcttccagggcaccgatggcttctccgtctacgactccgccggcaagctcgcgttccgtgtcgacaaaactactaccaccgccgcaaagctttcgccggcgacctactgcttaaggatggccacggcccacggcacgcctcttctctccctcaagccacagctcagcgtggaggagtccatcgcgcggtacatccagctagctgcacgcgccacacgtcagggacgccgtcgctgcactcgtgctcgacatgttcaccgcgcccatagtcgacgtggcgtgcgacctcggcgtgctgtcctacgtgttcatgtcgtccaccagcggccagcaccatgctcgcgctcatgctgcacctccccgtgctccacgagcgcgtcaccgtggagttcgacgaggtggacggggatgtggacgtgcctggcctgccgcgcctctgccgccagcgtccatgccgtgccgtgcccgatggtggacaagaagagccccaactacacgtggttcgtgcgcctcggcgaccgcttcatggacgccacgggcatcatcgcgaacaccgccgaggcgccgacgagctcgaaccggccgggtcccctcgccaccatcgcggacagccggtgcgtgcaggggcgaaccgcatctccgatctccccgacgacctcatccagcgcatcctccacttcgcgccggcgagggaggccgcgtccaccggcctcctctcctcccgctggcgctcgctctggcgctccaccggcgccgtcaacctcgccgtcctcgtccgccgccgcgacgacttcttctccctctgcgacgcgttcgtccgctccgcccacgccgcgctcgccgccgccgccggcggccacgtcaggaggctcaccatgcacgtggagacggagcgcctccccgtgcagctgacggccgacgcgttcctgcaccgcgacgcggaggactgggggaggaggcacgacgtggtcgccggcgtcgtgtcccacccggcggcgcgccgcgtcgaggagctccgcgtcgccgccgtcaggtccgccgacgggccgtcgtccgacagggaggtcacggagatggaagaaggggagttccacctctccctcggcggcagcggcggcacccagccgtcgacggagacgctccgcgtgctcgacctcaccgggtgcggcggcgtctccctccccgccggcgcggcgctcccgcggctgacgacgctgcggctgcggctgtgcgtcgtgcaggtcgaggacctgcagggcgtcgtcgactccgcgccggcgctcgccaccgtgcacctcgagtccgtcttcctcgccgggacgaaagaagacggctgctgcgcccgcctccgcttccccgcggccaccgcgctcgtgctggccaagtgcaggggccacgggagccaccacaacggcgacgacgacgccagcgactgcgagggcgccatggagatcgacgcgccgaggctccgatcgttcaagtacacggggctgccccggcggttctcgctcatctcgccggcggcggacatggaacgcgcggacctgcacttcctccacgacgacgggcctcaccactaccgcgacaccaccgccgtgctccgcgcgcgcttctggcgcttcctccacaacttccgcggcgtcaagtccctcaagctgaaggtgacctacctcaaggcgatcgccgtcaccggcaacggcaaaggcatcctcctcccgccgctccatggcgtcgagcgcctcgacgtcgccgcgctgcacgacccggcgagcgagacgtccacggtggccatcaccaacctgctccgctgctgccccaacctccgcgacctcgtgctccgcctcagcacggtgccgccggattccaccaagaacggcggctactgccgcgacgtcctgcggaggcgctggcaggcggacctcgacgagtcggtccaccgcctcgcccgccggcgaggctggccgaagccgccgccgccgccgccgccgacaaagatctcctgcatgaaccaaagcctggacgatgccggcggtgacatccgtggattgagcggccgatccttcgcctgcttgcgaagctcgttgacaagggttgggatccagttccggaacgacgagcgcagctggcttggcgtctcgctgatcaagttcttcgcggagaacgccatttgcctcgaggagatgcgcgtcgatggagggaacgagaggatgcgcgatcacatcaatcgtagggttgagagatggatcgttgagagtggcatgcgatgctttagagtgttaccgcttgagcggcgatgaaattaggagagatggattattgcaaacttgcaagtgactgaaattaatcaaggtcttgataagttgtgtgttgcaaataaaatgcgggtttttttttttctagcttgttatcttcagtgataaaagaatgtcgttttaaattggtgtagtacaaaatatagattttggatatacc

SEQ ID NO: 12577 - DNA, 3390 bp, Oryza sativa
  ref <308>: DATABASE ACCESSION NUMBER: AK109925
  ref <309>: DATABASE ENTRY DATE: 2002-08-28
cctccacaccacatggcagcgtaagcgagtagctccctcccccatggcgtactgcgaagccggtggccccgtcgggagatcaccgccgtcggggagcggcggcggcgggaggaggaagactctcgcggaggtgatggccacgaggacgccgcggccggcgtcgatccgcccggaggcgacgcgggccgccgaggccgccgcgcgcgaggtgctgctgcgggtggcgcccacggaggaggcggagcggcgccggcaggacgtcgtcggctacctcaggcggctcctcggcacggcgctcggctgcgaggtcattgcatttgggtcagttccactgaagagctatctcccagatggtgatgttgatataaccgtacttgggaacaccgctctggacggcgcttgcattagcgatgttcacagtatactcgagtcagaggagcaggatagtggtgcagaacttgaaataaagggtttacatttcatcgatgctgaggtaaagctaattaaatgtgttattgagaatattgttgttgacatctcgttcaaccaaattggtggggtgtccacactctgttttcttgagctggctgaccgtaaagttgggaaaaatcatctgttcaagaggagcattatgctaatcaaggcttggtgttatcatgaaagccgcatactgggagctcatcatggactattatctacttatgccttggaaacacttgttctttacatattcaatatatttcacaaatctctgcatggccccttggaggccttgtataagtttttggaatattttagcaagtttgaatgggccaagtattgcataagtttaaatggtcctgttcttttgtcatccttacccagtcctgctgttgaaccttcaagcatacaagatgaactactgtttggcaagaagactcttccggaagtttctgatggatcaaacataaatttttgcctgaagcatctaaacataatcgatccattgaagtggagtaataatctaggtagaagcgtcagcagaggaagcttttatcgcataagaggtgctttatcgtttggtgcgcaaaagcttggtcaaattctcatgttacattctgaccttattcctactgagatctttggattttttgcaaacaccttgaagagacatggaagaggagaaagatcagacgtcggtaataatgattcaatcgaatcgttgcttgatcctgaatatgcacttgggaaagatacaccagacttcacaaattccgacaggaatcaagatgaaaacaggaatccaaatctgcagacaacttcatatagatattttcatggtgatgctaaagatcatccttggaataaaatctggttaacaaattttgatattcagtattacaacatggtttcaggagctagtttaatgagccactcaacatcttccacagagaatggcaaccacaacattaaacagcgctgtagtagatcacttatggagcaacagatttatgcaagcaaccaaccacatatattgactccatctactcataaaaatactttggacgttatcaactcttgcagagctgagttaaataggagtgacctccatgaagaaaaagtaatactttctcctttctcaccatcaaatttgttggatctatcaggggatctggatttgcacttgagatgccttcagaaaattcagtaccacctggagtccatgtttgatgggttggtgcagctgattcaggaagcatttttgtctgggctgctagatgaggactccttcaagattccaaccagaagcttctcaaatagtactgatgaacggcctacagggctattgccagttgcatctgttgataccgggacaaggaacttatgtccagtttcctactttcctagcacaggagatgtttctcataaatcacacactgaggatcaagtcaatgcagtttgtcagaagaatgtggtgttgtcctcgggaacatgtattatatccaacgggtttgcatcttctccttctcctcctgctgatttagagagttatcctgtttcttggtttcataacacacaggaaattatggctcacggaactggcatgcaaactctcaaaaatgtgtcattgcttcctggaacagatgtactatcaaatgtagtcggacaacttccatttcttgcagctgattcagaggactatagcttttctcggtctcataacacaagagaaaaacgtgtgatgcgtggaactggcacattccttcccagaatgagttattatacatacaaggaacgcatattatctgaaaaaggaagaagggaaagagaaagattaccagatcgaccatggaagattaaaaccaacccaactggctaccttcaccagcacacctctcctgaagtgggatgttctggtgcaagcactgggggtattacgattgaccaatacagttcacaacaggattactcaagaagttcagttccagctgaaggaggggtttttcagaagagagcattaataaatcatgtaagcgaacaaattcagaccagcctgccatgggatgttcataacaatcaacatgggtatgtttactcggacatgaacatggttgacaaccaaaatcctggtactactagtgaaggccttgtcggacataacagtgaatcaagagagctaccgatacaccatccaccagaagttcaattcagcgaaacaatggcatcatcaccttgtatattgctgcctcattgcatcggcaatggtcaaggaaatttactccaagaatccaatacttgtcagcccttcccaccagcaacagatgtttttcactcaatcaaaacaaaacaagatgaaaatcttgaggttgaatctttcagacctatcccatttagttccccctgtgcaaagttcggagaagcattccctctgcctactagcaaggggcctgctgaaaccgaaagcagaccagatggactctaccagctgagagatgaagctgacttccctccactccagactcgttcttgctgagacttgcaatggatttaatcctagagttggaagatagaggaagcttactggctgagaaataggtgcttcaggaggaacctgatatcatatgaagtttggatgttaccgccctcagtttggagtacttctttaggtgtgttcactcccggtagaatctttagtaaaaaagaactagttcacctgcagcttatataacccaaaaaaaggaaagaaaaacaaaaatgctaaataaaaagaggattccatggaccctatcaaattttaatagaagacaaaagaagcagtgtataggtgcaacacccttttgctgtgctttatgttgatgcaccctttgcagtttgcatggtgaatttgtttaaagtaaagttttttcctgt

SEQ ID NO: 12578 - DNA, 3120 bp, Oryza sativa
  ref <308>: DATABASE ACCESSION NUMBER: AK109926
  ref <309>: DATABASE ENTRY DATE: 2002-08-28
ataagctggaacagggggcagcatccatgatgtatgcccaaccggtccggtaacaacaagaaggcgacctgacatgattcagatgcaaacaaacctcgacgtggcggataattccggcgcacgtcgtgtcatgtgcatcaaggtgctgggcggctccaagcgcaagtacgcttccgtgggcgacattatcgtcgtttccatcaaggaagctattccgcgcggccgcgtcaagaagggcgacgtgatgaaggcggttgttgtgcgtaccgccaaggacatccgccgcgccgacggcagcgtcatccgtttcgataacaacgcagctgttcttatcgacaacaagaaagagccgatcggcacccgtatcttcggaccggttcctcgcgagcttcgcggcaagaaccacatgaagatcatctcgctggctccagaagtactgtaaggagcacgagcgatgcagaagattcgtaaaggcgacaaggttgtcgtattgaccggtaaggacaagggccgtaccggcgaagtaatccaggtaatgccgaaggaagaccgtgctgttgtgcgtggcgtcaacatggtgaagcgtcaccagcgccagacccagagccaggaagccggcattatcaacaaggaagcatccttgcacatctccaacattgccatcgccgataaggatggcaagccgactcgcgttggcttcaaggttgtagaaggcaagaaggtccgtgtggccaagcgttcgggagaagtcatcgatggctgagaccaagtacgaaccgcgtctcaagacggaatacgtaaaccgtatccgcggcgccatgcaggagaagttctcctacgctaacgtcatgatgatcccgaagctggacaagatcgtgatcaacatgggtgtgggtgaggcgactgccgactccaagaagcccacggttgctgcaggcgatctggctgctattgcaggtcagaagccggtcgtaacccgcgcccgcaactcgattgctggcttcaaggttcgcgaaggcatgccaatcggtgcgaaggttactcttcgcggcgcacgcatgtacgaattccttgatcgtctggtcaacatcgcgcttccgcgcgttcgcgacttccggggcctgaacccgaagagctttgacggccgtggcaacttcgccatgggcatcaaggagcacattgtgttcccagaaatcaactacgacaaggttgatcagatgtggggcatggacatcatcgtttgcacgacggcgccgaccgacgacgaagcacgggctcttttgacagagttcaacttcccgttccgtcagtaaccgtaacgacgagcgtagaaaaggaactccgatatggcgaaaacaagcgcagttgaaaagaacaagcgccgccgcaagacagttgcctcccaggccggcaagcgtgccgccctcaaggccatcgtcatgaaccagtcccttccgatcgaagagcggttccaggcaactctgaagctcgcttcgctgccgcgtgacggctcgaagacgcgtatccgcaaccgctgcgaagtaacgggccgtccgcgcgcgttctatcgcaagctcaagatgtcgcgtatcgcgcttcgtgagctgggcaattccggcaaggtgccgggcattgtcaagtcgagctggtaaggagacgggcacatgaccatgactgatcctttgggtgatatgctcacccgcatccgcaatggtgcttcccgtcgcaagtcttcggttagcacacctgcttccagcctccgcgtacgcgttctcgacgtgctgcaggctgaaggctacatccgcggttattccaaggtcgattttgaaaacggcaagtccgaattcaccatcgagctgaagtactacgaaggtgcgtcggtgatccgtgagatcggccgcgtatccaagccgggccgccgagtttatgtctcggttaagtccattccgcaggtcgcgaacggcctcggcatcaccatcctttcgaccccgaagggtgtgatggccgatcaccaggctcgcgaacagaacgttggtggcgaggttctctgctcggtcttctaaggccgagtaaggatctccgtaacggacagacaggatagaaatatgtctcgtatcggtaaaaagcccgttcaggttcccgcaggtgtgacggccaacgttgaaggccagaagattactgccaagggtccgaagggcgaactgttcttcgtcgcaaatgacgatatccagctcaagctggaagacaacggcgtttcggtacagccgtccaacaacaccaaggaagctcgttccaagtggggcatgtcccgcacgatgatcgagaacatcttcaagggtgtgaaggatggctacgagcgcaagctcgaaatcaacggcgtcggttaccgtgccgccatgcagggcaagaacctgcagctggctctcggtttctcgcatgacgttgtctacgagccgccgcagggtatcaccatcgccgtgccgaagccgacggaaatcatcgtttccggcatcaacaagcagcaggtcggtcaggttgccgcggaaatccgcgaataccgtggtcccgagccctacaagggcaaaggcgtcaagtacgctgaagaacggatcgtccgcaaagaaggcaagaagaagtaaggaactcgcgaaatggctagcaggaaagaagcacttgcacgtcgtgcgaaccgtgtacgccgccagctcaaggcggttgctaacggtcgcccgcgcctgtcggttcatcgctcgtcgaagaacatctacgctcagatcatcgatgatgttgcaggcaagacgctcgcgtctgcctccacgctcgaagccgatctgcgctcgtcgctgaagaccggcgctgacgttgcggctgctgccgtcgttggcaagctggttgccgagcgcgctggcaaggctggcgtcaaggatgtcgtattcgaccgtggcgcattcatctatcacggccgcgttaaggccctggcagatgctgcccgcgaaggcggtctgaacttctaagactttatccacccgggcgcatgtcgcaccgggtggattttcaccgggccaaccggacttcagcaatggagccggagggcctactttcgtttgccgttcgataccg

SEQ ID NO: 12579 - DNA, 2372 bp, Oryza sativa
  ref <308>: DATABASE ACCESSION NUMBER: AK109927
  ref <309>: DATABASE ENTRY DATE: 2002-08-28
atcaatgcagtaggtgctggtgctacacacaacacggcacgaatgcgtgtgtgctagcttttcatgccgtctgtttcacctgagagaggggaggaatccgactacccacttgcaagctgtgtggagccacaagctgtgcctgcttatgtaaactctgttttctaagggcctgctggcttagcacaagcatggccagcgaaaaatggtgaaagtttctgctgggtgtccagtctgcagagcaaatcgctgtgctttcttgtgccctacttgcgttaataaggtcttcaacgatgagaggcagcccattgatgagcttcgagggcagcgacagtcgctcctggagagcctggttcagcagctgggcaaaaaggcactactacagcagcagcaggtacgcagatggcagctgcagcagcagctgaaggaagcccaagccaaggctcaacgtgccaaggatgcattggcgaatgcccagcagcagctgagccaggtgacagcttccaacagcagcaggcagcactcgctgcagcagctcaaccagcacacagcagcagcgcggacagaggtgcttggcaacacactgccaacagtgctgcgctaccagagcctcacgctaagccacgcttgcgctatgctggcgcgggagcagcgcaccaggatcagggagctcacagagatctttccgttgagggtgaatgcgctgcgggaccgagggggcggcccaatacaaattaccatatgcaacatacggctgcctgagagtggcacgacaccgccaggtggctggccagaggtgcagtccaccagtgccgctttgggctacctgctgctgtttgtggaccaagtggcgctcattatgggtgggcccatgctgcacgagtcagcccaccaggccagcaccagcagcatctggcagccaagcagcttctgggacaggcagccgcccagcccagctgccatgctgccgctgcatgttatgacagcgggtccaggagcaggtggtgctgctggccaggcagcatacaactttgctaccagcaggtacctctccagtgcaaacttctggagcggcctgcctcgctcggacagctccggcacttccagcggcaacgcagccagccttgcagctggaacagcagcagcggctgcagcggcggcgtatgcaggcgctgcctatgcagcatcagcaattggccgtgccacaggcatggagggcaccgccccagtcggcccagggggctacctgagcagcggcagtctagtggcaatagcagcaggtggtgcgcaacaggtgcttcctggcggtgcaaccaccagcggcagcagtggcagcagcggcagcggtcctgccggtggtgggcggggcagcaggaaggagggcgacttcaaggcagcctttgacctgttgcagcgcagcctggcgtgcttcttgcgagacaaggcagccaagaacggcatgcagttgcctgcagcatggaaccctgtcgcgtggctggccgtgtacacagcagtagtgaagcgggacaggcagcaggacggcaagctcgtggccgcaagcaacagggcagatgcagttgcggctgcgtcagcagctgggctagaccctggtggggacagtgaacctggcgtggcatcactcagtgctgctgctgcaggtctgcaaggagggcctgctgctggtgctgctgggcagggctggcaaggccaggaggatgatgacgaggatgaggaggatgagggctggggagtggtgcaggcgccatacctgccacccccaccctcacagccagatgcagtggagcactgggcccgagccatgtttgctgacggcaatgcgctgagcagcgggcaggcacagagcggcggttatggcctgggcctgggcttagcaatgccgcgaggctatggctatggcgggcaagtggggttaggtgcaggcaggttaggtttaggtgcagcggcgcttggcagcagcccgtcgtccactgcagggggcatgctgccaatggagcggatcaggagcttgtttggccgcagcgagtgatgatggctgtacaggagtgtggcgtgtggtgtacattatgcgcgtgtagatgctgcataggcatctgtgtattatagcagagcattcagagccccgactgctctgtcctggcttgacagcacttgcagtactgcactttttgtaccttcttgtaccgcacctgttgtgcagtctcttagcctacactgctgtttgtttttgaattgagtgtgctttcgaatatgcacatcggttggcagtaccatattctggccataggggatcttgcccgaatgtggcgcccaattggcttgaacgttatgtctactgctttaaaattgatctagcc

SEQ ID NO: 12580 - DNA, 3355 bp, Oryza sativa
  ref <308>: DATABASE ACCESSION NUMBER: AK109928
  ref <309>: DATABASE ENTRY DATE: 2002-08-28
gtgcaagcatgaagcttagcaagctcaagctggatcggatcatctgatgtgaattctctctcacaccaattcaccatggatggatgcccatgaccatccttagctccaggaagaagaagaagaagtgaacagtagctatagccatgggaagcagaggaggagctttacctgttgctgtactggtgctgttgctactgctggtgctcaagaacggcgccgcccagtcgcggtgcagctccggcgacctcgccgcgctgcgtggcttctcggccggtctcgacggcggcgtcgacgggtggccggcgggggtcggcaacgcgtcgtcgtcgtcggcatcggacggtggcgactgctgcgcgtggcgcggcgtggcgtgcgacgaggcgggggaggtcgtcggcgtggtcctgcccaacgcgacgctccggggagtggtggccaagtcgctcgccggcctcgccgcgctccgggtgttgaacctgtcgagtaacgcgctccgtggcgcgctcccggcggggctcctccggctgcgggcgctccaggtgctcgacgtcagcgtcaacgcgctggagggggcggtggcggcggcggccgtcgtcgacctcccggcgatgcgcgagttcaatgtctcgtacaacgcgttcaacggcagccaccccgtctcgccggcgccggcaggctcacgtcgtacgacgtctccgggaacagcttcgccggccacgtcgacgccgccgccctgtgcggcgcgtcgccggggttgcggacactacggctctcgatgaacggcttctccggcgatttccccgtggggttcgggcaatgccggtcgctcgtggagctctcgctcgacggcaacgccatcgccggggctctccccgacgacgtgttcggcctgacgtcgctgcaggtcctcagcctccacaccaactcgctctccggccacctgccgcccagcctgcgcaacctcagcagcctcgtccgcctcgacgtctccttcaacaacttcaccggcgacctccccgatgtgttcgacgcggtccccggtctccaggagctctcggcgccgtccaacctgctcaccggcgtactccccgccacgctgtcgcgatgctcccgcctccgcatcctcaacctgcggaacaactcgctcgccggagacatcggcctcgacttccgcgccctccagagcctcgtgtacctcgacctcggcgtcaaccgcttcacggggccaatcccggcgagcctcccggagtgcagggccatgacggcgctaaacctcggccggaacaacctcaccggcgagataccggcgacgttcgccgcgttcacgtcgctgtccttcctctccctcaccgggaacagcttctccaacgactcgtcggcgctgcggactctgcagggtttacccaacctgacgagcctggtgctcactaagaacttccacggcggcgaggcgatgccgaccgacatcgccgggttcgccggcatcgaggtgctcgtcatcgccaacggcgagctgcatggcgccataccggcgtggctcgcaggcctcagcaagctcaaggtgctcgacctgtcgtggaaccacctcgccggcccgatcccgccatggctcggcgagctcgaccgcctcttccacctcgacgtatcgaacaactccctccacggcgagatacctctcaagctggcgtggatgccggcgctcatggccggcggcgatggcagcgacgaggcgcacgtgcagaacttccccttcttcatacgccccaactcgtcggcgagggggaggcagtacaaccaggtgagccggttcccgccgtcgctggtgctggcgcggaacaacctcaccggcggcgtcccggcggcgctcggggcgttgaccagggtgcacgtcgttgacctgagctggaacgcgctgtcggggccgatcccgccggagctgtcgggcatgtcgagcgtcgagtcgctcgacgtgtcgcacaacgcgctctccggcgccatcccgccgtcgctggcgcggctcagcttcctctcccacttcgacgtcgcgtacaacaacctctccggcgaggtccccgtcggcgggcagttctccacgttctcccgcgccgacttcgacggcaaccccttgctctgcggcatccacgcggcgcggtgcgcgccgcaggccgtggacggcggcgacggcggcgggcgcaaggaccggagcgccaatgccggcgtcgtggcggcgataatcgtcggcacggtgctgctgctcgcggtggccgcggtcgcgacgtggcgggcgtggtcgaggtggcaggaggacaacgccagggtggcggccgacgacgagagcggcagcctcgagtcggcggcgaggtcaacgctggtgctcctcttcgccaacgacgacgacaatggcaatggcgacgacggcgagaggacgatgacgctggacgacgtgctgaaggcgacgggcaacttcgacgagacccgcatcgtggggtgcggcgggttcgggatggtgtaccgcgcgactctcgccgacgggcgggaggtggcggtgaagcggctctccggcgacttctggcagatggagcgcgagttccgcgccgaggtggagaccctctcccgcgtccgccaccgcaacctcgtcacgctgcagggctactgccgcgtcggcaaggaccgcctcctcatctacccctacatggagaacggcagcctcgaccactggctgcacgagcgcgccgatgtcgagggcggcggcgcgccgccatggccggcgcggctgagcatcgcgcgcggcgcggcgcgcgggctggcgcacctgcacgcgacgtcggagccgcgcgtcctccaccgcgacatcaagtcgagcaacatcctcctcgacgcccgcctggagccgcgcctcgccgacttcggcctcgcgcggctggtgcgcgcgcacgacgacacgcacgtcaccaccgacctcgtcggcacgctgggctacatcccgccggagtacggccactcgtcggtggccacctaccgcggcgacgtctacagcctcggcgtcgtgctgctcgagctggtgaccgggcggcggcccgtcgacatggcgaggcccgccggcggcggccgcgacgtgacgtcgtgggcgctccgcatgcggcgggaggcgcggggcgacgaggtggtcgacgccagcgtcggcgcgaggcggcaccgcgacgaggcctgcagggtgctcgacgtcgcgtgcgcctgcgtcagcgacaaccccaagtcacggccgacggcgcagcagctggtggagtggctggacgccatcgccgccgccgccgccgactgacacgaagcagcacggcgttagtatatgaac

SEQ ID NO: 12581 - DNA, 1407 bp, Oryza sativa
  ref <308>: DATABASE ACCESSION NUMBER: AK109929
  ref <309>: DATABASE ENTRY DATE: 2002-08-28
cacacaatcttgtgtatccgcaaaaccacaatcaacttcgcaaacctaagcaccactactactcttctgcttccccattcctccctccctttcgatctgttcgtcctcctagctctagctagcctctttggtcaggttatagattacatagcaccatgaattattctcctcccggttggctcgatcgattcagctagctgagcttctcgatcgatcaaccgatcttggttgcttcttcttcgatcctttcactccgtgtagttcttgatttgaaggatcgacgacgaactccctgtggcttcttgttcgccgggttcagccgcatccatgtcgatcacggaggctagcctccacttctgctacctccactcgctctccgtcgtgttcctctacttcttctacgtgatttcctgattcgcctcatccgcttcctctccaaacctgatcaaacaaagcttcgtgcacgatccatcttcgttgaaactaaggaccaaaaactgaagctttgtttgatccaaaaaaaatatatattctactaaatgtgttctagcttgttcctttcctagtatcgccttgttcctgcacgcgattgcccaacttggagcacgaaatatttctgcctagtacgtgttcgatcggtgttccacggtgagtgttagtttctctttgtgctctgtgatacattcaagatgtcagttgcgccggcgacggaagggtccgcacgccgctcggcggcggcggcggcggcggaggaggaggagcggcagcgcaaccggaagaggtcgaaccggctgtcggcgcagaggtcccgcataaagaagcagcagtacgtggacgggctggccgtggaggcggagcagctccggcgggagaacgacgccatgcgcgccggcgccggcgccgtgctgcagcggtgccgcctggtcgagcaggagaaccgggtgctcgccgcgcacgcgcgcgagctgtgcagcgcgctccagctccgcgcctcgcagctccgcctgctcggggaggtggcaggcgtgcccctcgacgtgcccgacgtcgccgaccacctcgtgcagctctacggcggcgacctggggatgacgccgctctcgccaccgccgctgctgccgccgctgccgccacagatcgagatgctgtacttccagccagactcggtcatggatccggtcagtatgctgcagggctacgaaaacatatgaaactctacattgtgtacttgacttatgattgttgccacatgcgtgtcttcggtttgtatggtgtgatctagctactgtacgttaatactgttgttgattttacgatccatattcctgttttgattgtgtagtaaaaagtatagcttgttgcgaggtacaagagtggagaaataaataaagtgtgtgaacattgtat

SEQ ID NO: 12582 - DNA, 2719 bp, Oryza sativa
  ref <308>: DATABASE ACCESSION NUMBER: AK109930
  ref <309>: DATABASE ENTRY DATE: 2002-08-28
caaagagatttacaaattcttttgccccgtctgcatggagtacttccgcgtgatccataagaccgcgtgctgcagcaacagcatctgcgagccgtgcgctctcaagcacctgaccgtgaaactgaaactgacatcgccgcacccgacgatgccgtcgggccagcgctttccgtctgtggagtgtccgatgtgcaacgtgaagggcgtgacgtttctgtttgttcacccgaacgagagcgcgcgcgcatatcaggagtcgccgcacaccaaagagctgttggccgcggcagagcgcagggccagcggcggcgccggcggcgtagggctggcctttgcggggcgaccggtcatcgaagcggacgcgtctttcgatggactgaaacgcaaaatcctgtcatttgatgacgccgccacaggcgctggacccaccaccggcgctggtggcggcagcagcggcagcggctccggcgcatcgcaggcgcaggcgcagcgcgagaactcgatatcgcgttcggcgcaggcgaaccctccgccggcgctgacgaacgcaccgcccgttgcgctgcccccgaaacacccgaccaaacgctcacaacacggcactctgtcgacgccgtcgatgggagcgcacgcactggccgctggtgccggtgccggtgccggtggtgcggctgtgaccggctcacccgtgccgtctcccggaacactggtgccggccggtgtggcgggcagcgtcgtgttcgtcgactccaaacacccgtcccccaacccatcgcccaaccccaatgcggcaggcgctgcaggtgctgcggcgatggcagcggagttcccgttcagccgccgaccggtgggcagcagcggcagcggcggtggcagtggcggcagcggcagcagcggcggcgctatcgtcgatttgacggcgagtccgaagcgcgatatgatcgatgcgctgccgcgtgtgcccgccgtacccgcatcgcccggtggcgtcggtgccgccgcggaacggcatgagaaagaggcacacgcgcacgcgcacgcccatccgctgccgggctttgtggcgcgcgatttgccgtcgcacctgacgccgtccacgcccgtgcgcacacccgccgacgacgcagaggacgaacgcaaagtgcagctgtggattgagatgaaccgtcggccgcagccgcagccgcagccgcagccgcccatcagccccggcgcgtccggcttcgcagcggctatcgcagcggccggttcggcgtcgccatcggactcgaaacgctctgcgcactcagcagccgcgggatctccacctccggccgatcaggtgctgtcagtgctgctgccgctcgcgccgccgattggcagcagcagcggcgccggcagcagcaacggcagcggcacagggccgcaccaccgctccgacgactctgattcgcacaaaattgaactcattaacgtgtttgcgcacccgcagggccagtcgtctgccgcaccaccgcctgcgccgcagcccgaaccgctcccgacaccggcaaagcccggcgcatcgtccgctgctgcaccgctgtcaccgaccggtctgacgctcgcggcagcagcgaacggcacggctgccgcgccgcggcccgtcgccatcatcgcagtgacgcccgtgcgcgccgctgcacccgcatcgccgcccgccgcgccggtgccgttcaacatctccatcaccgccaccagcgccgggccctccagcgccgcggcggcagccggtacgcacgccaacgcggcggccggtgcgccgccatcgtcggcagcggcagcgacagcggctcacggcggcagcggcgcgacaaacagcagcgccgccggtccatcgcccggtggtggcagcagcccgtacgccgtatcgcgtacggcgacggcgtcgcagatcgggtcgggcgtgagcacgcccacgcccagcggttctcacgtcacggagctgtcgcgactgcacgccggtccgtcgcccgccgccgggccgtcacctgccgccgggccatcgacgctgcaccccgctggcggcgcgccgggtggtacggcgtccgctgccggtgcaccggcactgccgccgcgtgcgacgtccatctcatcgcttgtgctgtcacccgacacgtcgccacggcccagcaacaacgggcagcagttaccgccccatccggagaccgaacccgccaccgcactccctgcatcggcgtcggtgacggcgttggcgtcggcatccgcagcgcagcgcagcgccgcgccgtcaccgccggctgccgctgctgctgccgctgccgctgtcggcgcaggtgcgggtgcgggtgcgggcactgccggtgcggacagcggcggcagtctgctgcgggtgctacagcccggcgcgccgccgctgcttatggcgggactgccttcgcccagcgctcacgcgcacaacctgctcgccagccctatggccgtgtcgccgcttagcaccgtgtccgccagcggtgtacacgggctcgtgtcgccgtcctccaactccgcgttcagcgtgctgttgcacagcggcacgcatctgcagcaccagcagcagcaggctgcagcggcctctgatgacgcgtcggcgtccgcgacggcgcggtaacccaatcggagcagccgctcgatcgcgaaacgctcactgtcctcttttgttctcgcgtgtgcttcttcctttggcatatccgtgtcgcgt

SEQ ID NO: 12583 - DNA, 1934 bp, Oryza sativa
  ref <308>: DATABASE ACCESSION NUMBER: AK109931
  ref <309>: DATABASE ENTRY DATE: 2002-08-28
atcattagcaggagagccgagcgagagcgtgcgagcagagcaaagcctgggaagggaagcacagaagaagaggggctagcctgctcaacttaaagctctcatttgctgacaagacactgacctcttcggcgaatttcgtatatcgtcatggacgccggagacgccatggagagcggacagcgcgcggcgctcctgcccgagagtcacggaccaaagactgaagatgatagcctgcaagtgccactcctcaaggataagaaacgcggcggcagcaaggcacctgcaatagttctagggttcgaatgcctggagagcacggcgttcaatggcatctcgacgaacctggtggtgtacctggagaccgtcctccatggcagcaacctggccagcgcgtccaacgtcacgacgtggtacggcacgagctacctcaccccgatcttcggcgccatcgtcgccgacacgttcctcggcaactacaacaccatcctcatctccctcgccgtctacctcctcgggatgatgctggtcacgttctcggcgttcctgccggccacggcggcgctgtgcgcggcgggcgcgacgtgcggcaccggcgcggccgcggcgcagaccgtcgcgttcgtcgggctgtacctcgtggctgtcgggagcggcggggtgcggtcgtcgctgctgccgttcggcgccgagcagttcgacgacgacagcgcggcgggtagggagcgcaaggcggccttcttcagctggttctacctctgcgtcgacttcggcctgatcgtctccggcgtgctcctcgtctggatccagcagaacgtcagctggggcctcggcttcggcatcgccaccgcgtgcatcgcggtcgcgttcgccgcgttcgtgctcgccacgcccatgtacaagcgccggttgccgacgggcacgccgctcaagagcctcgcccaggtcgtcgtcgccgccttcaggaaggtcggcatgaggctccccgccgacgccgagctcctgtacgaggtcagcgacaaggtcgactcccagcccaagatcgcgcacaccagcgagttcacgtttcttgacaaggcggccgtcgtctcggagtcggacctggaggagaggccggaggcggcgagctcgtggaagctctgcaccgtgacgcaggtggaggagctcaagatccttctgcgtctgctccccatctgggcgaccagcatcatcgtgtccgcggcatactcgcagatgagcaccaccttcatccagcaaggcagcgccatggacatgcacatcttctcggtgccggtgccggcggcgtcgttaagctccttccaggttctctgcgtcctgacatgggtgatcctctacagcaaggtgatcgtgccggcgctgaggggcttctcctcctccggagccgccggcgagccgtcgcagctgcagcgcatgggcgccgggcgcctcctcatggcgctcgccatggcggtggccgcgctcgtggagacgaagcggctcaacgccgcggcgagcggcgaggcgatcaacatcgcgtggcagatgccgcagtacttcttcctcgccggcgcggaggtgttctgctacatcgcgcagctggagttcttcttcggcgaggcgccggacaccatgaagagcacgtgcacgtcgctggcgctgctcaccatcgcgctcgggagctacctgagctcgctcatctacgccgtcgtggaggcgttcacggcgacggcgggcggccacgggtggatctccgacgacctcaaccagggccacctcgactacttcttctggatgctggcggccatgtgcacgctcaacttcgtcgtgtacagcgggttcgccaagaactacaagctcaagaccgtgctctcgtgagacgtcattgttagctttgcagctgcttgtcgaacacaagaaagattcgattacatttttgc

SEQ ID NO: 12584 - DNA, 1044 bp, Oryza sativa
  ref <308>: DATABASE ACCESSION NUMBER: AK109932
  ref <309>: DATABASE ENTRY DATE: 2002-08-28
ggactctctctcacagggcggcgcggaagaaccaagccctgggcgggcacccaagcgccgtgaagaagtgctggagcacagtcagcggcggcggcgcaacaccggtgcgacggcatagcacggtgaagctggcgaggaggcgccacgcgctcggcgtgagctagctcggtgcgagcccgaagtaggcgagcacccggagacgggggcgcgcacgccgggaggtcgacggcgtggagcgcggtgaagccgcgcgggaggcaagccgtgatggagaggcaggcggcgactggaggcagaggcacctcgtcttccccgcgccaccgcacaccacccgtccacgccaatcgtccgcccgcccatcgcctgtccccgcaccgccgcccaccgcctgtccccgcgccgctgcccaccgctcgcctcgcgccgtcgccatcgctcgtccccgtgccgccgcccaccacctgtccccgcgctctcgcacaccgcctgtccgtgctgaccatccgcctgtccccgcgccccctcaccaccgccgcccaccgcctgttcccgcgccgcccgtcagcgccgaccatccgcccgcctcgacacgcctccccgagcgagctccggctgcctcctgctctgggagatgagggtggcggcggcggccggatttggggaaccggctcacctccgcctccgcccccagccacgcgagctcgctccgcccacctccgccattggccgccagagtgcgctggggggggccctcaaattcgcgtgattcaacttttttaacacccaattcacatgccctctataatatgtcattagccggggaccctcaaattcgcgtgcttcaacttttttaacacccaattcacatgcctctatgatatatcattaggactgctaattagtctatttggtaccaatttttctatgttttctgtatttctcttttcttagttctatttgtatatttttcaaagtttgtggacgtttttgcccatgggcccacctgtcagatcaaagagagaaatatatgtctggttctggatc

SEQ ID NO: 12585 - DNA, 1110 bp, Oryza sativa
  ref <308>: DATABASE ACCESSION NUMBER: AK109933
  ref <309>: DATABASE ENTRY DATE: 2002-08-28
cccgctcactcttgctacctccgcgcgcgccttgtgttcgacccacgtcaacccaacccaacccagcctctcgccgcggcgcgcgcgcgacgtcgcgccatgggcaacgctctcaccggcaagcggcgcgtggcgaaggtgatgacggtggacggcgccacgttccggtacagggcgccggcgacggcgggcgcggcgctgcgcgggcacccggccgggcaccagctgctcgagtcggaggaggtccgtcgcctcggcgtgcgcgccaggccgctcgaccgcgacgcgccgctcaagcccggcaagctctacttcctcgtccagctcccccgcggcgccgccggctatggcggcgacgacgacccgcgggcgccgcgcaagacgtggtcgggggcgctccacgtgggcgcgagggagcggctggagagcctgatgctgtcgcggcgcaccgtgtcggacatggcgtcggtggtgccggcggcgagggcggtggccggcggcggcggcgagccggcgcggaggccgtcgtccgtggaggtgggggtggacggcgcggtgcggctgcggatgcggctgcccaagtcggaggtggcgcgcctgatgaaggacagcaaggacgccgccgaggccgccgagaggatcatgcagctgtgcgtcgccagggaccagggcggcgccggcgccggcgccgccgtcacgctcgctgcctccggcccggtgtcggcgatgtcggggaggaagacgtcggccatgaagaaagaggtaggcatcttcttcctctcgttactacccttacccatgctcacgtcactagagctgccacgtgacgtcattctctagtactaccattggcccatcaacttggtgtttagtttgcaatttgcatgtgctctaccctctcaattaggcttagctgacaaggatgcctcacagtacatacgcaattataattaataccaagctagacgatctatatttatacgatgagaaatacagcaccaaggttaaattttttttatgtcgtattttatgtattatattcggggcctaattaatacagaaactgcaaatcttgaagcaataagaaaaaaataaagaaaaagattatcc

SEQ ID NO: 12586 - DNA, 1937 bp, Oryza sativa
  ref <308>: DATABASE ACCESSION NUMBER: AK109934
  ref <309>: DATABASE ENTRY DATE: 2002-08-28
gatttgcagattaattccgatcgaaattaaagttgcatcgtctctgcaaactctgcagctacgtgttatctcctcctctcttagcttctcctaattttttcgctagtttcgtttcacttcagacttcagagcagttgcaccgtgcacatgcatgacgcatgagccgatgagcagaagcagccccagcttcttcaggcgggacgccgccggcaacgaggagagggcggcgctgacgacgccgccgccgctgccggcggaggacgacatgggcggcgctccggccggacggcggcggtggccgtcgtcggtgatgaggatgaagggcgtcggttccgtcatggtcggcgtcgtcttcctcgcgttgctcatcctcgtacacagatgggtcggcctcgacgcttcgtttctacgtgacagcagcatggtgaggaccagcacgcgacaatggcatccccaccacaacatctccacgccgccgctgatgacactgccgcccttctcctgcggcaacggcacggcggcgccggcgacgtgccccgcgacgccgccatcgccgccgccgacgtcgaagcccgccaccggcggcgagccagcggcgtcgtgcccggactacttccggtacatccacgacgacctccggccgtggcgcggcgccgggatcacgcgcgaggcggtggagcgcggccggcgccacgcctacttccggctggtggtggtgtccggccgcgcctacgtggagacgtaccggcgctcgtaccagacgcgcgacgcgttcacacagtggggcgtcgcgcagctgctgcgccgctacgccggccgcgtccccgacgtggacatcatgttcgcctgcgacgaccggggccgggtgcgcgccgccgacttcgccgcggcgccggcggacgcgccgccggtgttccggtactgcagggacgcgacgacgctggacgtcgtgttcccggactggtcgttctgggggtggccggaggtgaacatcggcgcgtggccggcgacgctggaggcggtgcgccgcgagagcgcgcgcgtgcggtggccggagcgcgagccgttcgcgttctggaagggcaaccccggcgtcgcgcgcatccgcggcgagctcatgaagtgcaacccggcgtccgatggcaaagactggaacgctcgtctctttagccaggattggaatcatgccatacataacggcttcaaagattctagcataccgaagcaatgcttacacaggtacaagatatacatagagggggaagcatggtcggtgagcgagaagtacatcatggcatgcgactcgccggtgctgttcgtcaacaccccgtaccaggacatcctctcccggggactcgtcgccggcgagcactactggccgatcaaccggacccggatgtgcgagtccatcagggccgccgtcgactggggcaacgcccacccggcggcggcgcgccgcatcggcgagcaggggagccggttcgtgcgggagcagatggccatggactacgtctacgactacatgttccacctcattaccgagtacgccaagctgctccggtacaagcctaccgtgccggcgaacgcagttgagatctgtgccgagagcatggcgtgcgccgccgcggcggggagggagagggagtgcatggatgagtccgtggaggggttcgtcgccgggtttgatccgtgctcgctgccgccgccgttcacggaggaggagaagagggagatcgccgctaaggaggaggaggtgctgaggaaggtggcgaagttggaggaggagaacatgtagcaaagcgaatggaaaatgatactggatttttaaaagatgattattcacaatgtaagactttctaacattgttcattattcatatggatgttaatgaacgtgtgcaatgcagtcttacagtgtgaacggaggaaataaagttt

SEQ ID NO: 12587 - DNA, 2053 bp, Oryza sativa
  ref <308>: DATABASE ACCESSION NUMBER: AK109935
  ref <309>: DATABASE ENTRY DATE: 2002-08-28
ccggaggggggcgggggagcgcggagcctgagccggtgctcgtcgacgtcgtcgcggatacggaagaagttcgcgtggctgcgctcgccgtccccctcgccgtcgccgcgcccgccgacgcccgcggagctgcagcgcgaggcggccatggcggcgcgcgagcgccgccgcatccaggcccgcctcaaccgctccagcaccggcgccaagcgcgccctcaagggcctccgcttcatcagccgcaccaccggcaccgtccaggccgccgagctctggcgccgcgtcgaggaccgcttcaacgccctcgcccgcgacggcctcctctcccgcgacgacttcggcgaatgcatcggaatggtggactccaaggagttcgccgtcggcatcttcgacgcgctggcgcggcggcggcgacagaatctggagcggatcaccagagaggagctctacgacttctggctccagatctccgaccagagcttcgacgcgcgcctccagatcttcttcgacatggtggacaccaacgtggatgggaggataacgagggaggaagtacaggagctgatcgtcctgagcgcgtcggcgaacaagctggcgaagctgaaggagcaagcggaggagtacgcgtcgctcatcatggaggagctcgacccggagaacctcggctacattgagctgtggcagctggaggcgctgctgctccagcgcgacagctacatgaattacagccggccgctgagcacggcgagcggcgcccagtggagccagaacctcggcggcgccgccgtggcggcgggggcggcagcagcaacaggcggaggagcgcacgcggcggtggcggcgagaggggggcagcagcagcagcagcagcaggaggggaggaggggagggtggggggtgaggaaggcggcggcgagggtgagggtggcggcggaggagaactggcggcgggcgtgggtggtggcgctgtggttcgccgccatggcgtcgctgttcgtgtggaagttcgtgcagtaccggcgcacgccggcgttccgggtgatggggtactgcctcccgacggcgaagggcgccgccgagacgctcaagctcaacatggcgctcgtcctcctccccgtctgccgcaacacgctgacgtggctccgctcctcctgggcccgcttcttcgtccccttcgacgacaacatcaccttccacaagatgattgcgacggcgatcgtggtggggatcacgctgcacgcggggaaccatctggcgtgcgatttcccgaggctgatcgcgtcggggccggaggagtaccggctggtggcggacgcgttcgggccggagaagccgacctacgtggggctcctctcgggcgtggagggcatcacgggggtcgccatggtggtgctcatgaccgtctccttcacgctggccacccacccgttccgcaagggcgagaagggtggcagcggcggtggcgcagccgccaccgtcctccccacggtagcgcggctcccctcgccgttcaaccgcctcgcggggttcaacgccttctggtactcccaccacctcctcggcatcgtctacgctcttcttatcgcccatgggtacttcctcttcctcgtccgtcgctggtatttgaaaacgtgcagagtcgccgtggttgctagccagccgggcaccagatcgacctactgtgctgtcctgtgtcttgctcgtgatggtcaaggatggcgtagttgtgtgattgtgtccctgatcataaataggccgtgtcgaggtaggcagcggcgtagggggggcaggtcgagaccggtccacagctgtgtactccagtgttgaagttgctgtgagttgtcacggtggagtacatgtgttggcggagtacgagtcgagtcgtccagactctagagcctcttcccctgacgtgtgtataaatgtaagtttgccggtggtctccaaggtcgccaggtggccgtgctgtttctgcggccccttgtacctacccgttccaggccgccatgtagccatgtcaagacagaaatgacagaaataataccgttgtttc

SEQ ID NO: 12588 - DNA, 1121 bp, Oryza sativa
  ref <308>: DATABASE ACCESSION NUMBER: AK109936
  ref <309>: DATABASE ENTRY DATE: 2002-08-28
tcattgcaattgttggtcttcaacgaggaatgcctagtaagcgcgagtcatcagctcgcgttgactacgtccctgccctttgtacacaccgcccgtcgctcctaccgattgaatggtccggtgaagtgttcggatcgcggcgacgggggcggttcgccgcccccgacgtcgcgagaagtccattgaaccttatcatttagaggaaggagaagtcgtaacaaggtttccgtaggtgaacctgcggaaggatcattggagaacaaattaaccgaagctagtgtaagagcagagaagagctagaggtttagagtttgcggtgtgtgcgtgtgcatggcgagcgtgtgggcgacggggcagccgggggtggagctcgaggtgaaggtcgtgagggtggccggcgtcgaggcgcggccggaggggggaggcggcggcggcggcggcctcttcgtgaggtactacgtcccggctggggacgggaagcggaggatccgcgtggacacgcgcgaggtcccgtgcggcggcggcgatggcgaagaggacggcgcgttctggggcgagctcgcccgcttcgagcgccgcggtggcggcgcgccggcttcggtaggcggggtcgtgttcgagctccggtggaggccgcggcggcgctcgccggcgttcctcgggatgctcgggaacgggaggccgtcgtcgcgcgtgctggcgcggggcgagctcgcgtgccaggacaacgccgccgccgccgtgacgcccgcgccggcgtcgtcggggagtacctggctgaggctctcgccggcgtgccgcgagctgagcgggtgcaaggcgcccaagctgctggtcgaggtcaggatgatccacgccgccgacaactacggagccgtgaaggcgacgaggtcgctcggcggcgtgaaccaccactactgctgcagcgacggcgagcggtgcgcgcagtgcgggtggatcgggaccgaggaggacatgttcctggcagcaacgttcacccacgaatgagtggcgtgatcgttgatttcgtagttcatgggagaggagctagttaattaacctaactgtactttcgctgatgaaatgataaaagaagctctcgactacgaggcaatttagtc

SEQ ID NO: 12589 - DNA, 935 bp, Oryza sativa
  ref <308>: DATABASE ACCESSION NUMBER: AK109937
  ref <309>: DATABASE ENTRY DATE: 2002-08-28
caagaacgaaagttgggggctcgaagacgatcagataccgtcctagtctcaaccataaacgatgccgaccagggatcggcggatgttgcattttgcaacagccgcctctcccgcccccatccagacttttccgcgacgcgacctcacctccagcgcgacctcccctccatcgccgtcgtcgccggccggtgaaggtgagtcagcggacggtggagagggagggtggagtgagagtggagatcgagaggtgtaccagatctggagccgcgccaccgccgtctgtagccgtcgccctgcccgtggctgaccgctggcgccctcgcgatgcgcgcggccgctgcttgcctcctccgccgccgccgccgtcgccatgctcgcggccgccgcttgcatcctccgccgccgccgtcgtcaccatgcgcgcggacgccaccttccgccgtcgcccagtagcccgcaccgttgttcagctcggcaccaccctgccctgcagcgccgcccgcgccgtcccgcatcgcccctccgtctgccgcacgcacgcacccgcgagaggataaggtagggtctttatttatttttagcgagagaaggtccgttcttttctgtttttctttttttaagcgagaggataaggtctgtcgctagcgctaatgtggattagaagtccattcacgtaaatacatcatcaattaaaaaattattcattaaaactatatcggttaaaatttactcatttcaaaatattattgcgataaaaaatgcagttaaaatttagtagttcaaaatatatcccttaaaaatataaatataaagttagttggaagatattattaaaatataggagggtgggatatggatgatgtaatatagatgatctgttagagttgaaaggaatatgaatgatgaatcttttttggatgaccatccatataggt

SEQ ID NO: 12590 - DNA, 1025 bp, Oryza sativa
  ref <308>: DATABASE ACCESSION NUMBER: AK109938
  ref <309>: DATABASE ENTRY DATE: 2002-08-28
acaaacacacacaatttagcttagcttaagccacttgatctcaagctcaagcttaaaattagcttaagattaagccattaattagccaagctaactaagcaagcaagatcttgttgaggagatgatggcaagcgacggcagcgcgagcccggccagctgcggcggcgcggcgtgcggggtgtgcggcggcgcggcgacggtgtactgcgcggcggacgcggcggcgctctgcgtgccgtgcgacgccgcggtgcacgcggccaacccgctggcgtcgcgccacgaccgcgtgccgctcgcggtcgccatggcggcggcgagctccggggtgtacgaccacctgttcgcgcccgacgacgacgccgcctcgtcatgggctgccgccgcggcggcgggggcggcggtgcaggggcaggggcaggggagccccaacgacagctcgtcgagcttcaccaacgacagcgccgccgcctcctcgtcatcggacgacgacagcacggccgccgccggagtcagcggcgccggcggcgccggcgccgccgccacgaaggaggccaagttctggctctccttctccgacgacggccgcgccgacggcgtagggttctacatggacagcaccaccgctgccaccgcggcctacggcgtcgtgccaaccttctagaaagttccagaaacccctctcccaatgggcgccaacgcggcaacggcaatggcgttggcccgtcttaagacaaacattaagaaaagggcaacatgtcataatctcgccgtcatgctaatggtggcgcatggtgttcatgtcgtcgtcttcttcgccgtcgctttctgattccgtggtggaaacccgcatcactatttttaactgctgatgcgggttttcggtgggtggaattccaaattccatcggttaaaattagggggattattattaatgcattgtgacttttgtaagataactcatgtagttaatttctatggttcagtgctgaaataataaaaaaaatccaatgtgatttttctct

SEQ ID NO: 12591 - DNA, 1174 bp, Oryza sativa
  ref <308>: DATABASE ACCESSION NUMBER: AK109939
  ref <309>: DATABASE ENTRY DATE: 2002-08-28
acagctacctcactccaacaatcgccgaccacgatggccaccacgaggagcggcgtcggcggcgccatcagcgacccatttgcgacgccggggttccgcttctacccgacggaggaggagcttctcggcttctacctccgccaccgcctcgccggcacgaggcccgacgtcgagcgcgtcatccccgtcgtcgacgtctacggctaccacccgtcccagctcgccgccctggccggggaggcgagcgcgcgcgacacggagcagtggttcttcttctgcccgcgcgccgagcgggagctccacggcggccggccggcgcgcaccacgccgtcggggtactggaaggccacgggatccccgtcctgcgtcatctcctccgccacaaacagggtcatcggcgtcaagcgcaccatggtgttctaccagggccgcgcccccaccggcaccaagacccgctggaagatgaacgagtacaaggccgtcgccgacgacgccgacgccgccgccgccgccatgctccacccaatggcgcctcccaggctgaggaacgagctgggagtgtgccgggtgtacatcagcacgggcacgctgagatcgttcgaccgccggccgctcgataatcaagcggcggcgcccacccagcaacaggtgatgccatctttgacggcggcggcggcggtgaacacgaacctctgcggcggcggcggcggcgtcgtgttcgccggtgcacaaggagacagctcccgcgactgcagctcgtcgtcggggtcgcgagaactcgccggcggcgccgatgggtctgaagacgacgccatcgactggaactcgctcatcagtagcgccactgctgatgatctcggcttcaacaccgtcgttggttttgatcctagcatcgtcggatcatggccacaagtctagtgcttgattacgcgtaatataaaattaatcgagtttagtgatcagttagttttttgtttttttgcaagaagttcaaaaattattgctgtgtgttttgcactgagtagcaaagatgggaggattagaagatgaatcgattagtttgcaaatcaggtgaattaattagagtaattaacatctgtagtaatagtaagtagaaaatcaaaatgagaagttgtagcagaaagtatatactaccacaaatccgttcttagtc

SEQ ID NO: 12592 - DNA, 1654 bp, Oryza sativa
  ref <308>: DATABASE ACCESSION NUMBER: AK109940
  ref <309>: DATABASE ENTRY DATE: 2002-08-28
ctgaatgtcaaagtgaagaaattcaaccaagcgcgggtaaacggcgggagtaactatgactctcttaaggtagccaaatgcctcgtcatctaattagtgacgcgcatgaatggattaacgagattcccactgtccctgtctactatccagcgaaaccacagccaagggaacgggcttggcggaatcagcggggaaagaagaccctgttgagcttgactctagtccgactttgtgaaatgacttgagaggtgtaggataagtgggagccctcgggcgcaagtgaaataccactacttttaacgtacgcctcgttcttcttcttctctctctggttttacatttttactactcctcctagcttcccttcatctctctcttgatggcgaaacccttccccgatccgccgaaaccgccggtccccgagccgccgaaaccgggctccgatggcgcctgctacgactgtccctctcctcctcctcctcctcctccccactcgcgtgaccaccgccgcgtggtgatcgcgctcgccaccaccgcgtccctgctcttcgccatcctcctcgccttctccgtctactgcttcatccgccgcaggcgccagcagcgggcgcggcgtgaggcgcttctagcacctcccccttctgatgcggctggaggaggcggcgcaccgggtgcgccggtcgccgccggcgacggggcggtgggcggcgccggggagggggagggggagggggaggtgctgcaccacgcgtggcacatccgcaccgtcgggctcgacgaggcggcgatcgagtccatcgccctcgcgcggtaccgcgccggcgccggcatgctcggcgccaccgactgccccgtctgcctcggcgagttccgcgacggcgagctcctccgcctcctccccaagtgcggccacgcgttccacgtcccctgcatcgacgcctggctccgcgcccacgtcaactgcccgctctgccgcgcccacgtcctgcaccccgccgacgccgacgccgacgccggggacggggaacgcgtcccgccacccgccggcgctaacggcggcggcggcggcggcggcggcgcagccaccgaccaagcctcgagccccaccgatcaaaccgcggaccaagaaaaccctggtcaacagcagcagggggagcagcacgagctccgggtacaaatcgatcggcgcgaccagcccagctcgccggagccgccgcgccggagtcccgacccgcgcagcgcgcagagtttccggcgagtagcctccatgggctcgcgctcgccaccggcgccgtccgaggatgctcctgaagacgagcagacgacgacgcagagcagcaaagagaaacaggggagcggcggtgactctgcctgctgcggcaaggcgccgtcgggctccggccgcttgcaccacatgaggaggtctttctccggcggcggaggccggcgatctctcccctcgcggcatggccgcacttctagctcgatgctgccgttgtgatcatctcgggggtaaaaagaaatacaaaacaaaaatatttactgaaatcgattgtgaactcggtatcctgtacagttgtgaacacccaaagagagattgcatcttacatgtcagatatatgaagaaatgaaccttgagctggagttgattttt

SEQ ID NO: 12593 - DNA, 1363 bp, Oryza sativa
  ref <308>: DATABASE ACCESSION NUMBER: AK109941
  ref <309>: DATABASE ENTRY DATE: 2002-08-28
acacaattcgcccgaagtcccaaggctttttttacgtccaaattaaaaagaagccatgttccgccattcctcctctgcctcgtcggcggcctcctacggcagcgacgtcagcttcatgaaccactcgccggcggccgccttgcccgccgtcccgacgcagatccctcgcgtcgccggcggctacctcgacggcaatgttagcggcgggttacctcacttcggaggggcggtgtcgtcgtcgtcgtcgtcgccgccgtcctactcctcgtcgctcccttcgtcctactacaacaacatccagaggagcatcagctcgcactccctcccgcatcacctccagctcaccgaccacttcggcggcgcattcttctcgtcgtcgtcctcctcctcccaccagctgcctctgccgccgccgctctcctcctcgccgtcctcctcctctggcgacctctttgagttcacctcgccatgccccgtccgccgcgtcttcagcaccggcgacctccaggggatgaacggatcgtcgccgccgcggccgctcccgtccggcgaaagctgcgggcaagacggcagcgggccattctcacagaaggtcgggcggtacagtgccgaggagaggaaggagaggatcgagaggtatcgcgtgaagcggcatcaacgcaacttcaacaagaagatcacttacgcgtgcaggaagacgctggcggatagccggccgagggtgaaaggccggttcgcgaggaacggcgaggccgacgcggagggcgacgagcgggaggcgttcgacgcgagctacagctacgactactccgccgcgggctacagcgactaccgcagcggcagcaacagcagcagcgtcaacagctgctacaattacaaccgcaaggacggcgccgcgacggaagcgtctgtcgtcggcggcagcgacaatggcgagtggtggtggcgcgcgccgggcgccaccaccgccgaggcggagcggcagcggcaggccggcttcgacgtcgacgaggagatatgggccaccctcggcgacatgctgtccgtgaacctcgcctcgtagtacgctgtcgccgccgatcaggggagcgaacgatcgagctggagatctaccggcgcgtaggccggcgtcgttgttggtggtcggtggggtccggtgttcgagcacgagcacgcactagctagctcagggtggcgggcgcgcgcgggcgggcgaccggtgcgcagcgtagtggtgcgccagcgccagtgtgcagcgcgcgagaggaggaggtcaggtcaggtcagagtggcgtcgttgaccttcccttgtgtgtagtattattgtaactttcgccagaaacatcatgaaagctgggaaacg

SEQ ID NO: 12594 - DNA, 1322 bp, Oryza sativa
  ref <308>: DATABASE ACCESSION NUMBER: AK109942
  ref <309>: DATABASE ENTRY DATE: 2002-08-28
gctgtacgtgtgtatcgttgcatggtgctgcaatctcacgatgtatcggatctctgcatcggcaagccgccggtgaggtggctgccgccgtcctccaccgtcgccgatgccatcgccgagatcgaggccggcggcggccggggtccggacgctgccgtcgccgtgtgggacgggacgaagggggaagtggatggcagggtgtgcatggccgacgtgcacctcttcctctgcggcggcgacggcgaggcggccagcctggcttccccggccgccgcgcttcaggccacgctctccgacctcctcgccgccggcgcgccgcccgtccgccgcatcgagccccacgcgagtgtggcggaagcggtggacgccttcttggacgacgcgcactgcctcgtcgtgccgatccgggagcggtggcggcgcgcggcggcggcgggggagatgtgcatgtgctggctcacggtggaggacgtcgtgcgcttcttcgtcggctgcatcggcctcttcgccccgacggcctcgctctcggtttctcagctcggcatcgtccgcgaggccacgctcgccgtcgccgccggcgacagggcgctctccgccgtgccgctcctcagcgccgcgctggcgacgcactcctccgtcgccgtcatcacgggcgcaggcatcgccccccgcctcgccggcgaggtgtcgccgtcggcgctctgctcctgcgacgtatccgtcgcggcggccatcgccgcgctctcggctggcgacctcacggccttcctccaccgcagcgacctccggtgccgccgcaacctccccggcatggtcgacctcctgtacgccggcgacccttcgtcgtggcccccctccccctcctcctcttcctcctcctcgtcgtcatcgtcgtcgttatcctccttctcgtcttcctccgacgacgaggcggaggacgggtacaaacactatgcgccagcgccgtgcgcgcggcgagacaacaacaggcagatcatcgcgtgccacccggggagctcgctggtggcggtgatggcgcaggcggtcgcgcaccgcgtgacgcaggtgtgggtggtggacttcgacgacggcgagctggtcggcgtcgtccgcttcctcgacgtgctctgggttcttcgcgaacacctcaaccaaccaccccctgatctacccatcgaatttctcatcaattaatcccagtactaagcttcgttgatgtacatacgaggacaaaaattgcgaccatgaactgaaccttttgttcatcttaaatttacgccatgtgtttcgtcggcggatgaacttgaaacgaaggaagagtc

SEQ ID NO: 12595 - DNA, 1058 bp, Oryza sativa
  ref <308>: DATABASE ACCESSION NUMBER: AK109943
  ref <309>: DATABASE ENTRY DATE: 2002-08-28
attgaacctaatcgccatggaggcattatcttaatcatgaggattacaaagaaaatgtatataccattagcgaacctggcgcgcccacgaaagctacctgcatccaacctgccttagttgcagcttgcctctgctctctgctctagctgctatccgtttctgtctcggacaggacgagcttaaagctgcgtcgcccatgtcgccgttgctcagtgacaagtgtcgtcgcgcacgcgcagcgatgtcgtcgtcgccggcgccggtggagtccccgtggctgacgatgcgcgccatgcggcgcgttggcggcgcggacggcggcggcgggcagcggagcgcgctgatggtggcgtcgtacccggtgctgctgctgctcgtcgtcctcgccgcgttcgtcaagtacgtgtggatcgcgctggcgctctacagcgcgctcctgctgctgttctcgtgcgcgtcgcgccgcctggcgctggcggagcggctgccgtcgccgctgggaggaggcggaggaggaggaggagtcgccgcggtcaccgcggcggaggagctccagggcgcggcggcgcggggcggggtgtccggggagacgctggcgtccatcccggcgttcgcgtacgacgcgtccgcgcacggcggcggcggcgaggcggcggcgcagtgcgcggtgtgcctggaggcgctgcgcggcggcgagacggcgcgccggctgccgtcgtgcgcgcacacgttccacgtcgcgtgcatcgacatgtggctgggctcgcacgccacctgtcccgtctgccggcgccgcgtcgagcgcaagcacaagggcggcgtgctgccgccgatgccgccggagccggagacggagccgccggtgtagctcgtcgtacttcctgtgtcttcctcctagtgatgcagaagattgcagaatggcagacaaaatttgtcaaatttgtactacatgtttagattagaggtacaataggccagtttttcttgccactctgcttattctgctgtttgtagatgctaacgcgactcatctttgtgaaatctgaagcctgtcgcat

SEQ ID NO: 12596 - DNA, 1162 bp, Oryza sativa
  ref <308>: DATABASE ACCESSION NUMBER: AK109944
  ref <309>: DATABASE ENTRY DATE: 2002-08-28
aggtgcacccgcccgcacacggtcgcgctgaatttagctccgccaccgtcgtcgccgcgtcgtcggaatcgataatccgatggaacctggagatcgtaataagagcaggatccttatcatcggcggcacggggcacctcggcaagttcatcgtggccgcgagcgcgcgcgccggccacccgacctccgccctcgtgcgcgccaccgcgccgcctcctccggcgacgggcggcggaggaagcagctccagggcgcggctgctgcagagcttcagggacgccggcgtcaccatcctgcagggcgacatcggcgaccacgatctcctggtgaaggcggtgagggccgccgacgtcgtgatatcggtcgtcggctaccatgacgtcggcgaacagatgaagatcatcgccgccatcaaggaggccggaaacatcaagaggttcatcccgtcggatttcggcaacgacgccgaccacgcgcatatcgtcgagccggcgaaggcgaccttcgacgtcgaggcgcagatccggcgaacagtggaggccgaggggatcccctacacgttcgtcagctgcaactttttcgcggggtactatctccccgcgcttgtgcagcctggagccagcggcctcccagctgacaaggttgtcattctgggagacggcaacaccaaaagcaatatttgtcgacgaggaggacattgcaacgtttaccatcaaaggagtggatgatccaaggatgctgaacaaggtcctgcatataaggccaccagagaatgccctgtcaatgaacgatctcgtttccctgtgggagaagaagatggggaggacctttgagagagtctatcttgtaaaatcaattattattctatgatgaacaattgggcattggagattattggttttgttatttggaatttattcacaaagtggttttggagatgattagatttacaggggatcgcaggattttatcattttgtgtgaccggtcagaccgggctctagtagccggtcagaccggcgtgtaatgcgcggtcagaccggtgcagcccgcggtctgaccggccgacactgtgtcggtttcggtttcgggttgtttatttggatatccgagtttatacgtatgtaatactattgtttgctgctaatgattcaagttggagat

SEQ ID NO: 12597 - DNA, 1071 bp, Oryza sativa
  ref <308>: DATABASE ACCESSION NUMBER: AK109945
  ref <309>: DATABASE ENTRY DATE: 2002-08-28
ccctctggggctccaggcaggacggcggcactgcccgacgggtggggaggaaggcggcgtcggcagcggcagcttcctctccgtgctcgccgacgaggaggagcaaggtggtggcggcgccgggggggggggggagcaaggcggtggcgtcagcctcctctccgtgctcgctgacaaggaggagcggtgggcgacccagcgtcgcggcgatgccgccgccgccgacggcggtcctcctggacaacgtcctcgccacctcgctgacggagatctggatcaagaccgggatggcgacgagcaccctcaccaagcacctgcgaggcttaccgttcttgctcgcccgccgccgtcctcgccgtgtcgtttccccaaccgccgcgccgcttcgctgtcttcaccgtgccgctcctttccttccatttcatctccaccagcgagtagatctccacgccggtgaggttggaggcgcgcggtgtcatggcgttgggtgcgtcgtacgcccgggacacgccggagcacgccgcgccgccgccagtggtggaggccgacgcggagcagcggatgacgacgtggactcagctgtcgtgccccacctcggcgtcgggctgcagcgcctccctccagcggaacgtggcgatgctggcgtcgacgtccggcggggactgctcggagatgatggtcgtcacctgcccgctccgccgacccacctgctcctgcgtggtcaccaccgccgctgcatcgccggtcgccggccaccgccgccgatcctcctctcccgcctcgccccgtcgacttcctccccaacacgctggccagcctgcccaggagaaaatggagagaagaggaagggacagatgacgtggcatcctgacatgtggggcccatgtgggtcccacgctgactcggccaccacgccaaacaaaaccggggtcaaaaccacgagggacctaaagcgaacggttttgatatttaagggacgcccggtatctattgggttgacgattttgtatctcgatgacaatttgagggaccctgggtgtacttttttctttattctccgaacccccaaac

SEQ ID NO: 12598 - DNA, 2575 bp, Oryza sativa
  ref <308>: DATABASE ACCESSION NUMBER: AK109946
  ref <309>: DATABASE ENTRY DATE: 2002-08-28
aagcgaaaaaccgagtttgtatactcgataaattaaggcggtgagatggccgggattgggacatcgccgctgccgccgccggtggcgggcgacccgcacgacgggttgggcggcgataaagtggacgaagggctgggcgggcagctggacagcgagctgcaggccgacatggaaatggccgagaagttgctgaatgccgctgcagacggcgaattggaaacagtgaaacagctgtgcgcggcgggtgccgatgtggatcacgcgtcggagacggacgaaacgacggcgctgatgctggccgcacacgagggccatcaggccgtcgtggagtacctgtgcacacacgcgcgtgccaccgtcaatctggcgttcgagagcggttggacggctctgcactatgccgtgcgcggcggccacacagcgctgtgcgcgtggctcgtgcgcgaagccggtgccgatccggagctgacgaaccgcgacggtgtgagcgcattggcggctgcacagtctgacgccaccaaagccgatgtggccgctgccatcgtcgccgccgtcgccgcgcgcaaagccgcactggcggcagccgcagcggcggcagcagcagccaaagccggctctgcagcgccgacacccaaaccgcgcagtgctgccgattcggatgcgaaagcgtccgcacccgccgcaggcgtgcccgtggcagctgcatcggtggtaccgggtacgaccacgaccgtcgtcgccggtagcgacagccccaccaacgccgacatcaaacacgccggtgcaacagcagcagcaacagcagcagcgggtgcggcgggcgcggctgcgggtgcaacacagcgtgagcaggcgatggtggcggcgggtgtggccattggtgtgaagcccgtcactgtcggcatcaaagcggcggcggcgacagccggtggcagcggcgccggtgcgagcggtacggcgacggcggcgacgcaggcggcagcggccaaagcggggatcgccatcggcgatcagttcgccgctattgatgaggtgttgagtcagttccggaagctgtacgtgtacacgtgtcagacgtatcagcccaaaacgcccatcgtaccgcacccgacgctgctgcaagccattgacggaatgatcgccaaaaccaagcccttaacgacactgtctctgcgcggcgactcgccgctttgggacaacgccgtaccgcgcatgacactgccgcaactcgtgccggtgttcgacattttgggcggtcagttcgcgcacgcgccgttcacaaccattgacttatcaaacaataatttgccgccgcccatcgtgcccgcactcgtgtcgttcctcaaacacacggccacgctcacggccctcaacctctccaacaacgacattgacagcgaacagggcattgcactgtcgcgtgcgctgtggacacaggacacgctcctgtccctctcactgcgtggcaatccgttgggcgacaaagcgaactgcgcgttcgcgaaaatgctcaaacaaaaccgcacactcacggagctcgacgtcggccacaccgatgctgccaccgtctcgctcgtgcgctacgccgtggcactgtcccgtgccaacaccaccttaacgtctctgaatctcgacgcgccgctgctgctgagcacgacgcacggcagcggcagcgacgagacgacgagcacgcatttcgcgaaaatgttaggtgcaaacaccacgctccggcacctgagcttggcacagcaccggatgcgcgatttcggtgccgattggatggcgcagtatctggcgaagaacgggcggctgacagcactggatctgtcgaaaaatgagatctcatttacgggcgtcgccgctcccatcaaagcgttggccgtacggccactcagcaccaccatcgcactgcacgccaacagtctgacggacggcgccggctgtacgctgcgactgcgtccgttggacgaagtcgatgagctgttgctggcgcacgcgaacaaaccgccgcacgcgcacgcgcatggcgctgcggcggtgatggcatcaccatcgtcgcagcagctgctcgcgggcagcggtagcagcggcgggctgaaggtgctgctgaacgctgatgacgcgaaacagagtgcgctggcggtgaaggccagtccgatggcctcacccggtggtggcagtggtgtggccgagtggtggaggtcacaagggcttgccccgagcgattcgaaggcgtcgatgggttcggcgcgcagtggtggcggtatcggcggcggcggcggcaaaggtgacggcaagcccaagcccaaggcgggctgttacgtgtcgttcgaatcgaaattggatcgtcaccggctcgtggctgtcgcgcgcaacccggcactggacagcgccgggctaatgcccagcgccagcagcgtgttcgggcccgtcgcgccggcgagcagcagcgagtagcgtgcgcgtgtgcgcatacccggccgtggacctttcctttcgcgaccgaccacgtcgtgacgcgtacatatacgttcttctgctgtctgctgttgcccgcacgtgttcgtccgatctt

SEQ ID NO: 12599 - DNA, 2870 bp, Oryza sativa
  ref <308>: DATABASE ACCESSION NUMBER: AK109947
  ref <309>: DATABASE ENTRY DATE: 2002-08-28
ttatcaaccagagcggcctgccgtttgcgctcaagaccaagtcgtggctcggcagcgccaagctggtggcgggccaggacagcggcgcgtcggcggcgatgcgcagggagccggagccgttcctgttttcgcacaactcgaacgaccggcgcaaccgcgtgctcatgcgcgtcggcgactcgcagtggtccaagccgctgtcgttcgaggcgatcggttccgagaccgaggtggtgatcccgtcggcgtccaagaacgaggagatccacgtcggcctcaccgtcgaggatggcctgggcaagttcaagctgtccaaggtggtcaagctcacgccgcgctacctggtgcgcaacagtctcacgggaccgatcaatctgcgcgaggcgggcgcggccgactttgtcacggtggagccagggcaccgcgtgccgctgcacttcctgagggtgggcgcaaccaagcagatgacgctcgcctatccgggcatcaacaacaagtggagcgcgccgttcaacatcgaggatgtgggcagcgtgcatctgcggctggccaaggcggggcagcaccagcacctcatcaaggctgaggtgctgctcgagggaccgacgatctttatctcgctgagccaggaggacgggccgtggccgttcatgctgcgcaacgagagcgactatacagtgcagttcatgcaggcgaccgagcgcagcgacgaggacggtggcggcgggaagcgcgtcgacgaggcggtgggcaagcggtacgagctcaagccgcgctccaagatgaagtacgcgtgggactatcctgcggcgacggacaagatgatcaagctggtgatcaacgggcgcgagcgcaacgtcaacatcctcgagatcggcagtctgctgccgttcaagttcgcctcggcggacggacgcgggagccgggtggcgtcgctggacgtgcgcgccgacgggccgacgcagacgctggtgctgagcaactatgcggaggagctgagcaacttcaagctcaagcggcagaactcgacgttttcgcgcagcgacacggtgtcgagcgtggcgagccgcgatgcgggctttgtggcggtggacgtggatacgaatattcttacggcattcaacgtggagtttgaaggcgtgggcatctcgctgatcaaccaaaacgtgcaggagctggcgtacgtgtcgttccgcgggctcgagatgcactacaccgagtcggaagtgacgacggcggtgaatgtgatctgcaagtggatccagatcgacaaccagctgttcggcggcttgttcccgatcgtgctgtatccgacggtgatccccaaggacggcaaggatctggaggtgcatcctacgctgcaggcgtcggtgatcatgctcaaggacgagtcgcacggcgtgacgcacatcaagtatgcgtcggtgctgctgcaggagatcacggcggagctggacgaggactttttgtttgcgctctacgagtttagcaagttcgagggcgccgcgtggcagctcgaggcggagaaggagacggacttcatcgagcatccgcgcgaggtgcgcgagccgagcggcacgcagaccgcgtcggacgacatctactttgagatcctgcatctgcagccgctcgcgctcaacctgtcgttcatgcgcaccgagcgcgtcaatgccgacgaaaaggtgagctcgaggaatccgctcatctttttcttcaatgcgcttacgatggcgctgggcaacgtcaacgaggcgccggtgcggctgaatgcgctggtgatcgaaaatgtgcggctgagcagcgcggtgctgcagcgtcgcgtggtgtaccactactcgcagggcttcctgctgcagctgtaccgggtgctgggctcggccgactttttgggcaatccggtggggctgtttaacaacgtgtcgtcgggcgtggcggatatcttttacgagccgtaccaggggcttgtgatgcacggcaacaaggagttggggctgggcattgcgcgcggtgcgtcttcgtttgtcaagaagaccgtgtttgggctgacggattcggtgtccaaggtgacgggctcgatcggcaagggtctggcggcggcgacgatggataaggagttccagtcgcggcgacgcatgtcgcgcttccgcaacaagccgcgccacgcgctgtacggcatcacggcgggcgccaattcgttcttcacctcggtggcgagtgggtttgaggggttggcgctgcgaccgctggagggagccgagcagggaggggcgggtggattcctcaagggggtggggaaggggttggtgggagcgatcaccaagccggcggtgggggtgtttgatctggcgagcaacgtgaccgagggcatgcgcaacaccaccatggtgtttgaccagaacgacattgaccgcgtgcgcttgccgcggtacattgcgagcgatgggatcgtgcggccgtactcggaccgcgaggcgctgggccagacgtggctcaagaacgtcgacaacggccggctcatgaaggactcgtatgtggcgcatgtggatgtgggctcgaccgagggcgatgcggtcatcatgttgacggtgtcgcgcatcgtgtatatccgcaccatgcggctcaaggtcatgtgggaggtggcgctggcggatctcagcagcatctcgttggagagccagggtatcgcgttggtgttgcgtggtggggtcagtgggccgtttgtccatctgcccgatgtcagcacgaggaactggctgttcaagcaggtgtcaaaggtggtgcagaactacaataccgccaggcaggcgtaagacacgccgtaggggacgaaggcaattgtttattttccggagcatgttggtttgaagtgt

SEQ ID NO: 12600 - DNA, 3654 bp, Oryza sativa
  ref <308>: DATABASE ACCESSION NUMBER: AK109948
  ref <309>: DATABASE ENTRY DATE: 2002-08-28
actgctctcgtggttcgacgtcgcagacgcaaacgccaacaagccgtacgatgcgacgcagggcatcttccttgcggaagagctgctgttcctcatcgtcacgtgtctctcggagatgtcgtccgtgtgtgcctggtccatcgacgcccagatccgtcgcgaagtcatccacttcctcgcgctcggccaaggcacctcctccgacgtgaccaagaacatccccgagaagttcaccgacctcgctgcgtttgagcgcatcctctcgcaggtctccatcttccgtgcgccggacggcacgcacgactttggcatctttgagctcaaggacgagtgctacgccgagatccagccgttcttcttccactacacgcgcaaccagcgcgaaaaggtcgaggaggtgattcgcgctcgccagaagaagcacttggctcagaccgcggctcgtcaggcttcgaccatcaaggacgaagagctgccaccgctcgtgccgagcccgtgtctgggccagctccgcggcaccctcttcggccgtctgcccgaggtgctctcgaacgacgtgcttgtctcgctcctcttccgcgcgctcgataacacgcgggcgctggacacctatgcgccggacatgctcgtcgacacggcgctccagatcatcatgatcggcctcgtcgatgccacagagagcttcgcggacaaggctgccacgctgccgatcgccaggcttccggcgaaaggcgacgaggccgccgcagcctcatccgaggcgacgctggtggaactgctctgccagatcgagctcctggaggccttcaagccattcaagaccaagatcagctggtgtttggagcagctcctctcgcacaacgcgaccgcacgcggcattgttcaggcgcactttgctgccactggacgtggtggcgctgcggccacggccgcgaccaatgccaagaagccacagagcgccgacgaggctcgcagagcagccgccaaggcgcgccaggccgccatcatgcagaagttctcggcacagcaaaagagcctgctcaatcagttcggcagcgacgacgatgacgatgacgagggcgaggtggatgccgctacgtcgtccgtggatgccgaggcgagggcgcccaagaagagctggggcagctgcaccctctgccaggagaatctcgccaccgacaaggcgttcggcagcctggcgcacattcagccgagccgcatgatgcgcatgacgcccaagcaggacgcgccgagcctgcagcaggccttggaggcgccgctcaccatggaccgaagcagcgacgacggcaagcgcgtccagggcgcgccgcctatgggtcgttcgggtttgccgtccggcaatggcggcaggacgaggcaaggaccagcgtacggcagcttcccgcaggaggaccaccgtttcggcttctacgcgtccacgtgcggccatcttatgcatctgcactgcttcgagacgtactgcaggagcgtcgagcagcgccacacccagcagattgcgcgcaaccatccagaggaactgcaacgctccgagttcatctgcccgctgtgcaagagtctcggcaatgtcatcctgcccgtcgccgatgcgacgccagcgggacatgcgtcgagctccaacggcggcaatgcgtttgtgccgttcgactcggtggtggcggacgacatgccgctgcaggactggatccgcaagatcaacatcgacatcctcaagcactcgtccaagaccaacgtggccgactaccaggagacggagcacggcagcggcgcgttcctgcccttctttgtggagcattcgccgagctcgctgcaggtgcgcctcgagatggcgagcatcgaccgctcgacggcgcagatgatcgaccggctgatgaacgtgctcaagcccatgtcgcaagcgaccaagccggcgcgggagaagctgcagcagcacacgatccttgcgccgcagggacgcaagatgtacatcccggaagaggtggtggcgtatacgatcgccatgctcgaggtgtcgcagcgcggcatgacgccatcgccgtcgaccgactgtgcgcttccggtggagcagcggtcggtggcggacgcgctcaacgatccgaccgtcgacttgctacgctctctgcttcactgtctgcgagtagcatccttgacgctcaacgaagggtcgagaggaccggacatcatccgtcgcggactgctcaagcggctgctgccgcactggggcggagacgacgccgtgcgctcgccgctgctgctgcgcgacccgatgacgatcctgatcgaggcggccgtcgtggcgcccgaggcactgccgcagtgcacggcgctcatgtactacgtatgcctggtgcagaccgtgtttggcctcgcacagccctcgatctggccgcaggtgtacggccacatgagcaacatgtttgggcccaactcggcgctgcggccgggcgccggtctgaagccgggccagatcgccaaggaggacgtcgatgaggcgcgacgcatcttcccggacgtgcgctggacggtggccaacatcatcggtttcgtggggtatgcgcgaggcaacatcacgctcgggttcgataatctggacgacgacacgctggccaagatgatctgcagctacacgctgccgttcctgcggcgcgctgcgatcctgcgtcgcgtggtgggcgtgacggtggccggcggtgccaaggtgggggaaagcacggcgggcgtgggcgagtatcgtcggctgttggagcagctgcagattccgctgccgtcggacgcgctgccggtgcgtgcggagaagcagacgcccatggcgagcatggtggagggatggatcaagcatgcgtatgtgccgctggcatcgcttttccggccgctgccgatccagccggcgccgctgggcaactcgctgttcggcagtcagccgccgagtctcggtcacgatcggccatcgtctgctgcggcggcggttgcgggtgggtcgagtagtgcttcgctgggcgggggacggtcgggagggggtaattcgtcgctggcgacatcgtacctgcaggcggcggagacgcatccgacgctgctgctggagcatccgcacgtgtacgagcttgcgcggttgccatcggacctggcgacgctcttgcaggatacgcgacgacgtgcgtgcaagaaatgcggcaacatcccacccgagccggcgctgtgtctgctgtgcggcgaggtggtgtgtctgcagtcgttctgctgccagagcgaagacgacggcgagcgcggcgagtgcaaccagcacatggacctctgtggcggctccaccggcgcgtttttcaagatcaagagcaacctcgtgctgctgttgtatcagggcaacggcacgttccactttctctcgccgtatctcgataggcatggcgagatcgatgtgggattgcgcaagggcaggccgcagaaactgcaccagcagaggtacgatgaactgcgcaagcacatctgggcgcatggggtggcgaatattgtggcgcgcaagatcgaggctgccatggacacgggtggatggcagacgttctagcgggctcgcagtggctggcggacgtcgcgagcaaggacagttttgttattgcaatcgattcgatggggtgtgcgtac

SEQ ID NO: 12601 - DNA, 3339 bp, Oryza sativa
  ref <308>: DATABASE ACCESSION NUMBER: AK109949
  ref <309>: DATABASE ENTRY DATE: 2002-08-28
agacgtacaactcttccttcagtggatcaagctcgtctcgcaccccgtcgatggcacccctctcgtatttcacccctttcatcaccacagccaagatgccgcaagcagctggattcccctcctcaagttggcttccaagcattcactccgcttcctcaccgtctcagcctcctctcgtctcaccgaagccattgcttcgccgacttcgctcgatcttgatctcgagatccttgctttcctcggtctgctcaccggcgtagacgctcgctccccagcgcattccatcaacatcgacactcaacagaccaacctggcttctgcgctgcttgccctgcttctcgatctcggccttcaccgcactcttcgcacgcacatcctctcctttacagctcgtcaaaagtccaaggcgtccagcctctccccggccgtttccttggcgctggctcccctgcacaggttcaaacccgcctctgtcccaccctctacagcatcgggcgtaaacgctgcaaacgcaatcgatatcgacggcgcctcttcgtcagatgcagaggccgccgacattgcaacccaggccatccactcgttcgcagtcgagatcctcaccatccctgcacttcgcaagcgtctgcctctcgactccgtgacggagctcgccaagcaccttccgttcacctctgtgctcgactggatcttgcgcttcaagccaccatccgtccaggctccccaactggacgcaaccattccgtcgtcaaccgtcgaagctcaggcggctcaagcgctcgagcaaccttgtctgctctcgaacatgctggcattcggctcgcaacgggtcgccttcttcaaggacggcgccactcatgcaaagtatcttcgtgcaatcaccagtgcccaggactggctgcccgcctcggcctttgatccgtccaccaaatcatcagcttccgccgccgatggtcatcttctaaagacgccacagcaaagagctgcggtcgagcccgggctctccgacgctaaggaaacgtacgaaaggctgcgcatcctcgtgtccgatcaacacctctccgacgtacttgccctatctaaccgcttccccgcagccactcgtggacctttcttctccttcatgtgcgccacgctcgccgcctggcctatcgatgtgcacgaccacgtcctcaaccgtatcctgtattcgggcaccgacacctcggtcgcacgagacaacaagcagcagcgccacaacggtcctaccggcaccgccatcatccgtgaagtatggcgtggctacgttcgtggcagcagccttgcccgcagtcttgcctcggcgcataacgacacgcgtgcgcgagagatccttgcgtctctctccagcacaagtacctccgaggattggcctgcgctcgttttggtattcgaactgctgtccaatgtgctccttaccctcggcgatgacgagttctacccgagcgacaaccagttcggcgggtcaaatgctgccaatgccgcctggctttcacgcgacgagatcgtgagcatcagcggcctccttcgaaacgttgcctttgccatgtactggtacgagggcaaggctccgctcgtcaatctgcacgacgaagacctcacggatgcgcgcccacacaaacgcacgccgcgcgtgccgggaatgcgcatgacgctgctctcactccgctcgctcgtaaccaaggtgctcaagcagctgcacctgcgcgactcgaggcgtcgctttgctcctgccgaccattggctcatggtcagccacctcgacctcaacgactttatgcgcacggtagtgctcgaagagcagcagctcagcagcgagcagcacgacgagtcggagcaatttggcggcatcagtccaagcaatgccgacagctccacatcatcctctcacatcgctgcggtggcgcaagatgccgatgcggacatgcgcgttggcgaggacagcgattatggaatggacgaagacgacgatgcgcagtcgcgccagccgctctcgcgccttcaacagctacgcgctcgcggagatactcgcagccgccatctcactgcgctcaatctggctttcctctcgcctcgactgggtatcctgaacaacgtcccctttatgatcccctttgacgttcgcacgcagatcttccgtcagtttgtccagatcgacgcggtcaagaacggcatctttgccgatcgttggcagcgacgcagggcggtcaagatccgacgcagtcatgtggcgcaggacggcttcgccgcgctcgctcctctgggcgcagagatcaagaagccgctcgagatcgtgtttgtcgaccaattcggcaacaacgaagcgggcatcgacggtggtggactgttcaaggagttcctcacctcgctggtgcgcgaagcgtttgacaccaatcgcggcctgtggaaggccaccggtgcacaggagctctatccgaacccgcacacgtacgccacctcgggcgatcagctcgaatggtacggcttcttgggccgggtgattggcaaggcgctctacgagggtatcctggtggacgccaagtttgccggattcttcctgtccaagatgctgggcaagcagtcgttcctggacgacctcggttcgatcgacagtctggacaaggagctgtacaaggggctcatctcgctcaagaactaccaagggaacgtcgaagagcttgcgctcaactttaccgtgacggacgaggagtttggcgtgagccttacgcgcgagctggtgccgggtggggcgaacattccggtgacgaacctgaatcggatggagtacatctaccgcatttcgcactaccggctctcgacgcagatccagcaccagtgcgccgccttcttcaccgggcttgcggacatcatcaatccgcgctggctgcgcaactttaaccacgaggagctctccatcctcatctcgggcagcgacgatccggtggatattgacgacctgcgcaagcatacggtgctgggcggctatcacgagaaggacctcacggtggagcacttttggcacgtgctcgagggctttgaccagcccatgcgcaaggcgttccttaaattcgtcaccagctcgcccaagcctccgctgctgggattcagccagctcaaccccatgtttgccatccgcaaagcgggggacgatacctcgcgcctgcccacggccagcacgtgcgtcaacatgctcaagctgccagactatgccgacgaggccacgtgccgcgagaagctgctgtacgccatccagagcgaggctggattcgatctgtcttgagctgtagttgtgcaagggtagcaatccaaggtcattcagag

SEQ ID NO: 12602 - DNA, 3043 bp, Oryza sativa
  ref <308>: DATABASE ACCESSION NUMBER: AK109950
  ref <309>: DATABASE ENTRY DATE: 2002-08-28
atatctccatctcttctcctcgaaagtctggctccctcacaacctcctcacggtcgtaagcgagcacatcacttcctggacaacccccactatcgacggaaaagcggttcaatccaccttccttttcccgaccaacacctcatccccgaggccgacaatcacaccaccaccgcagagatcgcgcgttccaccccgcctctctgctctcatcgccttactgcacgcccaacatgtctggcttcttccgcaaggtcggcgactccgactccgaatccgacatctcctcttccgaggaggagctctctgagctcgagtccggagacgagcagccaaagaccacccagcccgccgcaggtcgctcccccttcctcaagggctccgacgatgactcggactccgacgacgactcggacgactccgacgaagagtcgctcgactcggacgacgactcggacgacgatggcgctcgcgccgacggcaagaaggcgcccacctcgcgcttcatgaagggcgccgccgactcggacgactccgactccgaggaggaggtcaagaaggtcgtcaagtccgcaaaggacaagcgcatcgacgacatgcagaccatcgtacaccacatcgagtccgcacaaaagtcgggcgactggacctcgatcaacaaggactttgacaacctcatgcgctccatcgagcgccagcgcaccctcggcgagcacatccccgccttcttctacaaggccatctccaacctcgacaccttcctcaacgagtccgccgccaaggagaaggacgcaaagaagaagatgaaggcgcccgtcgcaaaggccatgaacggcatgaagcagaagctcaaaaaggtcatcaaggagaacgacgacaccatcgctcgctaccgctccgaccccgccgccttcgacgccgcctacgacgccgccaacaacgccgccgccgcccccgccgccgacgcagagaccgccatcgccaagggcaagaaggagcgcctcgccgccgccctcgacgctgacgccaacgacgacttccagaccgtcggccgcggcggtcgcaccgagacctacacctccgagggcctcttcaagagcctcgccgccatcatggaggcgcgcggcaagaagagcaccgacaagaccgagcagatccgcaagctcaacgacctctcgggcgtcgcagactcgccctacaagaagatccgcgtcatcctcgccctcgtcgccgcacgcttcgactacaacgcttccgccaccgcatacatgcccgtcgagatgtgggactcggcgcgcaaggagatcaacgagatcctcgcgctcctcaccaacaaccgcgcctacgtcgtccgcgaggagaccgacgactacgacgacgaggtcgagcgcatccccaaccaggacggcgagaaggacaccgtcgccgtgcgcggctccatcatcagcttcgtcgaccgcctcgacgacgagttcacaaagagcctccagaacatcgacccgcacaccaccgagtacgtcgaccgcctctgcgacgagaagaagctctacgagaccatcgtcctcgcacaggcctactttgagatgcagcgcgagtccgacgcactctcgcgctgcaccatgcgcagactcgaccacatctacgccaagcaggacgtcatcatccgcgcgctcgagtccacgctcggcgacaccgccaagtcgttcgcctcgcagctcttccccgcgcctgcacgcgtcgccgagcaggacggtccggcgacgctcgtgcgtgcgctctgcacctacctctaccaggcgcgcggcgcccaggccgagcgcccgcgtacgcgcgccatgccctgccacatctacttccacgcgctccacgccgagtaccacgtggcgcgcgacatgttcctcatgtcgcacctccaggacgccatccagctcgccgacgtcgccacgcagatcctctacaaccgcgtggtggtgcagatcggcatctgcgccttccgcaacggcctcatcaaggagtcgcaggtggcgctccaggagatctttgccaccggccgcgtcaaggagctgctcgcccagggcctccagaagcagaaccagttcagcaccatcacgcccgagcaggagaagctcgagcgccagcgccagctccccttccacatgcacatcaacctcgagctgctcgagtgcatctacctcatctcgtccatgctgctcgaggtgcccaacatggcgctggcgggtaacgacccggagctgcgcaagcgcgtcatctcgcgccccttccgccgcatgctcgactacaccgaccgccaggtcttctcgggcccgcccgagaacacgcgcgaccacatcatgcaggcgtgcaaggcgctccagaacggcgactgcaacgcgtgcatcgagctcatcgccgacatcaagatctggaagctgctgcccggttccgaggcggtcaagaccatgctcgcccagcgcatccaggaggtggggctgaggacgtacctcttctcgtactcggcgtactacgagtcggtgtcgctcgcgcatctggcggcgactttcgacgtgcagcagaagcaggtcaaggcgatggtgtccaagatgatctacaacgacgagctcgccgcgtcgctcgaccccaaggcgaatgtggtgagctttcacaggctcgagctcaccaaggtgcagcagctcgccgcgacgctggcggacaaggccaactcgatgctcgagcagaacgagcgtctgctcgacgccaagctcggcgagggcaaggagcagaggagctccggcggcgaccgcgagcgcgacggcggccaggcgggcggcaggagggagaggagaggcggcgcgtccgcgcgtggaagaggccgcggcaggggcagggcacaacaattccaggccctcggtcagaaggtctagtgctctgccatcccttggtcgcttgacatgttgttgttttcccccaccatccccaaaagctccggagcatgcacgtctaggtgtgcatgtgtatgtgtatatgaaatctcaggagcatttctctt

SEQ ID NO: 12603 - DNA, 3569 bp, Oryza sativa
  ref <308>: DATABASE ACCESSION NUMBER: AK109951
  ref <309>: DATABASE ENTRY DATE: 2002-08-28
caactttgactacgcggtcgaagactttgacgtcgaggagcgcgccgtgctcacctggcagttccagcttcctcgcagcgcatcttcgctcaaggagcgcgagcgccaggtgtccatcagcgatctcaacatgatggacagcaagaagatccgcgcggctcccgagctccgcacgggtgccatgaccagctgccccgacgtggctgatatccccgacctgctgcccaaggtgctcaagttcttcaagacctcggccggcggtgcgcccatcaacgtgctcaacgttgccgtcgtcgaccagggcgactttgtcgacgccgaggtgcgaagcaagctcgccgagtacaccaacgcctgcagcaaggcctttgcctcggctcgcatccgccgtgtcacctatctgctctgccagccgggcatgtaccccttctttgccaccttccgcccgagcgagcagggtatctgggccgaggagaaggcgatccgcaacatcgaacccgcgctggcctaccagctggagctcgacagggtcagcaagaacttcgagctcaccccggtgcctgtgtcgtcgtcgaccatccacctctactttgcccgcggtatccagaactcggccgacactcgattcttcgtgcgctcgctcgtccgtccgggccgcgtgcagggcgacatggccgcctacctcatctcggagtcggaccgcatcgtcaacgacatcctcaacgtcattgaggtggctctgggtcagccggagtaccgcactgccgatgcgtcgcacatcttcatgtcgttcatctaccagctcgacgtgagcctcgaggatgtgcagaaggcgatcgccggattcctcgagcgtcacggcacgcgcttcttccgcctgcgcatcaccggtgccgagatccgcatgatcctcagcagccccaacggcgagcctcgccccatccgcgcctttgtcaccaacgagaccggtcttgtcgtgcgctacgagacgtacgaggaggaggtcgccgccgacggatcggtcgtgctgcgtggcatcgagccgctgggcaaggaggcgacgctcaacggccagagcgcccacttctcctacacgaccaaggtcgccctgcagtcgcgccgatcgcgcgctcacgctctgcagacgacgttcgtgtacgactttatcgacgtgctcggacaggctgtgcgtgcctcgtggaggaaggtcgctgccagcaagatccccagcgaggtgatcaagtcgagcgtcgagcttgtctttgacgagcaggagaacctgcgcgaggtcaagcgtgctcccggcatgaataacatcggcatggtcgcctggctcgtcgaggtggtcacgcccgagtacccgactggacgcaagctcgtggtgattggaaacgatgtcaccatccaggccggttcgttcggccccgtcgaggaccgcttcttcgcggcggcctcgaagctggcgcgcgagcttggcgtacctcgcctctacatctcggccaactcgggtgcgcgtatcggcctggccaccgaggctctggacctgttcaaggtcaagttcatcggcgacgacccggccaagggcttcgagtacatctacttggacgacgagtcgctgcatgccgtccaggccaaggctcccggcagcgttgtgaccaagcctacgcaggccgccgacggcagcgtgcacaatgtgatcagcgacatcatcggcaagcctcaggacggcctgggtgtcgagtgtctctcgggcagtggtctcattgccggtgagacgagccgcgccagggatcagatcttcacggcgacgatcgtcacgggccgcagtgtgggtatcggtgcctacctcgcgcgcctgggcgagcgtgtgatccaggtggagggctcgccgctcatcctgacgggttaccaggcgctcaacaagctgctcggacgtgaggtttacacgtcgaacctgcagctcggtggcccgcagatcatgaacaagaacggtgtatcgcacctgacggcgcaggacgacctggacgccgtcaaggcatttgtcaactggatgtcgtacgtgcctgcgcagcgcggcggcccgctgcccatcatgcccactgccgacacgtgagaccgtgccgtgacctaccagcctcctcgtggtccgtacgaccctcgctggctgatcaacggcaagcgcgaggacgacggcaccaagctcaccggtctctttgacgagggctcgtttgtcgagacgctcggcggctgggccacttcggtggtgacgggtcgtgcgcgtctgggcggcatccccgtcggtgtgatcgcggtggagacgcgcacgctggagcgtgtggtgcctgccgaccccgcgaacccgaactcgacggagcagcgcatcatggaggcgggccaggtgtggtacccgaactcggcgtacaagacggcgcaggccatctgggactttgacaaggagggcctgccgctcgtcatcctggccaactggcgaggcttctcgggcggacagcaagacatgtacgacgagatcctcaagcagggctccaagattgtcgacggactgtcttcgtacaagcagcccgtgtttgtgcacattccgcccatgggcgagctgcgtggtggctcgtgggtggtggtggactcggcgatcaacgacaacgggctgatcgagatgtcggccgacgtgaacagcgcgcgcggcggtgtgctcgaggcgtcgggtcttgtcgagatcaagtaccgtgcggacaagcagcgcgcgaccatggagcgtctcgacagcgtgtacgccaagctcagcaaggaggccgccgaggcgacggacttcacggcgcagacgacggcacgcaaggcgctcgccgagcgcgagaagcagctggcgcccatcttcacggcgatcgcgaccgagtatgcggatgcgcacgaccgtgccggccgcatgcttgccacgggcgtgctgaggtcggcgctgccgtgggagagcgcgcgacgatacttctattggcgtctgaggaggaggatcaccgaggtggcagccgagcgcaccatcgccgaggcgaacccgctgctcaagcacgtcgagcgcgtggcggtgctgcgccagtttgtgggtgcggcggcttcggacaacgacaaggaggtggcggagcatatggaggcggcggccggccagcttctcacggcgaccaagcagctcaaggcgcagtacatcctggcgcagatctcgacgctcgaccccgagctcaaggcgcagctcgccgcgtcgctgcagtaagcgctgccgttgtcggcggtgtgccgggcttccaccttttggctcgtgaccgcagcagcgcggagcgtggattgagggatccgcgttccgtctgctggttgcgcgctcggaggcaggcccggcttgggctcagttggcgcgcggcaaggatgcgacttgacgactgaggggttgtcaccgcatccgtgctgcttgttctttctcttctctcctcctttttcttcccggggttccccaatgtgctctatttcaccgtatagactctgactgcaatttttgatccggcttcattacg

SEQ ID NO: 12604 - DNA, 2959 bp, Oryza sativa
  ref <308>: DATABASE ACCESSION NUMBER: AK109952
  ref <309>: DATABASE ENTRY DATE: 2002-08-28
acactttccccactcgctggcccgtcaagaaggccgacttttagggattgtacaaaatgtcgtatcaacgaccccaggacccctacattcattcgaatgcgtctcagtacgatgagcgctaccagcagggctactcgcagagctaccagcagcagccctaccagcagggctacagcggcggcaatgcttccgccgccggataccgagactaccccgaccatgcctccggctaccaaggctccgcctacaaggagtcgcaggagggcctctacgccaaccagggcgccggctacggccaaggccagcagcgcaacgctgctacccaggctgccgccacctactcgtacgccaagcccaagcgtggcgtctccaagtggatcaagtttggtatccctctgctcctcctcatcatcgccggtgctgtggtcggcggaatcttcggcgcgcgagccgccaagaacaacggcagctctagcggcagcggcagcagcagcagcggcagtggcagcgtaggcagcggctcatcgcccaacgtccagggcgccgccctcaccgccgcccagcaggctgccaagaacggcggcaacaacatgctcttctaccagggcaccgacccttacggcaacccggcattcgtctcggccaacgtcgacacctcggctgccgcctactctggccaggcccacaaccagtcctgctccgactcgtggtccgccaccaacagcctcaccaacctccgtccccacccgcgcatcatgaccacccaggccgagtgggactgtctgcctaccaagatcgccaacgatgcctacctcaccgtgtggaactccaccatcttcaacaacgctaccaactgggcttcgcagccgcccgtcaagtacgtcttcgacggcggcccgaccggctcgggcattctcgacgtcagccgcgaagttcagcagcgtgtcaaggccttcgcctacgcctacaagatttccaacaacgcctccttcaaggaccgcctctacctcgagctcaacaccgccgctggtaacacggccaccgactttggccagaacggcactcactggaaccccgaccacttcctcgacgtcgccgagatgacctcggccttcgccatggcgtacgactggctctacaacgactggtccgacgacgagaaggccatgatccgcagtgcgatcgtcaactatggcctcgtgcccggtcaggctcagtaccagggtgctggttggtggaggctgcccgagaacggagacggcaactggaactgcgtctgcaacggcggcctgctcaccggcgccctggccatccgaggcgacggcgacaacaaccagaccagcatcgctgacagcatcatcaactcggccctcaccaacatgaggtccaactgcatgtcaggcgcttacgacgacggcacgtggaccgagacccccaactactggtactttggcaccaacgcacaggcacgagccctctcgtcgctcatctcggccaccggcactgaccagggcctgatggcggccaaccccaactggtacaagacttccgacttccacatgtatgtctcgggccccggtggtctctttgcttacggagacaacggcccgaacaagttcgccaccaccgccaaccagctcatgctctactcgaagctcaacggcgatgcgcgacccgccctctaccagcgtgaccgcgccgatgcggccttcgacccgctcagcatgttctggtacgagcctaccgccaagggtgccttctggaacggcctgcccctcgaccgatactttgacgacacgcgcggctcgtgggtcagcatgcgatcctcgtggaccgatcccagcgccgtctttgtcggcgtcaaggcgtccaacctcacgggacaccagacgcacggtgacctcgacgcgggcgactttgtgattgatgcgctcggaacgcgctgggccggcgagtacggcaacggcaactacctctcgaccgactacttctccaacgagacgcagggctccgcgcgctggacctactaccgcaaggccaccgacggccagaacacgctgacgatcaacatgcagaaccagaacgtggccaactgcttgcccgtcaacaactacacctcgaccggcgtcgcgcagacgggcgacctctcgttcaagcctgctaccaccgacgctgtgtcctttatcaccgacctcagcagctgctacagccaggctgctggcacggtgaggcgaggtattcgcatgctcaacggacgccgacaggtgctcgttcaggacgagatcggccagtcgagctccatcaccgacgtcaagtggcgtgtgcagaccaacggtaccgtcagcatctcgtcggacggcaagacagcgacgctcacgcagagctccatcaccgaccccaacgcgggcgtggtgggcaaggtgagcctcggcggcaccaagacgatgaaggtgcagatcctgagcccgtcgaatgccgtgttcaccgccactggtcctcccgccacgcgcatctacggccaagccgtgtacagtgcgccgcctgaggactcggatcaggtcaacaccggcgtcaccgcactccagatcgacctcgacggcacctcgtcgggcgcccagaccctccaggtgctgtggcagccgcagtgggactcgctctcggctgccgaccaggctacgcccaagtcggtgcctctcagccagtggagcctcacctcgcacaactaagtgcggctctctgcgctatcttgcttagctctggaacggagtaactcagatgggaccttaccgtctgcttctcgcctgtcgcagcagcagtggtgccgccactctgcttctgcgtttctttcgcctcatttttcaagctgctgtgctaagcttgctcagcctcggcttacgaacaatccttttgtacctttgattcggtctcgtgctcttcattatactgtcgtttcccgttt

SEQ ID NO: 12605 - DNA, 2311 bp, Oryza sativa
  ref <308>: DATABASE ACCESSION NUMBER: AK109953
  ref <309>: DATABASE ENTRY DATE: 2002-08-28
atcaacgcttcttgcgcgcacagcagcacgccaatcgcatcccctccctctgctatccctccgtctgtctcggttccgccgcttgcaagctccccacgccccggacccggacctggacctcaccttgaacctgtcccctcctcccgccagcaacagcccagatcatccccccccatcgcaccaatgtctggcgcctccgccgctcccgtgccccctccgggcgcccccattgccgtgcctgtcgagtcctcttcggtgtgggaccgcatcaccaactgggcggccgagaacaagaccattgtctacaccattgccggtgtctcgctggtcatcacgagcgccggtgtggtctactacatgaccaatgactcttccaagagcgcccagccgaagctcagcaagaaggagcgccggaaacggaaagaagccgagcgccagtccgagtccaagaagcccgagtcccaggccgacgccgccaagcagcccaagccggccgccgagccccaggagacgctgccggaaatcaccgaggagctggtcgccactctctccgacgagaagcgtaaagaatacgccctccagctcaagaatgccggcaacaaagcctacggcgccaagagctacaacgaggctatcgacctctactcgaaagccattctctgcaagcccgaccccatcttctactccaaccgtgctgcttgccacaacgccctgagcgagtgggaaaaggtggtcgaggacaccaccgccgccatcaacctggaccccagctatgtcaaggctctgaaccgtcgtgccaatgcctacgagcacctcgaacagtacagcgagtccctgctggacttcaccgccagctgcatcatcgacgagttcaaaaacgagagagcgccgcctcggtggagcgtctgctgaagaaggtcgctgagcagaaggccgaacagatcatcaaggctaagaacccctccaagctgcccagcccgacattcgtctccaactacatccagagcttccgcgtcaaggagcgccccgccggtctcgaggacgacgtggagctgccggccgagagcggcatcggttacctgcaggccggcctgcgcgccatggacaggaagacgcacgagggctacgaggaggcggccgaggccttcgagaaggctctcgagctgggcgacctaggcaagcacgaggcgctggcctacaacatgcgcggaaccttccgatgcctgcgcggccaacaggaggacgccctggccgatttggacaagagcttggagctggacccggccatgacgcagagctacgtcaagcgcgcaagcatgcacctcgagcgaggcgcgcgagaccaggcggcccaggatctcgacagggccgtagagcagaacgaccaggatcctgatatctactaccaccgcgcccagctgcactttatccacagcgagttccaggaggccgccaaggattaccaaaagtcgatcgacctcgacgcttcctttatcttctcccacatccaactcggcgtcacgcagtacaagatgggctcgatagcatcgtccatggccacgttccgccggtgcgttaagaacttcgacacggtaccggatgtctacaactactacggagaactgctgcttgaccagggcaagtacgaagaggccgttcagaagttcgacacggccatggagatggaaaagcagaccaaacccctggccatgaacgtgctgcctttgatcaacaaagcgctggccctgttccagcagaaggccgggtttaccgaggccgagaagctctgcgagaaggccctgatcatcgatcccgaatgtgacatcgccgtcgccaccatggcccagctgctgttgcagcagggcaaggtggttgaggcacttaaatactttgagcgagccgccgagctcgctcggaccccgggcgaaatagtcaatgctctttcgtacgccgaggccacgcggacgcagcttgaagttcaggagaggtacccccagctggcagacaagctatcaggcatgggcggtgctggcggcggcggcggtgctggcttccccggccgataagcccgtcaagtcgcgtgggaagggagtcgcggcagtgcgagcaggggcgcgacagcgcgttcacccccaactcgacgattgccggcacgatgatgtccgtcgggtattcaaccagacgctggggccgcactcgcattctctagtataccagtatgttacgtggatcaggtggacatgccgtactcgtttgtcagactagtaagcaacgaggctacgccacttggccgtatattcaatgagtgtac

SEQ ID NO: 12606 - DNA, 3092 bp, Oryza sativa
  ref <308>: DATABASE ACCESSION NUMBER: AK109954
  ref <309>: DATABASE ENTRY DATE: 2002-08-28
attttcttccatttccaaagccaagaaagaaagggaggagtaagtctcccccatgtcgtcttctcctcgctcccaatgccaatgtctcgccatggcgcccttgctctgaccacctccttcctcctcgcggccgtcgccgtcttccttcccgggcacgcggcggcgcggcagttctccaccgtcgccatctccaactcccccgacgcgacggtcgtgtgcgcgctcgtccgccccaaggacgtgcccgatgatgtccccggcgccaagctgcggtgcacctccatgcccaccggcgaggtcatgtcctacccctccgcggacgtcccctacaacgccatcgccgccggcaccgacttcctgtgcggcctcatggcgcccaacggcggccacgccgccatgcgctggtggtccttctccgacgaggccgccgccaaccgctcccgccccgtcggccgccgcctctactggggcccttccctccgcgccctctccgccggtggccctcacgtctgcggcctctccgacgcccacgacccgacgtgctgggagtggccggggttgagcttgcccaagggcctcgacttctcccgcatcgccctcggccgcgacttcctctgcggcgtcgtcaagggcaacgcctccgccatgacctgcttcggcggcggcatggcgccgcccgcgttcgccggggctgcttccatcgtggcggtcgccgccggccaccgccacgcctgcgccgtcgacgacgacggcggcatgtcgtgctggggcgaagggtacccggacatgcgccccggcgacctccccgccgacatgaagtccatggcgctggggcggaacacgacgtgcatcctcgacggcgacgacatggtgcggtgctggggcgtggaggtgcccgaggagtacaggcgcgcgtcgttcgtgtccatcgaggccgacggcgacaccgtctgcggcgtcctcaccaccaacttctccgtcgtgtgctggggcaacgagaggttccatgggaggcacctcatcttcaacgacaccatgcccggcgcgtgcgccaccgtcggcaactgctcctccagctgcggcttcgtccccggctccgccgcgctctgcggcaacggcggcggcgagggcggcgagcagctcgtcgtgtgccagccctgcaagctgccgctcaacgcgtccaggctcgtcgtcgggaatgggaccagcaagaatgcggcggcgccgactgattccgggaagaacaggaaggccgtcaaggtcgcggtcaccgcggcctgcgtcggcgtcgcggcgcccgtggtggctgggctggtgttgtacctcgccgtcgtgaggaagcgtggcgggaagaagaacgccaccgtgcagctcggcgagtcgtcgacgctgaccctctgccgcgacttggagggggccgtgatcatgccggcgccggaggcatcgccgccgccgccgccgctcgggtgcgaagagttcacggtgaaggagctctcgcggctgacggacgggttcgccgaggagaggaagatcgggagcggcagcttcgggtcggtgtatcgcgcgaagctccccgacgggcgcgaggtcgccatcaagcgcgcggagcgtccgcgcgcggcgtcgggcggcgggcgtcgccggcgccgccggtacgacgcggagcgcgcgttccgggcggagctccggctgctgtcccgcgcgaaccaccgcaacctggtgcagctgctgggcttctgcgaggagcgcggcgagcgcatcctggtgttcgagttcatgccgcacggcgcgctgcacgaccacctccacggccgcgtcgacggccactccccgctgttcgcgtcgtgggaggcgcggctccgggtggcgctcgacgcggcgcgcggcgtcgagtacctgcattgctacgccgtgccgccgatcatccaccgcgacatcaagccgtccagcatcctcctcgacggcgagtggaccgccaaggtgtcggacttcgggctgtcgctggcatcatcatcgtcgtcgtcggcgaccgcgacaccaccggcggcgtgctcgacgtcgtcgacggcggggacggtggggtacatcgacccggagtactaccggctgcaggagctgacgcagcggagcgacgtgtacagcttcggcgtggtgctcctcgagctggtgaccgggaggaaggcgatccaccggcaggagggcgggagcgggtcgccgcggaacgtgatcgagttcgccgtgccggcggtggaggcgggcggcgtcgggaggatcatggacgggcgcgtgccggcgccgcgcgggaacgaggcggaggcggtgtcgcgcgtggcgaggatcgcgagcgagtgcgtgcggccgcgggggcgcgcgcggccggtgatgtcggaggtggtcgccgagctggagtgggcggtcacgctctgcgaggagtccgtagaccggagctccgccgccgcccagcagcagaacagctcgcggcacggcggctccgacgtgtcgcggtcggagtccgacgaccccagccccttccacacgagggagttcgccggcgtcggacatggcaggtcaaactcagcaatgtaaaaaaaaaaacaaacgagttttatttttttatcctttttttatttattttctttgttttgttttaattagtttccacggttgctggaataggatgaattagttgctgtgcataaacatttttcaaagaggaaaaaaaagatactgagagggagtattcattttgatgttgattgttacttgaattagtctaggagagtttttgattgcttttgctctgtgaacaaaattcataagagtttgacaaaatctaacatgtacgttgtatatcaagatttattgacacaacataataatataataataatactagttggagtagtgggtggtttgtaagtacaatcttgttttttcttctgttttgatttgttagcttagaaattttcggagggttggtaggttagattagacaaaattattaatttgtggccttgtgagagtgtggagatgcaacaactgtacttcttccaacaaactgcttttattatataatgtaatacttggagtgc

SEQ ID NO: 12607 - DNA, 3826 bp, Oryza sativa
  ref <308>: DATABASE ACCESSION NUMBER: AK109955
  ref <309>: DATABASE ENTRY DATE: 2002-08-28
acctccagctggtgagcagcactctcacccaccactagacagcaccacctgccccatggtcgccgccgctgctgcgctggtcgcctccagcgcagcgtctggctcccccccagttccctccgccaaggacgactcgcaggcccacgcattgcatagagagcgcgaccggaaacgtcgccagcttcgcgcagccaacgtaggcgtgtggtcggccggtccagctccacccgcccagtcgctcgactcgaacctcaaaaagaacaccgcctacgtcaagcgggcaaagcagagcatcggtcacgatgcgcgcgaccagctcctcaaagatctgccccagctcaatctcgaaaagtacctccaggagctcatccaggccgtgtccgaagcactcacccgctgcgtcactgcaaaggactgcatagctgccacagagatcatatccgcctttcacgcacgcttcggccccaccaccttcagcgagcctctcaccacctcgctcgagcacgccctcgctcctccttccaagactctgtaccagagcgccaccgcagaacagaaggagagggacgaggcagctcgagtcgcgcgtcagaagcccttgctccgcgtcacagcagagcttgccctcgtagacgccctcggtcacacccgcgacgcacccacaggctccgactggctcttcagcatcatcaaagccctcttggcaacggacaaggaccacgcaaacgtgcccttgctcatttccctcctcaaaggcttggggcagaccctgctgtctccggcaacgtcgcccaccaaagatgacgattcactcctcgcaaacaaggccagtggagcactcaccatcggcgatgcagtagacatgcccgccattgcagcactcgatcctgcctcggcacctctcgtgtcgccggacatgcaggcaaagttccgcaaactcttcgagacctacttccagaccctcgctcgacgcgtcgtcaaggagcatcagcggctccaggaccaggatcgcaagaaccacgaagcctacatccgctccggcgagatctttgaagaccgccaacagaactacgagcgcatgacaaagagcttcgagcgcgtccgcgactgggtgcgcatcctctccgatctgctcggcgtcgacatgcccgacctcgaatcctccgcttccgccaccaccgccgtcggcttgggcgtcaacctcgaatccaagtccgccttcgaacgcgcagacgaagagtttgcctcagatcagagcccttgggaagaccaggactcgcaaaagttctacgaggaccttcttgatctcggcgacatcgtcccaccctccatcttggcgcagacaaccggcatcagcgccgcctcatccgccaacgctgacagacacgacgccggagaggatggcgcaaatcgcgcagaagaagagaaagcatcgacagcagccagcacgccccagctcgacgccgacgcgggcgacgagaccatgaacgcaggcccggccgcgcagctcgcaacgctcatggccaagctgcccgacatgacaaatcgcagcatgatcgacagtgccgccgtcgattttgcctttatcgccacaaagccagcgcgcagaaagctcgtcaagcatctcgcttcgctgccccgcaaccgcatcgacctcgctccctactatgcgcgactcgcggccaccctgtctcgctacatgcccgacatcggcgccggcctcaccgcgctcctcgaggacgagttccgctaccttcagcgcaagaagaacgccgacctcaccgagacgcgcgccaaaaacgcccgcttcatctcggagctcaccaagttcaaggtgacacccacgcatgccatcctgcactgcttcaagacgtgcctcgaggacttttccggtcccaacatcgaggtggtcgcaacgctcctcgaaggctgcggccgctacctcttgcgcaccgaggacacctcggtcaagatgcgcagcatgctcgagatgctccgacgcaagcgtgcggctgccaatctcgactcgcgccagctgctgcttctcaacaatgcctactaccagtgcaacccgccaaagcgcaaagccatcgagcagaagtcgcgctcgccgatggagctctacattcgccatctcatctaccacctgctcgccaagaagagcgtcgacacggtggtgctgcagctgcgtaagctggcttgggacgatgccatcgtgcatggctggctcaaggacgcctttacgcgcgcctggcgtatccgctactccaacattcacctgctcgccatcctcgtgtacgatctggaccgttttcatccgtcgtttgccgtggacgtgatcgaccaggtgctcgaaaacatccgcatcggcatggaggagaacatcttcaagcacaaccagcgccgcgttgccaccgcgtgctatctcggcgagctgtacaattaccgcctcgtcaacagcggcatcgtgttcgagcagctctggtccatggtcaccttcggtcatgccaaggggaggccctggccgggtcaggtggcacccctcgatgcaccggacgactacttccgcatccgcttgatctgcacgctgctcgacacgtgcggcgtgtgcttcgaccgcggctctctgcgcaggaagctcgacgactttctggtgtttctcaacttttacgttctgtgcaagcagcagccgctgcccattgatgtcgactttacgctcaccgagacgctcgaggcgctgcgtccggagctcaggttcaaaaagacgttcggagaggccgcagcggcgttggaagagatgatggcagccaacaggcagctagcgccgcaggcagaggccgaggcggaggaggagagcgatgggaacagctcggatacgcgcaggcagggcagccgggccgacgcacacgaggccagtgcaacgcgaggctcggaaaagcgcaggaggaaccaggctcgcaaccaggcggcttccgacgcgtctgacagcgataactcgagcgattctggctcgtcgtcgtcgtctgggtccgactcgtccgaatcggcgtcttcctcctcgtcgggtgattcggacgcctcggacagtgacgcgtcggactctggctcttcggacgtcgacgattcggacgacgacgaggcagcagccgagcgccatctgcaggaccaagagcttgcggcacgcagggaggcggacgacgagttcgaccgcgagctcgcgcgaatgatggtcgaatccagcgcaccttccgccgccacagcgcaatcctccgtcggcgcttcgacttcgcaacggccgcatgcattcttctctcgtgccgcgctcgcctccagtggggccggctacggccatgcgcattcgcacgcgcacgcgcacgcgcacgcctccgggtccagcctgtccgagatcggactgcccatcaaaaagaaggcggccgaacaggcggacggtggtgtcgaggtcgaggcaggttcgcatatgaagttctcgctgctctccaagaagggctccaagcaggtcacgcacgaggtacacgtgcccgccaccgcttcgatcgccatcaacacacgcaccaagcagctgaaagaagaggcggagcgcagacagctcaagcagcagatcttggcgtacgaaagatcgtccgagtcgcagcagcattcgggcctccaatcccagggtgtcctgcgtcgccagcaaccgcagccgcagccgcagcaccaccacagggaagaaccggccaacagggctgccagcaagggcgacgatttcaagatctggaccagccatggcttctagccgccggttccaatgaaagcactaccaatc

SEQ ID NO: 12608 - DNA, 4236 bp, Oryza sativa
  ref <308>: DATABASE ACCESSION NUMBER: AK109956
  ref <309>: DATABASE ENTRY DATE: 2002-08-28
cacggccactgtgattgctcgcaggggcaccacgcaccacccttcgcctcaatcacgatcgacgtgcactcgcatcgcagatcgtaagccagggacaccagaggctgaactccgatagcgctgaggcgcttagtttggcagccaccctctcgttgatcaaaacatcaaggcctgccgtcctcgcatgacctcggccgctcttcggcctatctagcagagatggcctcgctcgacaagctcgccattcgcggcgtccgttcctttgacgacaagtcgatcaacatcatccaattcttccagccgctgactgttatcgtcggctacaacggcagcggcaagaccacgatcatcgaatgcctcaagtatgccaccaccggcgaccttccacccaacaccaagggcggtgcctttgtgcacgacccgcaaatggccacctccaacgaagtcaaggcccaggtgcgtctgcgcttctatgccgccaacaaggtccgcatgaattgcgtccgcaaccttcaggtctcgcgcaaaaagggcggcggcctcaccatgaagacgctcgagggcctgctccagatcgccgacgacgacgccaagaccggcaagcgcggcactctctccacaaagtgctccgagctcgacgaggagatccccagactgctcggcgtctccaggtccatcctcgaaaacgtcatcttctgccaccaggaagacagcaattggcccctcgccgagccagcgagcttgaagaagaagttcgacgatatcttcgaagcgacgcgctataccaaagcgcttgacaatatcaagagcctccgcaaggaccgcaccaaccagctcaaggtcgacaaggcagcgctcgaggggctcaaagtggacaaggatcgcgcagacaacatcaagagcaaactcacccaccttcaggccgacctcgcgcagaaagaggccaaactcgaggacctcaacgaagagatccgcatcaagaccgtccaaaactccaaattctacgacgaagccactcggttccgcgagatcgtcagccgtgccgagacactcgaagagaaggagaggctccacaaggagaacatggaggcgctcaaagccaccatgacgcccatcaaggacagcgacgaagacttgcagaagcgcaagcagaccttccgcgcacagctcgatcagagccatgccaagatcagcacgctccagacgcgcatcgccaagagggaggacgagctggagacgcacgagcagcgtcatcgcaagaagctctcggacaagggcggtctcgaggccgaaaagcgcgcccacgtccaagcaaaagagaagcgcgagaccgccgtcaagaagatcagcaccgagctcggcatcaagggctttgcaggcgacggtctgagcgatgcacagatccggtccttcgaagaccgtgtcaaggaggacgtgcgcaagctcgacgacgaactcgggcgtctacgtgaagcaaacgcccagaaggacgatcagctcaccactgcatggcaaaatgctcgcgccgagctgcgcgccaagcagaacgcgcgagagcagctcgtcgacaatgtgcgcaagctgcgcgaaaagatcaagcgtgcacaggaggagctggacggctatgcgctcagcgatgccgacgtcgaagctgcgacgcgcgaacgagagaacctggccgccaaggtgaccgcagcgcagaaggagttcacagatgccaactacgacgaacagatccgtcgcaagaacgcagagatccgcgagaaggacgatctgcgagaagagcgcaccgccgagatcaacctgctcaatcgacatgccgagctgcgagcttctctcgccctcaagatgcagcaagcaggctcgcgccgcaccaacgcgcaaggtcttttcgaccgccacaaggcctcgatctctcagcacgtctcctcgaacgtcgagctctcgtccgtcgagaacgagctgacccgggcgctgtcaaagctcgagaagcaggcttccgaagtcgaggcgaagaacgtcgtaaagaaccgacagcttcaggaggtcgagtcgaccatctcgttcgctcgcaaacagctcaagagcaaagaagcggcggcgaacgagctgcagcaggccatcactgcgatcctgtcgcccgactttgacagcgccgaggaagcggtcaaggtctgcgcagaggagatcgcagccgccaaggacgagtatgcatcgatcgactcgctcgattccttcttgagacgtgtcctgcgcgaagcaaagggcaagggtcactgctttgcctgcaatcgcggcgtcactccgggcgagtacgaagctatcgaaaagcacgtctcctccaccctcagcacgagcaacacaaccgaaaagaagaagacgctcaaagccgacatcgatggctggaccgagaggagcgccgaatgccagaccgcccttgccaaagatgcccagctcaaggccatccgcgacaacgaaatgttggacctgcgaaagacgctggatgccaaagaagccgaactgaagcaggtcgctgcggccgcggaggaagcctccgccgaagtgtccaagatccagtcccagctcaaggagctgcaatcgctgagacgggtcggctccgacattgcccggcttctgtcggaagccggcgacctggaatccgaggtgcgcggcttgcaaagtgatctcgccaccaccggctcgacgcagacgggcgaacaggtgcaagccgagatcgacgagctcgcctcgtccatccgagtgctcaagcgagagctcaacgtcttgcaacaagaccgcgagaccaagcgcacgctgatcaacagcctcgagcgagacgcacaccgagccgaggtggctgtcatcaccaaacagcaggagcaggccaagaagactgccgtgcagacgcacctcggcgagatgagcgcggactttgacgagcatcagaaacgcatcaaaagcctcgaagccgagatcgagacatccaacgcaccgatccgtcgcgccaaggaagagttggggactttcaaggcggaggctggtgaagcggagaacaagctcaagaagcgagcagacgagctcgaaggctgggccaagcagatccgagaactcaacgccgctgtcaacgcctacctccaacagcgcggtgacaagcgcctcgaggagtgcgaggaagccatcaacacgctcgtcgagcagatccaagccattcaccgtgatgtcaaggagctcacggacaaagccgccgagctgcagaaggagctcaaccagtcgcaggccaccgagcgcaacatcctcgacaacattcgctaccggcagctggccaaggatgtagcgcagatcgaggaggagatcaactcgctcgacctcgagcaggcgcagcgcagccgcaagcactttgcagacaagtacaccgaagccaaagaggaggagaacaagctcaacggtgaagcatcgcatctcagcggagagcttgcatctctgcgctcgcagatcaagggacgcgaggcagagctgcgagacgagttcaaaggcgtgcatcagaactacaagcgcaagctgatcgaggtcaagacgtccgagatggcgagcaacgacctggagaagtacgccaaggcgctcgaaaacgccatcatgcgataccacgccatcaagatggaggagatcaacgacattgtccggtacctctggcagaagacgtaccaggggaccgacatcgacacgatcctcatcaaatcggacaacgagggcgcgcgcggcaaccggtcgtacaactaccgcgtgtgcatggtcaaggatacggtggagatggacatgcgcggacgctgctcggcgggacagaaggtgcttgcgtcgatcatcatccggctggcgctggccgagtcgtttggcagcaactgcggcatcctggcgctggacgagccgacgacgaatctcgacaaggacaacatcgaggcgttggcgagaagtctggccgacctgatcaaggaacgcgccgagaacagccagctgcggctcattgtcatcacgcacgacgaggacttcttgaccttgctcggccagaacgacgtgctcgagtactactggagggtcagccgcgacgtgcaccaaaagagcatcatcgaacgcgagcgcattcgcaacacgtgaggcggggcggccttcaatccccactctttgttcctgttacggtaacttagtctcgctcgtctcgcaatcgcagcagcatagcatgtg

SEQ ID NO: 12609 - DNA, 3002 bp, Oryza sativa
  ref <308>: DATABASE ACCESSION NUMBER: AK109957
  ref <309>: DATABASE ENTRY DATE: 2002-08-28
accttgcctcgaccctcacaccgtcctgtcctagctgcaccgaagctgccactgctctcccactccaccatctgcttccgcagcgtttcctccctctctttccccatcccaatctcgcactttccagtcacatcggaagcagcccgtttaccccaacaatccccctcatcgctcgaaacgcagacatgtcgtccgagcgagagccccttttgcccacccacgcccgccaggctcgtgagagcgtcgagcagtacggcaggcaggccgcgcgcgatgccaaggctaccgcgcgccagtacggcgtcgacccggacaacctcggcgagcaggcacgccagatggccccctcgcgccagacgctcgcccgcatcgcccagatggtcggcgccttcaaggcgggcaagatgcccagccagaagcagctcaaccactttatcgaggccatcatgtcgagccctgtcctcgacgagcgctccgtcgccggatccaccaagctcagccagcagggcgccaaggtgatccaggacttcaagggcatcctcgcctgcatcgagcgaatcggcgagagcaagaacggcgacgacaagatccaaaagttcatcttccagacctcgcaggcctcgatcaacgtcactgaccagggcggcatctcggcctcgcttcccaccgccaagtcggtcggtgccgagggcctcacctcggaggccaagcaggacgtgggcaaggtgctcggtgagatccagcagatcgggcagctcctcctcacctccaaggccttccgcgacgtgctcgccgacgttcagttcctgctgcgcgacctcaccgccgacgccgcagccaccgctgcgcagaaggcgggcggcgccgagggcaagctgcgcgtcagcgacgaggagcgcaagaagcgcggcgacgccgtcgaggtgcgtgctcccaacaagaaggacctcgagagcgccaaggatgccgccaagcgcggcgccaagcaggcgcaggacaacctgcaggacttggccaagcgggcggcccagtggctcgacgaaaagacgcccgacgacgtcaaggaggagttcctcgagcgcgtcaagcaggtcatcgacagcgtcgagcgcgatcccgactttaagcgtgcgctcaacggcatctatggcatcgccaacaagtggaccgacattgtgcaggatgttgccgccaaggccaaggagcagaccgacgtcgatattgacacgcccgaggccgaggccaacgagaacctgcgcgaggcgttccagcagctcaagtcgatcctcgagacgtttgccggccgtccgctcgagcctgtggagaagtcggtgagccagctggtggagcacgccaagaagatctttgacgacgagagctccaaggagggcaaggagctgcgcgagtttgtcgaggacgtcaagacgttcatcgaccgtgcgctcaacgaggacggcttcatccagacgaaccgctcgaaccgcatggcgtcggacctgtacgaccgggcgcagcgcctcttcaacgccactggcaaggaggccaacaaggcgctctcgaagctgcgcggcgatttcgacgccacgctcgacgagctgtcgacgtttgtgcacggcctcgaggaggatgcggagctgcgcgagctggcgcagcgcgtcgagaagctgggcagcgacctcaactttgtcgacctgcagcgcgtgttcaacagcggcggacagggcgtgctcaacctgctcaacgacgtgcgcagccaggcgggcggcctggtgcgcgacacggtcgaggtgctggtgccgcgcctgatctacgagatcgagtcgatcccgttcccacgcatcgagtttgtgtcgcgcgaggcggacgtggtgattgacaacctgtcgctcacggcgtcgcgcgcgtcgtttgtgcccgagcgcgtgcgcatcatcaaccgcaacgacctcacgctcgaccagcgccgctcgtcgtttggctccaactttgacgcctgcctctacctcgagatcgaggggctgcgtgtcaaggcggccgatgtggcgtactacatcaacaagaagacgggctgggtgggctgggaggactacggcctgctcgacctcgatctcggtggacgcgacggcacgagctttgtggtgaagctcgaaaacgccgacgaggacgacgccgagtcgttctacaaggtgaagcgcgtgagcgtcgacatgtcgtcgttccaggtcaaggtgcgccacacgaagcactggttcctcaactttttcctcatgccgtttgtgcgccccatgctgcgccgcgtcttccagcagctactcgaggagcagatccgctcgtggctccagaaccaggaccgctcgctctgggccgcccagcagcgcgccaaggtgatcaacagctactcgaagacggccgtcaagagcggccagggcatctcgaccaaggcgtatctcaaggcgatctttgcgccggactcggatgcgtttgagccgtacggacgcaggacggcgcagccgcgcaccgaggtggggcttgccgagggtctgcaggtgcagggaccgcacgatggattcaagctcgcgattggtgcgtcgtattccaagcagctgctgcctggacgcggtggtccgtttaggtatgcgagggagcaggcggagcgctacaagcagattgaggagttggtgcgccagggcgtgcgtgagctgcgcgagggtgccagcgagctgcgcgagggagcgcacgaggcggttcagcaggtgcgcgacggcgtcaagggcctcgagggcgaggcgagcaaggccggctccaaggcacagaaggaggcgggcaagctcagccgcgaggcacgcaagcaggagcgcgaggagcgtctcgactccggttggcgctcggacgtgtttgacgacattgacctttgatcccgcatcccccacaaactcatgttcgatgttggatgcgtaagcgcatgtttgtattgattcgcaatctcgagttcgtaagctggt

SEQ ID NO: 12610 - DNA, 2828 bp, Oryza sativa
  ref <308>: DATABASE ACCESSION NUMBER: AK109958
  ref <309>: DATABASE ENTRY DATE: 2002-08-28
ctagtcgccaggaaagcgcaactcccctcagcggccgccattaattccccctcgaccctccggcaagccacgctcccgagcacgcagcaaacatgtctcgcttctttgccgccagcgacagctcctcggaagagtccagcgaggaggagctctactccaacgatgaggagtctgagcaggagaactcggacatggactcggacgaggatgattccgacgacgacgactcgtcctcggactctgagggcggcggcgccaaccgtttcctgaaggacgccgacagtgacgactcgagcgaggacgaggacacgaccaaagtgctcaagagcgccaaagacaagcgcttcgacgagctggaggcgacggtaaggcagattgagaacgcgcagaagatcaacgactgggctgtcatctcagaccagttcgacaagctgaaccgccaggtgcctcagttgatgtcgctcaacgatggcaaggtacccaagctgtacgtccaggccattgccgacctcgagaccatcgtccttgagacgcacgagaagcagaaggtcacccccaagaagatgaacgccgtcaacacccgcggcttcaacgcagtgcgccaaaaggtcaagaagcacaaccgcgagttccaaaaggacatcgatctgtacagggagaacaaggacgagtacatgcgcgagacagacgaggtcgagcaggcgcccacagacaagaagaagaagaagaagtccaagattccccagctcggcactgagaccatcgaggacgcaaccgacgacggcttcattactgtcggcgccggtggaaaggcggttcagtacacacccgagggcatcctcaagcacctgcggtcaattgtcgagcagcgaggacgcaagaactccgacaagctcgagcacatccggacactcgagaagctctttgacgttgctgtcaacgactaccagaagatccgcgttctgctcacattgatctccactcgtttcgatctgacatctggaactgcgagccacatgcaccaggagcagtggaagcttgccgaccaagaattcggaaagcttctagagatcctcgagaacacccaggagattgtcgtcatcgagggcgctgaggagtgggaggatgacgagaagttgcctactatcacacccggcgagattttccgcattcccggcagcgtcgtatctttcgtcgagaggctcgacgacgagcttacccgctccctccaacacatcgacccacataccgctgagtacgtcgagcgattgacggacgaggctctgctgtacgcccagcttgtgcgcgctctgatctacgtcgagaacctcaagaagaacccaagcctcgacctgccacaagacgcattgaaccgtgttgtcatgcgaaggctcgaacacgtctacttcaagccctcgcaagtcgtcactatcatggaggcgaacagctggaaggccatcccagccagcctcgactccacagtcacccctcgatccaactccaacgacaccacatctctcgtccagatcctcagcacatacctcttccagcacagcgaaggcatcatccgtgcccgagccatgctgtgccagatctacttccttgctctgcacgaccagtactacaaggcttgtgacatgatgctcatgtcacatttgcaggagacgatcagcaacttcgacgtcaacacccagatcctcttcaaccgcgcattggtccaggtcggtctctgtgcgttccgtgcaggtctcgtatacgagtcgcaaaactcactgcaggagatctgcggtagcaacaggcagaaagagcttcttgcacaaggtctccagatgcagcgcttctcacaaatttcgccagagcaagagcgcctggagcgccaacgccagcctcctttccacatgcacatcaatctcgaacttctcgagtgtgtatacctcacttgctccatgttgctcgaaatccctctcctcgcacagctcggctcatcgcctgacctcaggaaacgagtcatcagcaagacctaccgtcgtctcttagagtaccatgagcgccagatcttcaccggtccaccagagaacacccgcgaccacgtcatgcaagcgtccaaggcattgtccgctggcgagtggaagaaggccgccgagttcatcaactcgatcaagatttgggaactcatctccaactcggagaagatcaaggagatgctgtccgcccagatccaagaagagggtctgcgaacatatctcttcacctacgctcctttctacgacacactcgccgtctccacattggcatccatgttcgagctctcagaacgcaaggtctcagccattgtctccaagatgatctcacacgaagagctcgccgcagccctcgaccaggttaactcggccatcatcttccgcaagggcgtcgagctctcaagactccagaccctcgccctcagcctctcagacaaggcatcaggcctcatcgagtccaacgagaagacgctcgagcaacgcacacaaggcaccgccaacgctttcgagcgccaaggcggtcgcggcggacggggcggtggccgtggacgaggcggcggccgtggcggaggcgtgccgcgtggtggaaggaatcagcagttcacgggaggggcgctgggacgcgcgattcaagcttagttggaggatgttcctaacgatgcagcgctgctttggccgcgtgtggggcgggtaagttagttatcgatggatggatggacgggcgttgatatcatggggtcaattgtccgattacgaggacaatggatggtatagagtgcattttccaatgaaaaaaggtataacttg

SEQ ID NO: 12611 - DNA, 3801 bp, Oryza sativa
  ref <308>: DATABASE ACCESSION NUMBER: AK109959
  ref <309>: DATABASE ENTRY DATE: 2002-08-28
attgcctttcatatctcccgcctcgtcttgaaccggatcaggaggttgaggtgcacttgcttgccgctcatcctacacatagcctgggagtagacgtaggcgcaggactccgggtcgatcacagctggccgtcagagcattcccgcatacagcgaaggatacccactgctgcttgtcgtcgaccacggccagaagttggtgtcacacaccgttgcacgtctgcagacgcacggcttgcatcgccttctggaattactgtcgctcgcttcgactttgcatccgctttgggattggagccaagcaagtgcatctcgacctccagtctgtattacacggggtgaaagaggacgtctgtcgtcgccgctcagcccagcgtcgttgctcacagcaccagcgttacggctcttgtgtgttgcaccgagacgattgagcagttgtcgacgaacctcccttctctgaattcgtttgggccgaggagccagagacgcaccgatttgagtggatcgctctcgttccactccttcacggcccaaccgaacaaagggacattcacctcgactcggccgccccattcgcaagactcaacaggcgtgtccatcccgccaacaaatccacaaggccatcccatcatctaggttctctcgcttcccagtcaaacgacgccagcatggacccgcaaacgagctacgacgcttggtccgtgcagcaggcctggcagtctgccaatggcgacatggtgccgatcggtgcgcaaggtacacagaccttccatgcctttcaagacgcgcagcagcaacaacaacagcaacaacagcagccgccatataatcattacgagcagcaacagcagcagcagcagcagcagcaagtgatgacatcacatcatctccaacaattcaacgcagaaccaatttcgggggcacctcaggcttcgagcagctatctagcacagccaaccaccgtcgacgccaacatgttgcgcgagctgcaggccatgtatccgaatgctcacccggacatgctcatgcaagccatcttgcatccttcagcatccgcttcgcagcccgcaaacttcttcccggcagcgacgcagcagctctctcaagtaccccaccagcatcagccccagtggcaaggagctgctccagtatcacaggcgtcgtatcagccctcctcgtttgcattggcacccccggcgtacaacggcgcagcacaaccgcctcacgataactacggcgatcagtccgggcactctctggcagacgcgctgcgtttcacgccggccgcctcttcaacgcctgcagggtccacgacgagtctgcaagccaccccggcttcctctgaagctgatgcgtccggtgagaagaagaagcccaaacttcgccaactcaaactcacctcgcttcttggtgttgcccagtcggtcagcatggaagggcagcaaccgctcccgccgacatcgtccaccccccaccccacaacatctggctcgcccgaatccagcacagaacctcgcacacccccgctgccgccagcacgagtcatggcggcaaagccagcaagctcctccggcgcgagtacggatacggctgccgcccaacccaacgccgccaagcccttggcgacagccgacggcgtgctgtggtccaaggcaaaacaaccgcttggccggctctcggtcgagcgcgaccccactacttcggcgagacagctgatcaagatcctgtgcgagttcgatgccgagggcagattccgcagaccagtctcgacgggtgccgaagtgcgcaagtcgctcgtggaaacgctacatgcgatcgcgacgctcgaaaagggaaagggattctccgagacaggacgcaaaaagtttttcggcgcatggatggcgagccccgcaggccgacacatcctgtccacctggctgcgccagacggtgccgcccaagaaggtgatcgaaggcgctccggacttgagccgacgctacagagacacgctgctgccactgctcgccatcctagactatgtgcccatgcgcaaggcgtatctcaccgatgaggccggtttggggaaggcgatcacgggcgtctctttgcgcgctgtcgaccccggcgcacgcaaactcgccgagagtctgaaaataaaatggaccaaagtcattgaggccgaagactcgacgtcgacgtcgtcgtccaaggcaagcccaccggccgcatccacgggctcagcggctgtcaagcgcaagccttcggatgcggctggcacgagcgaaagcagcaccaagcggtacaagacggccacatcgacgacggccactgccgccgggaccgccaagacggccaagccggcgtcatcgtcgtctgcaagcgccaagccgggcctgtctttcttcggagccgacagcatgaagaagcctgttgcggcctcgagcaaggtgtcgtctggcgcgacgggtgccaacaggatgagcgcgggccagagtgtgatgaacttcctgggtacgctcagcgggggcaacagcggcagcaacagcagcggcaatcgggcggtgggacgacctggcaaggaagcggaaggcaaggctggcacgcaagaaaagaagaaggtgaagaagcgggtgacgtggaaggaggacagcgagctggtggcggtgaggctgatcgagcctgccgactatgggcaggacgatgcgcagcacgccgagctgctggagaaaggattggaaggggtggagcacgacgagggagatgcgctgcgccagtcgttcagcacgatggaagcgcagacggattggtacgagccgcgtgaggtggaggtacccgagatgatgcaagtggtgttgggcagcgaatcggtcgaggggcctttccagacgcgacgccatgcggagctggaagaggtggtgtacgccgagggcgaggcgcccacgagccccgatgaaagccagctcgagcgcccgggaacgatgtctgaaactcccgaggagctcaaaggggcagagagtgtggagatcccgacgccatggatgggcgaggccgacgtgacgggcggtgaggactatgcgtatgcggaggaagcaggcatgccggaagtcaaggcggaaggatccacatccgacgctggcgcagcgagcgggagtggtggcggtgtgccgtcgcaagccgacatcggtgccctgctctcgaaagtagggccgctgatgggcggaaaggcatcgaaggcaccttccagcgaggcttccgctagctctgcgcccgctcccgcgcctgccgggctcaactttgacatcaacgtattaaagtcgattgtggaccgagccaagagcagcggaccggctgcgtctgcggtcaacgcagccatggcttctcagcaggtgacgacggacggcatctcgtcgctgctgtcgagcttatccgccaagggccacggcgttgccgcgagacaggtggaagagagctacccgggcgagtacaaccacgactacgtgcgcacctcgagtgcagccccgcagtacggcggtgggcatcaagcgtaccagcagcctccgcgttacgactacggcaacaatggtgcagcgtggtccggcccgcactcgaaccagtacggaggaggaggatatggaggcggcggtggatccacagccggagcgtggcagtccaagctgcacaccaagccgtgcaagtttttcgcgatgggcaactgcttccgcggagactcttgtcactttcgtcacgacgctgccgacacatggggcgaccagcaataactctcgcacatcgattcaggaatccactcagtcgttcagtc

SEQ ID NO: 12612 - DNA, 3892 bp, Oryza sativa
  ref <308>: DATABASE ACCESSION NUMBER: AK109960
  ref <309>: DATABASE ENTRY DATE: 2002-08-28
ccacctcctactccatcatcatcgtcgtccgccattcggttccacatcgcaacagccgtgcgggtatgacgccgctccttggcaaccaccgcttttcatacgcgactacgacttacgcgcctccaccgcgtcccttctttacgcgtctaccctcgggactgccccctctgcagctacacgcagccatgcaggcgtaagcagccaccatcatgcctgtcacttctcgcaggtcgtccgcattgccaccgccctctcccgccacttcgcctcggaagcgccatcctctggctgaggagaccaatctcaacatgaaacagtcgcgatcgcaggccgatttgggcccccagcagcagcagcgcaagaggatcaagcggtcgccttcccaagacgctcctccctcttcatccccgccatccgcctcgcaggacgcagagactcgaactccacgccagactcgcagccagaacggtcctagctccagctcgccagtcaagcgcagaagaacgtcgcctgaactaacaccgaacgccaacggctccccctcgcgtccacgtcggtccgctgccaatgcacacagcgcgtcccaaaccaacggcactcgagcgccggagacagatgacgagctatccgacaacgacgaagaagaatccctggacgccgagcaagacgatgcaccctcggctgctgccgactcggcacatgccgccgacgcagatcaccgccaggatcgctcgccagacggctacctgcccggcgccatccgccgcatcgcgctctccaactttctcacctacgactcggtcgaattccacgtcgggccctacctcaacctcatctgcggccccaacggcaccggcaagagcagtatcgcctgtgccatcgcgctcggcctcggcggcgcacccgccctgctcggtcgcgcctcgcagctcggctcgttcgtcaagcgcggcgagacgcaaggctggatcgagatcgagctgcaagccgcgcccggcgacaccaaccccatcatcaaacgcaccctcaccaccgccagcaacaagagcgactggttcctcaaccgccgcgcctccaccaaaaacgccgtgctcgaggcggtggccgagttcaacatcgacgtggccaacctgtgctccttcctgccccaggacaaggtgcacgagtttgccaagatgaccgacgccaagcggctcgtcgagaccgaaaaggcggtcggcggagagcgcctcgtgcgctggcacgccaagctcagcgcgcaaggcaagcaggccgccgagatcgccaccaagctcaaggagaggcaggacgaaaaggcgcacctcgaacagcgcaaccaggcgctccaggaggacgtccagcgattcgaggagcgcaagcagatccaggagcgcatcgagcgcctcgaagtcatgctcgccatggccgactacaaccgcaccaagcgcaacgtacaggaactccagcaggagcgcgatgcgcgtcgccagcagctcgccgagattgcgcagcgcggccagcccgtgcgccagaaacgcaccgagctcggggaaaagacgactaagctcaacctcgagctggggcgcctcgagagcgtgtatgccagcgacgacaagaagcggcgcagcctcgccaagacggtcgaggagctcggcggcgagatcgagaccaagctcaccgaggtgggcatgctcaaccgcaaggacgaggaccgcacgcggcgcctcgccgagctgcgcagggagatcgccgagcgctccgcgagtctgggcgacgagccgggtgcgcaggatacggccgaggtggaggcggccatgcgcgccgtgcgcgccaagcaggacgactgctcgacgcgctgcaacgacatgcagcgccagctgcaggacgtgcgcgtcgagagccagacgatcgaccgcggcatgcacaactaccgcgagcagctggcgcagctcgacaatgtgccgcagcagcgtctggagaagatccggtcggcggacgagcacgtgtaccgtgcgaccatgtggctgcgcgagaaccagcaccgcttccgcaagcgcgtgcacgagcccgtgctgctcgagattgcgctcaaggaccagcggtatgcggcggcggtggagtcgtgcatcccgtgggtggtgcaaaagtcgtttgtgtgccagacgcgcgaggactacgacacgtttacgcgcgagctcatcgacacacaaaggctgcgcatcaccgtcgccgaggtggagggcatcgcgctcgacagcatgcggcccgatgtgccgcgcgagcagctggcgggcctgggcttcgagtcgtacgtgatcgacctgatcgacgggcccgaggacgtgctggtgcatctgtgccgacagtcgcatctgcaccgcatgcccatcacgctcaatcccaacgtggatgtggagcgcatcgagcgctcgggcaagttccgacgcttcattgcgggcggcgagaactttacgatcaacgtctcgcgctacggtgcggatgtgcgccagaccgtgtcgcggcgcattgggcctgcgcgcagtctggtggatgcggtggaccgcgagcgccaacgtacgctgtcgaccaagatccaggagctgagcgacaagaagaagcagctcgaggcgagtacacgcgcactgctcaagagcgaccagacgctcaaggcggagaaggcgcggtacgacgagcggctagaggagctgcagcgcgagcggcgcgacaaggtgggcgcgcagaagcagtggcagcgcgagcgtgcgctcatcgaggcgcgtcggcgcgagttgcgggacaaggagcgcgagccctcgcgcgaggagaagcgcgcacggctcatgaaggaggtgcgcgcgctggcgcagcggcgtgcgcacaaggcgcaggacctgtgtgcgcaggtggtgcagatgagcaaggtgggcgaccgcaggcatgcggcctcgctgagcaagtggcagtgggacgcgtgcggcgtgctgatcgagaatgcgctgcgcgacgtgcacgaggcggagcgcgaggcagcatcggcgttggaggcggcgcaggcggcgcatgtgcgcgcacgccgcgaggcggccgacctgcgcgcgcacgtccagcgtctcatcgacgaggccggcgatctcgttgccggcttggaccccaacgatgacgagctgctcgacaccgatcggtgcagtgccgaactgcgcgccgagcagagtaagctcgatctggccgaaggcgtccgaccggaggtcatcgagcagtaccgtgctcggcagcgcgaaatcgcctcgctgacggacgagctcgaggcgttgcggcagcttcagacgcagaccactgcgcgcatcgcctcgctgcgtgccaaatgggagcctctgcttcgacgccttgtgggccaagtctctcgccaattctcccgtgctttcgatagtatgggacttgcgggcgagctgcgcattgtcgaggatgtcgatttcgaaaagtggaagctggaaatcatggtcaagttccgcaacgccgaagagctcgctccgctctctgcgcaacaccagtccggaggcgagaggacgctgagtacgatcatgtacatcatgagtctgctccagctgtctcgttcgcccttcacactggtggatgagattaatcagggtatggatccgacggcggagagggtgacgcacaatcacattgtgcagctgacctgccaggagcgggcgagccagtactttttgatcacgcccaaactgctcccggacctggcggttcaccggaggcaaaaggtgctgctggtgaataacggcgtgtatgctcagaagaggtttcagctcggtccgatcttggaggctaggaggagagccacaagggcgtgattgcgcaatgcaaattgtcgtccccg

SEQ ID NO: 12613 - DNA, 2777 bp, Oryza sativa
  ref <308>: DATABASE ACCESSION NUMBER: AK109961
  ref <309>: DATABASE ENTRY DATE: 2002-08-28
atataccccacctatgtcgctcactttggccgtttagcatctccataccgtgatatcccgcattttccgtgcatcgcattccgggcgtcttcagagcccctgtttccccggcagcgccacagccccacgcagaggactgaccctccagaggatgcacatcctcagcgcgctcacttcggtactcgctctcgccacatccgccgtcgcctcgtcgtcgcatcgcttgccgctgcgggcgatccagtttgccgaagatgcggacattctcactcccaaccaccgcgtaaccgccgtgtcgacgttcgaccttgccttcaatgtaggcgcccagcgcatccgcctcagcctggagcccaaccacgacatcttcgtcgatggcggccgcatcacccacctggctgccgacggcagcatagaccgcgaagaagccattgaccgcatgcagcacaaggtcttcaatgggacagcctcggtaaaacgggggagtcgctgggacagtgttggctgggcgcgtgtggggatacggcaggacggactggagccgctgtttgagggcaccttcacgctgaaccacgacctccaccacatcaagctggcccgcaactatagggcgacgcgactggccgaggatccggaggtgaatgatgccgaagagcgcatggttgtttccaaggatagcgacatgggcatggcggcgcagcaggaccacgccgagctgcggaagagggcgggcgtgactggccaggcgtgtgagagcgattcgcttggcttcaacacgcacgctgaccacccggtctatgcgggcatgcgcgctagggacatgaccagtcgcgcctcaatccccattgagaggctattcggacgccaggtcgacggccagatgggcagcggcggcgcaggtgtcaacctcgtcagcaccattggcaacactcaaggctgtcccacgacacgcaaggttgcgctcgtcggtgtggccgcggactgcacgtacatccaatcattcaaccgcgacaagaaccagacacagcagaacatcatcgagcagattaactccgcctcagagctgttcgaaagcactttccagatttctctcggccttgctaacgtcgttgtcgcggaacccgattgcccagcttcggagcagcaatctacaccttggaatcaggcctgcagcgacagcgttcagatccaagatcgtctcaatctcttctcgaaatggcgcggtcagcagaacgacaactactcgcactggacgctcctttcgacttgtaacactggctccgcggtcggtctcgcctggctgggccaagcttgtgtgaaagggtcgcagcagaacagcggcagcaacagcgagacagttgcaggcgccaacgtcgtcatcaaaaccagcaccgagtggcaagtcatcgcgcacgagacaggacatacttacggtgcggtccacgactgcacatcgcagagttgcgccgatgccaacaccgtcaattcccaacagtgctgcccgctcagcagtggaacgtgcgacgcaggtgcgcagtacatcatgaatccctccaccgcgcaaggcatcaccaagttctcgccctgcagcatcggcaacatttgctccgcactcaacgcaacagcgtcgaatccaactgcctgaccaacaaccgcggcatcaccacaatcggcgagcccgtgtgcggcaacggtatcgtcgaggccggcgaggactgcgactgtggcggaagcagccagtgcggcaacaacgcgtgctgtgacgccaccacctgcaagttcaagaacaacgctgtgtgtgacgactccaacgaggactgctgcaaggactgccagctcgcgtccagcaccactgtgtgtcgtgcatcccaaggcccctgcgatcctcaggagacttgtaacggcaccagtccctactgccctgaggacaagtgggaagaggcaggcaagagctgcggtaatggtttgcagtgcgcgtccggacagtgtacgtcgagagaccagcagtgcaggacgctgatgggtagtctgactcaaaacagcgatacttacgcctgcgatactcgcagctgcacactttcctgcggaagccctaagttcgggtctaatgtctgttatggccttcagcaaaacttcttggatggaacgaagtgcgccggtgggcattgtatcaatggtcgctgcgacggcaccgtcggcaatgaaatcaaatcatggatcgacgataacctaaccctcgtcatcgggctcgcagccgggctcggcggcgccttcgtcctctgcatcctgtgctgctgctggcgctcgtaccgccgccgccgctcgcgtgccaagtacgctgccaccgctgcggcgatgccgaacggacgcagaaggggtcagccaccgatgggccagaatcccgcatttaatcgtgggtatccccagggtcaaccgcctatgcagcagtatggtggtggcccgcagcaatatgggtatacaggcggtagcgcagggcagcaggggtggcaagggaacgcgggcgtgcctatgccgccgcctttgcagcatcggagtagtgtgaggtatgcttagctgaggttctcgtgttgcggtcttgtcgtgcgacagcgggtggatttcttagcagcgtttggggaaaggaaaggtgcattggtttggcgttttatatatctcgtttgttgaattcggaacggaagaggataggaggctggcatctttgtcgtacatatacacagtggttgcgtgaagagaaagaatagctttttcctgttctg

SEQ ID NO: 12614 - DNA, 3211 bp, Oryza sativa
  ref <308>: DATABASE ACCESSION NUMBER: AK109962
  ref <309>: DATABASE ENTRY DATE: 2002-08-28
accatcatcatctcgatctccacgcccctctttcttgtctctccatggtggcgcctgcgatggcgcttctcggggcgccatcacttcgccctgggtcgctcgcatccatccgcgtctcagcgttgtcggcctttggcgctcctgacgtcgccgcgccggcccgtgcttgcttcagcacgccgaatcgatcgctcgtatccacagccgccacgcccgcccacaaccgttcagaaacagcacagcacatcaatgcgatgcagcagatcgacgagcccagcaggccccagcagtacaaggatgtggtgctcagcagcctcccgctcaccgccacacccttcgacatccgctcgctcgccctcggcaagatccgcaacgatctcgcccgtatcgaattcctctatacgaaatccatgcgtccgtctggaagagccatcgcctctttctctaatgccgccaatgcgcgcaccttcgaggaaatcgtgcagggacgcatcctcggcggtcgccaggtccaagcgcgccttcagtccgcagagcgtcgcgacgccttcctccagtcctactatgcctcttggtcccggcactaccagctcccgctcgacctcatcgagtacgagcgtggcacactcgtgctcctccgcaacatcccccaggacacgtttgaagcgcgcctcgaggaacgcctcgccggccgctacgaccttcgccagcaggaccgatggcgtggcaagcgcaccgcataccctggctactttaacgacaagaagggctacggaggctcgcacgacgtcgtgctcggtggcgtgctcaaactgcccaaggcgcatcctgacgcaaccaccgcctccttcatcgtccgttgccagtccgctttcgaggcgaatcgcctcgtgcgcaggtggcacaacacctactttgcgccggccaccttcgacatccaagacaccgccggtcgataccgcgtcgccgcctccgtcctctactgaggcagcagcagcaaacgtccaacaatgcttctcttcaaggtgagtcgccctctaccgccatcacactcagcacaccgacgaagccgccttgcagacccttcccggcctccactcgccacgtccgtgatgacgaaaatcatggcaccacacagagttgcctcgcacgctgctcccgcacagcctcgcctcctcgatcggtgcatcgtgtcgaaccgatgggccgtgacaggagcgcctacatgcgcgggtcatgatgcggatcacgtccgcacccctctgtccctcggccacgcatcgtccagccttgtatggtctcgatcattttccgggagagcagcagcagcagcagtacgagccgcgtcgatgagccttggccaagccgctctacatgcagagcggaagcacgggagacagccatccacaacgaggcgagatcccgtcgtcgatcggacagcatcgccgtctggcagcaccgatcggtggcgtggaccgtgaccagtgagacggggcattggcgagctggcggttctagcgaattgcaggctcgcgggtgctgcggggctggcctgcgatccggatctcctacgtcgagatccaggggaccggctggccgctcgccgagtcagagccgtgtgcgcgttcggtgacaattcgcctttccgtggtttttggaagcttttgatctcagctccggcgttgcgcctgggcggattgatggtgatgaaacgttcggaaagcctttttgtgtgctgaacaaccaccgacccacctcgcgatatcttgcacattgaacgaccgaccgaccgaccactggcgtcacgtgtggtgacagacgtatgacgacatgcggaggaaagagatcacgacggatatgaacgactcctttggaacgagcgactgcgaccttgctaagttgtcgggcgccgtgtggctgcagcggactgttctggctcggaccctaccaccccaatgcaaggtcgcttggagagcctagggtctgctagcggtccacacggcgcctcgattggctgttcgacaatacctccctcgactgggtgtgcactcccacctctgtgcgagccattgccgcgattcgacctgaagacccaccgaacacgctgccgatgaagcttgtgatgaaggtgctccaccctttgcggcttccgctctgcagcgacaatggaatgcacgactgccaggcggcgcgtccatgctcggcttcaaagcctgcctgggccccgcctgcgattgtggcgtcgcgcgtgatgccctcaagcggcaatcctcgcccgatttggactgcgattgggaccacgaaagcgccccccgagacgatgctacggatcagtgctgaaccgactcgactcgactcgactttgcgactcccgaccatgaaccacgactgcgacgactgcaagcccttttgaaccttgacaatctgattgctctggcgatcaacgttggggcggcgcgctccgctcgcgcgggcacctgcgcgggtcgagtggcgttcgcttagtggtggctgccgtcttatctcacccgggccgaccgccttgggtttggggataagggaacaggcgattagcaagatctgttgctcccacttggttttccttccgggctgtttgactctctgctgattctgctgctgctcgcgatgccttcacattatctatcgcttctacgatcacttccatctttacacggcgttgtctttcgcaagtactgctctcgccatcgcgggggtaggaaggcacgctagtagattcgcatcctgcgctggttgggggcagaaggtgtggggacgaggaccgccgacgcgcatgcttgcgctcgtgtctcggaacaagggcgcacaccctgccgtagcccctatttgggccggtcggggaagacgaggttatgcgcatgggcaacgtgcgaggcggtgcatacgcatgcgaagggaacgcgcaaccacgcgggcccgctgcgcaccggcatcgaccgctcacagaacagagatctgaagacgtcggcgaccaagagtcggggcttgtctgtcggcacggcggtgtgcttagtgttgatggcgaggatgactcctcgttcccaaccggctttctttttggccgccaagaacgagctttttggctgacacctgcctttgccctctcttttgcaccagagcagctctatacatttgtacttttacacattccactgcatctctctcgcttatg

SEQ ID NO: 12615 - DNA, 3238 bp, Oryza sativa
  ref <308>: DATABASE ACCESSION NUMBER: AK109963
  ref <309>: DATABASE ENTRY DATE: 2002-08-28
atcggtatccgcacgcctctcatcacctccgagatgccacccaaaaggtacttcgagcaggacgagcccgccgcagagggcgctgctcctgcgccgactgccgcgacagccccagccgccgctgctgatgctattccatcgaccaaatcgaaggataagggcaaggataggctcaacgccaccctcttcgtttccagattgccctacactgccaccacaaccgatctccagacgctcttcagtgagattggtccgctcaagcgagcctttgtcgtcacagaccaggccacaaagaagtccaagggtgtcggatacgtcacctttgccatccccgaagacgcccagaccgcactcgatcagcttcaggaaaagtcgctcgacggtggtagcagaaagattcacatcacctttgccgaccagaaggatcccaccggcaacaagcgcatccctgtcaaggccgaccaggactcgttatcctcttccaaacgcccgcgcaccgaatcgagcaaaccggcacgccaggccggtgcctttcaagagaaggatgcacacgccgttcgcaccgtcatcctttccggtctctctggctgcaaacccgtacccgactccaagcagatctacaagcgagcgcgaaagatcggcgatgttgaaaccgtcatctaccctcacccttcctcgcccaaccccaatgatgccgcacacgtcgtcttccgcacgcccaaccacgccatgaccgccgtcgaaaagctccacgcccacgtcttcaagggcgtccagatcagcgccatcctcaagaagcgcgcagacaacgccgccaggatcgccgcccacatgcgtcccgagacgctcgcaaagcgtgaaaagatgcgccaggaggtggagaagaacagcggaaagggcaccatgcccgtcctcctctccgagatcgacaagtccagcaggctcatcatccgcaacctccccttcgacgtcaacgaggccgacctccgctccatcttcctcccctttggccccgtctacgagatcaccatccccaaggtaaaggcaaagcagcagccagacgaagccaagccggattccaacggcaaacagaaggagacagcttccgtcaagcaagatgactcggaagactcggccgactctgactcgtcgggcgacagcgattccgacggcgaagatgcggaggaaagtgacgaggatgcagaggacggctcggaaagcgacagcgagcaggatgacgaggcggacgacgacgatgcaaagcaaaatgacagcaagtcctcgtctgactccgacgacgaggctcctgcggatgaggccgacgctgacgtagactccaacaagcaggcgtccacctctgccaagcctgctaccgtccctgctgcagccaagccggctgccgtcgaaaagggccgtggtttcgctttcgtgtggatggtctcgcgcaacgacgccgcgcgcgccatcgaggcagtcaacggcagcaagatccagcacggcgccgccgagcgtgccgcctacaagtctactcttggctcccgtggtcgacgtgctgccaaggccgcgctggaccacgtgcgcgcaaacgctcaacccgagcgaaccgtcgcggtcgactgggcgctcagcaagaaggactgggaggccaaggccgacgagtccgagcccgagcaagacgacaaggtcaacgacgacgacgatgctgacgatgccgatgacgccagcgatgccggcagtgatgccagcgaggagcccgcagagcgacccaaactgccagcacccgaagagggcaccacgcttttcgtccgaaatctgccgtaccaggccaccgaagaagagctgcgcaacctcttccgcacatttggcccgctgcgctatgccaagatcaccatggacaaggcgaccaaccgcagcaaaggcacgggtttcgtgtgcttctggcaggccgagtcggctgatgcggcgctggcacaggcgcgcatcatcgagcgcgagtcgggcgtctcgggatcttcgtcgagctccgtcgccaaccagaagaaccccttcgccatgccgtccgtgctcaccgccgatcccgctgcaccgctcacggcgagtctcaacctgcatggccgcgtgctcaacgtcatccccgccgtagcgcgcgacgaggcgtcgcgtctcgagacgagcggacgcaaggagcgcgagaagggcgacaagcgcaacacgtggctgctccgagagggcgtgccgttccccaattcggactttgccgcacgcctcgcaccgtccgaggtggagaagaggctgcagtcgttccaggtgcgcaaggcgcagatgggcgccaacccgtcgctctttgtgagcaagacgcgtctggcggtgcgttcgctgccgctctttgtgtcggaccgcatgctgaagcgtctggcgatccatgcgatcaagacgtttggatccgaagtgcgtgcgggcgagcgcgaggatctggatgccgacgagaaggccgatcgcaccctcagtgcttccgccgagaaccgcaagcgcaagccgggcgagaggccgacgcccgtggttcagtccaaggtggtgcgtcagcacgatcgagtcgaggcgctcacgggtctgggcaagtccaagggttacggattcttggagatgaagtcgttcaacgatgcgctcaaggtgatccgctgggcgaacgcgagcaaagctgtgtcgaagctcttcggcgagtggtggaaggacgacctgcagcagcaggtggatcgcatcgcgacgcaggtgcactccaagaccaagacgctcgaggagaaggagggcgaagaggcggatgcgcttcgtgccgagatcgaggagctcaccacgcgcaagcagcgtctgcgcaccaaggtcagcgagctcgaagagggcggtgcttcgggagacaaggagcgtggtggtctgctcatgatcgagtttgccatcgaaaacgtcgtgaccaccaagaagcgcgccgacaaactcaaggctaccaaggaatccgccgtgcgaagacaggagaggatggaggccgaggagcgcgaggccgccgtccatgccgaactcgcaaagagggaggcgcaagcagcccgcaagatcgaggccgacaagaacaagcccaagggctacgctcacggccacgtcatcggcaagaagcgaaaggaacgccgcgcccgtcgcaactgatcttctttgctcgtgtattctgacacaatgccacattcgcaccagc

SEQ ID NO: 12616 - DNA, 2726 bp, Oryza sativa
  ref <308>: DATABASE ACCESSION NUMBER: AK109964
  ref <309>: DATABASE ENTRY DATE: 2002-08-28
ataccaacccaccatttccctacctctctgcccggtcactacagcgaggaaaagagcttcccctggcagtcggtgcgctttgacggcaggccttcatcgaggccatctttgctagatcggcccgatcgttgttttttcagcgcctggtgtcgaatcgcgccaactaccagttcttagattttcgagcaccgcgtcagttcggatctgagcgtttttaagcgcgcggtggcctcggattgggaccggtcgttcggttactcttgccggccccgcgctccgtgcctttcagctgggcgacggcgctgtgaccccctctcatctacattccactctcctgtccaaccactctcctccgtcatcttctctttcaatcaccacacaccactcctgccaacatctagtcggtcgcgaagctctcatcaccatgatcaacactcctcttaccgaaaagctcggcctgcgcgtgcccctcgtacagggtggcatgcagtgggtcggcacgcccgctctcgccgccgccgtcagcaatgcgggtgctctcggaaccctcaccgccttaacccagccttcgcccgaggcgctccgcaaggccatccgcgagaccaagtcgctcatctccgaggacatccgcaaggagcgtgagggcaagtacggctcgtttgccgtcaacatcaccctcctcccttccatcaaccctcccgactacgtcggatacgccaaggcggcgctcgaggagggcgtccgcatcttcgaaaccgctggcaacaaccctggcgaagtcatcaaggtcgtcaaggcggctggcgcctacgtgatccacaagtgcactgccgtccgccacgcccgcagcgccgagcgcctcggtgccgacatgctctcgatcgacggattcgagtgcgccggtcatcccggtgaggacgacatcggcggtctcgttctcatggctagggccgctgaggagctcaagatccccttcatcgcctcgggcggtatcgccaacggccagggccttgcttctgccctcgctctcggtgccgtcggcgccaacatgggcacacgcttcatgtgcaccaaggagtccgagatccacgacaacatcaagcgtgccatcgtcgagtcggacgagcgcaacaccacgcacatcttccgcaccctgcgcaacactgcgcgtgtcttcaatgacgagcctcgggattcaaaccggtcttcgtcggatcagagtactgccggcgccgtcaccgtcgagccgagcacggtcgaacagcccggccatgatccaaacaagccgccggacccgaagcgcgcaagccaggagcgcgagaccgagctgcaacgacaggctaccaaggaaggtgccgtcgagctgctcggaacgcgcgatccagacagctacgcgctgcaggaagagcatcagcgcaagtggaatgcgtggggcctggccaagagctacctgaacgacgagatcgaccacacggcggctaatgtgccgctggcatggcaggcgttcctgacaggaatagtcgacatgctgctctacagccgctcgcaggtgtggctcggcttccagacgggcaacatggtgcagttctcgtcgaacatcgcgcagttcatcatccccggcgtcgagagacagccgctgctgacgctgctgcgcatcctcagcgtcattggcttcttcctcggctcgctcgtaggcttccagctcggtcgccgcatcggccaccagaagcgcagctggctcattctctcgagcgtgatccagagcgccttcttgtttagcggcgcaggcatcctgctcagcagaccgaagaacgagctgccgtcgttcgactggtacccggacgtgatcgtgctggtggccttctccatgggcatgcagagcattctggcgcagaagctcgtctcgccagcgtttgccacgacggtggcattcacggcgacgctcacccagatcgcctccgacccgtacctcttccacctggtgccgtcggagaagaccaggggtcgtgatcgcaggatgctggctgtgctggcgctgtgtgtcggtgcgggcgttggcgagtccttgctgcacaccagcgccaacctcagcggcggcatcgccatcagcgccggcttcaagctcgtgcttgctcttctttggcttgtgcccgaaggcaagaagagcaacacggccaaagcatccaaagcctagacgccgttccctcttcaaattccctggagccgttttggagtcccctctccgctaaagaccaaacaactcacccatctgtcccctttctcctttctccacctcattttttacttggctcggcgtacggtggtcttgcaggaacaaggtctccatggaggtggtgcgcctcgagaaccgaccggagggcgccaaattcgaggatgtgcgcgagctcgtgtcgggcgcgcgcggaaagacggtctatgagaccggtgacatcgacgccggtatctggtcggccggtatcaccgtcggcctgatccacgacattccttcgtgcaaggagctgtgcgccaacattgagcgcgatgccgagacgcacatcaaccgcctcagcacgctcgttgcccaaaagggcagcagctccgctgcgcgtgaggccaagctctaggtggcgtatcccgctgccgtagaaaagcgttgccggtgctgctagtgcatcgggcaatcttgtagaacctgaagttccgataacgatgtttgtgcccccatc

SEQ ID NO: 12617 - DNA, 3315 bp, Oryza sativa
  ref <308>: DATABASE ACCESSION NUMBER: AK109965
  ref <309>: DATABASE ENTRY DATE: 2002-08-28
aacacgattctaacgtgcaagctcggcggcgagattggtggccggtagctggcagcttctgtagcgacccgaagcaacagcttggtctgccgcatgacatggcggcagcagcggcatcgagctcgcagagcgatgcccctgcacccatggacacctcctacgatgacgagactcggccaggggaaagccagttcccaacgctgacgcctctatcgcgcgatctcgagctgctctcgcccgtgcatgcgcccaacttctccgtcgacgacttcctgctctcgcgcaccaaggcatccgatctaaacttcatcctcagcgatctgcgcggctacaatgagaagctcaaggacgagctctactcgatcatcaacgaggactacaaggactttgtctcgctcggcagcagcctcaaagcggaagcacatcgcattgcgcggctcggattcactgcgcctgcgcgctccgacgcctccgccgaccatgtgccgccccaaggactcatggcgcccgtgcgagacacgctgctcgcctcgcgcagcatgctcaagagcgtgcaggacgacattgcgagctgtatgaagaggaaggaagaggccgcgagtcacaaggcgcgcttggagctcatgctgcagctgcaagactcgatcgtgcgtctcgaagagctactgctcatccagcggccgcacccgcagaggaatcgacgtaagtcgtcgctgtcggcacgtcgaccatcggtgatcagcgcagggtcgcagcccgaacgccgagatagcctggcgtcggtggcagcagactcggacgatgcgttctccgactacgccatgtcgtccgagtacgacgaggacagcgacagtgacgaccgcacccagctcaccgatgctctctccaaccgaccgaggcgcaagggtttgcgtcgatcctcggtagccaaggatgtagtgcacgatgagcctacctcggcgtctgcgacacggaaccgatccgacactgtcaacggcggcgcgtcatctctgctcggactcccacaacgcatcgcgcgcacgtcggccgaatactcgcgtctgcgtttcctccatcgacgcatcgacgaagagggtctgtcgcaattcaccgatgcgctgcaagatcgcatcgaccacgtgtgctctgtgctgcgccaggacctgcgtgccttgctcggcgtcctgctcgcacccggctcgctgctcgtgcacggtcagagcagcgcgcgcactcccggctcgcccgagctccgacgctcgtcgcgcccatcgcccggaagcgcgcggcgagcgagcttcctgggcacatcgacgctggcgaagcccgcaacgatccacgagcaatgcgccagcgagctcgacagctggagccaggtcgccgagccgacggacgagagcgcgggtgcggagtcagcgtactggcaggcgagactcgacgagcagcgctcgtggctcgagatggcactggccacgctcaacacgctcacgctcgtccgcgcgaaaggcggccaagacggggcaggcgatgtggcacggcgccggaatgaggccgaagaagcggtgcgcgacttgttcgtcagcaagtgggcggcgcgcacgatcgtcgagagcccctccagcaatgcagagaccgaagagacgagcggattgccgagtacggctctggcgatgtttcaggagttcaatcagcgagcccagtccgcgctgctgccgacgagcgaatcggaccggctgagcacggtgtacaatgccgtgttgacgtttgtgggcacgatggcgtggcaggtggtggatgcggcgcgcgaggtgtcgctacagagcatgcactctaccgagacgcctgcatctgcagcgcgggaagacgcgcaatgcgatgtctttgtccatgtgctgtgggacgaaatcagcgccaggctgctcgatgatttaggcacgatgatcttctttgtcggacagacggactccttctatacgcactacaccctgacgcgggcgttcctcgacaagctttctgcgctggctcctacggaggcctcgcgcgcggcgctgcatgcgcatccggggtggacggcgtttcggcggcgctggcagctgccggtgtactttcagatgcgcttccgcgaggtggtgacgcagctcgaggttgggttggccgatgggcgcgcgcgtgctgcggagggagagatgatgcaggcgacacgcgcgacgctggatgcggtggcacgggtttggtctgacggcgtgcatattcacgagctctcggcgagggagtggcgggtgacactgcagatcctcagtcgatacaagacgtgggtggaggagtggtcgcctgtcgaggcgggcgtcagcaatcgacctctggatgcactgcgtgctggcgccgcaacggcgtcggctgacggatcgcgtagtagcatggaccgagcagcgtcggtggagatctcgcgctcggcgactccgcaacccgcaccggacgtttcgacgcaacagcaagaggacgagcaattggctctgggagcggctctggttggagactgtttgttgctccgcacgcgcatttacgctcttctggacgataccatcctcttgcgcatctcgagctgcatagaagccgatccggctggtttggaagagcttcgtacggatttggtcaaggttcttgatagcgagacgtttgactttatcgcggggctggtgtcgggggtgggtcgattggcgtttggcacgatcagtccgcgtgtggctgcgccgcttcgattgctgcgttcgttttcaacgcccgcttaccgcgccaataccagctcggctagtgctggcgtcgaggtggttcagcagctatttgcaccgctcgaagctttcctgaagctagaagcggtcagagcgataccggacgatatcaagcgcgactggacagaacccatcctcacatacgcttttaggagctatacaaccaccgtcgagactatcaccaagaatcagcagtcgctcatcaggctcaaaaaatctcaggctccttcgtcgggtctcctcggcatgttcagaggctcaatagccgccgacgacaacaacgacgacgagcgcgcacaggcaaacaagtcggccctcaccgccttccagacaaagctccaggcacttgatcgctctcgactctgaatcatttgcgccttggacccggctcaagaccttcctcgagtcggacctcgaccagtcttgagcgtgggcttatcccgacacattgcatctcatcttctcctctccggctcgtgctgagcagccgacattcaaccgcaatacaagcatcgttggcaaagtc

SEQ ID NO: 12618 - DNA, 3545 bp, Oryza sativa
  ref <308>: DATABASE ACCESSION NUMBER: AK109966
  ref <309>: DATABASE ENTRY DATE: 2002-08-28
ctctctctcttcaccggcaaagctcctccttccccaccatctctccaccacaccatccaaccatggcgagggactttagacccaagggcgccaagtccggcactggccgaccagcagccgctcatgctgcctcggcatccaccaacggcacgccaaagcccacacccaccaagccagtcacaacctcgtccgctcccgccaagtcgacgccgagcaagcccacacccaccaaaaagagcagcagcagcaagaagaaggatgcattcgattccgaggacagtgcggacgaagacacgctgatgcgcgagatccagagcttcggcggatccagagaagacctcgagctcatctccaaggcaaacgcaaagtccaagtcggacgtcaacatcgacgaggctgccttctccaccgaagtcgccgcgttcctcaagcagctccagtccgatcctaccgcctctgaacccgccgctgctccggcaactcccaccaagaagcaaaaggacgccaagcccgccgctgcttcagctagcactaccaagcccgactccaaaaagaagaatgcccccgaagcaccagcagaaaagtcgcaagcccgaaaggaaaaggaggccgccaagcagaagagcaaacagaccgaggcaaagactcgacagcaaccggcagcggtggcagaaagcaccaccgcacagcgtatgggcaagggcaaaaagatggtctttgacgacgacggtgtcggcaaggagaccaagcacaagccctcgcacacctcgcgcggtccgctgcgacttgaagccgttccgcagtggatatcgcagtcgctgcccaatctgcccgcttctggcagcaacgacgagctcgggcacgaccgcatcacccacctgctcgatctgggcgccgagctgatgcgccaagaggcgcgcgcctgcgacgacctcaccagcagcgagacctcgctcaaccgcgccggcggcagcatcggcacgctcaccgcctcggacgcccagttcgtccgctccctcctctcctccgaaggcggcggcacgctctcggaccgcatctcggcgctcacgctgctcgtccagagcagccccgtgcacaacgtcaagcatatgtacacgctcctcgccatgacgcgcaaaaagagccgcgaggaagcaagccgcgccacacgcgcacttgccgactggctcgccagcgaaggcggtctcggctctcgcaagctgcgctactttcgcgaccagccccaactcgcctctgcctcggccgccttgtcgtccagcgacccctcggctgccgaagcggccaaatcgcatctgctgctgtgggcgttcgaggaccatctgaagaagttctacctccagtttctgcaggtgctcgaggtgcagtcgcacgacaccatcgcctttacccgcaagcaggccacgacgcaggtgtacatcctgctgcgcgacaagccggagcaggaacagaacctgctgcgtctgctcgtcaacaagctcggcgaccccgagcgcagcgtggcgtccaagaccagcaaccacattctggagctcctcaccgcacacccggccatgaagttcatcgtggtccgcgagatcgccaacctcatcatgcgcccttctgcacctgcgggcggggatgacgagggcaaggtgagcaaccatacgacgcatgcacgctactatggcgtgctcacgctcaaccagaccgtgctcactgcgcgcgacgacgccacggccaaccacctcatcctgctctactttgagctgttcgaaggcatcttgcgccagtccgaacgcaaggaagctgccggtatcgttgacgagcaagacaccgaagagcccaagaagaaggacaagaagcggtggaaggaccagcctcgcaagggacgcggtcggaagagcaagcccgccaagaccgagacgcgcgaggagcccaagctggtcaaggatgctgaatccaagatggtggtggcgatcctcacgggcgtgcgtcgcgcattcccctttgccaagatcgagccggcggtgtttgagaagcacctcaacacgctgttcaagatcctgcacaccgcctcgttcaacgtgagcatccaggcgctccagctcatcttccagctcagcgtttcggacgcacatgcgagctcggccgtgctggcatcgggtgcgattggcgatcgattctaccgcgtgctgtacgactcgctgctcgatgcgcgtctggcggcgtcgagcaaacaagccatgtacctcaacctcgtcttccaggcgctccaggccgatgccgacgccgagcgcgtcaaggcgtttgtcaagcgtctgtgccagatcttgagtctgcaccagccgtcgtttgtgtgcggatgtctgcatctgctcggcgagctcttccgccgcacacctggtctgcgagctatgcttactgaaccggaagacgacgacgacgagcacttccacgacgtcgattccgacgccgacgaatccccacaaaccggaatcaatcgcaccgccgatgctgggggggagaagtacgatggccgaaaacgcgatccgcgcttcgcccacgccggccgcacctgtctatgggacatccttcccctcaccctgcactaccacccctccgtctccgtacacgccctccaactcgtccaaggcagcaccgtatcgacgaatgccgacttgagcctcaacacgctctcgcacttcctggaccgctttgtctaccgcaaccccaagcagacctcgggcacacgcggggcgagtgcgatgcaaccgctcccgcacgcgcgtgttggtgcgggcgtaacgcgatctcgaacgcacgcgctgcacgagaacgagtttttcaacaccgagacgctctggaagcagcgtgcggacgccgttccggcggaccagctcttcttccatcgcttcttcaacctgcgctccaaacagcccagctcctcgcgtgcgcacctcggcgacgatgcactcgccgcatcggatgaccaggtggccaagcaggaggagagcgagttggatagcgacgacgatgcggatgaaaacgagatctggaaggtcatgaaggccaccatgcccggcaaagaagaactcgagggtatggaggatagtgacgatgaggatgacgagtttgactatgtcgattccgacgtcgaggacgggaccgacggcgatgctgctgatgctgccgaggatgaggaggatgattccgatgatgacgggccaagggttcttcccggaatgacgttctccgactcggacagcggctctcccgccgccaacgccgattgggaggacgacatgagcgacgacggcggcaacctgttcgacgaggacgacgacgaccttgtacctttcaccgactttgactctcgcaagcgtagtctcgacgagcccgaggaggcgggtaagggtaaggggaagaagaggcgcaaggcggttgccaacttgccgacgtttgcgagtgccgaagactacgcacacctgcttggcgacgacgagtagccccaccaccaatgtcaatgccagccatgccttcagcct

SEQ ID NO: 12619 - DNA, 3528 bp, Oryza sativa
  ref <308>: DATABASE ACCESSION NUMBER: AK109967
  ref <309>: DATABASE ENTRY DATE: 2002-08-28
tatcgatgaagaacgtagcgaaatgcgatacctggtgtgaattgcagaatcccgtgaaccatcgagtctttgaacgcaagttgcgcccgaggccatccggccgagtgcacgcctgcctgggcgtcacgcacgtccgtggctatcgtttcggatcagccggctagaggtatcgctccgatcgcatcggctcacccgaaccacccacagcgagcgtcgagaccagcatgagctcgccctctgctctcagggtggtgtatccgccttcattccagaactcgttctggtcctatccatcctaccgaccgggcgctcagagcctgtatgccaagctgcgggcaggtctggacgagaacgagtcgatcctcgcctttgtcgcccatcgcgcagagctcgagtacgatcacgcagaagcgctcgccacgccgccaccagccccatccttccctgcgcctctcttccgacaggctgctggcatcctccacgaggtgctgcccatcgataatgctggcggctcagctgctccgcgcggctttgccgccaactcgtcggccacctcgcgcgccttccgcatgatccaggccgaaaccaacacggcccacgccaacgcgcacggaaaagtggcacgtcacctcgaaaagtcgatcctcgagccgttcggaaggtgggccgccgaccaccgcacgcgcgtcacccagagctgggagcacgtcgacgccacgctcgcccgcttcgagcgacagaagagcgaggtggacaagctcaagcacagctacgagaacaagtgccgcgccgccgacgaggccgaggacgatgcgcgctttgctcccatcgatgaggccgacctgccctcgccgcctccctcccacgcctcggactcgacgctccgcccgccagccgccgctgccgcccactcccagcgtagaagcgtgtccggagacagcaccaagtcgatcgactcgcaccccgacgacaccaacgacccagacaggctcaagcgccgcgaaacgctccgaaagcagtttggattcacccagcgcgccacctcggccacgcattcgccgcctgcccatgccgcgctcgacggcgtcaagctgcctccgctccccaccgagacagagggagaggccatggatgccagcgctgccagcgctgcctctctggcgcctccagcagcccacgcaacgagcctcaaacgatccggcaccatctcggccctcgtcagctcggccgtcgacaagatgcccgctccgctcaaggcagctgtcggcggcgtcgtctcggccgaacctcgccacgccaggctccgccgcgacgccgacaacgccgaaacggtctacgaggaggccgtcagaaacctcgaccgaacgcgttgccagctcgaggaggtcctctttgagcactacggcctcacccagcgctgggaggccgaccgcatccgtgctgtgcattccgtgctcgcctcatacaaccatgccgtcgcggccgaaatccccatcctgcagcagtcctcggctcgttctttccagtcctcccaaggcctcgacccctcgctcgagctgcgcgccctgatcaggcaggcgaggacaggccccttccgcccggccatcgagcgcttccagccctactaccacgacgagacctcgctcggtcgcaaggtgggtccccacggcgtcgcgcatgcatggctcgttaagaacggcggcttcggtctcgacctctcgctcgtcgagcgtctcgagtatctcgaacgcctcgagcaccagccttccgctcccgagagtgacaactccactcagctcgccacggtcccgcctgtcctcgctgcgctgctcgccgctttggaccgcgcatatgccgacgaggagcgctggaccgctctcgcaaaggcctttgccgcggccaacgcgcccgcgcccgcagaccaaaagtcggaaaaccaaagcgccgaagacaaggccgccgacgaaccggacgccaagctcatcggccaggaaaaacgcaagatctggatcctcgaggtgcctctgcccatcacgcatcgtctgcgcgatgcgctcattgcacacctcagcccgtctctcgccgatctgatctacggcggcaccaacggcacaaaggcagccgatgccgtcgagtctccggcgaacctcatcccagagaagcttctcgactcgtacgatgcgcccgtgctggcggcgtgcatcaagctctggctcctcgagctcgagcacagcctcatcaccgaggagctgtgggaccagatcgacgccatctatcgagcagctgcgggtcaggagcacgaagcgcttgctgccgccacgcccgtcgtcggcagctccgaggaggctcctgctgcggccaaggacggcgagcctgctgcaacgcccaaggcctcggccatcaagcggcccgaggtggacgaggcgaccaaggccaagatccgtgccggcgtgctcgaggatctgcgtgtggtgctcaacaagctgccacgcatccatctcgcatgtctcgacgcgctcttttcgcacctgcaccgtctcgtcgcctcgacccacgcggcggaagcggacgcagtgtatgccaacaagctcgggctggcgctcggccgcgcactggtgcggcccaggcacgaatcggcgtacacgctctcgtcgcagatcggcacgctggtcgtgtacgacctgctgcaccactacgacgacatcctgccggagctcgtcgagaagaagcgcaccgaggcggcggcggcggcggctgcagcgagccccaacgccaagggtgcgccggcagatgggcagcgacgcatgccgatccgcaagcgcaccaagcccatcgaccagcgcatctcgcgctcgtcgatcggcagcgatctgcagcagggcgcgcgcaagctcatacagcagatggacgagcgcgagcgtagcaaggtcgagccgacgcccatcgtcacctcgagcgatgcagtcactgccgaagccaagcgcgacgacgacattgcggcacctacgccgctcgccgaacgcgtgctcggcgcgtcggctgcggccaacgagcctgcaaaggaggccgagaccgtgtcggtggtcgacgactcggccgagcagcacaaggagcagcagagcgaggaagctgcccaggcgcagtcggccgccgctgctgccgcaggcgccgccgacgagcgtccgctgtccaacgtggcgcggctctcgcgccagttcaactcggcctcgtccacgggctcggcgggctccaagcgctcgagcctgggtggtgccggcccgcgtggaccgcgcgcgccgtcgtcgcgcaccccctcgaccggcgtcagcgaccccgccgacgcggatcccaagaggcagtcgtgggcacgcacctcgcgtccgtccgattcgctgctcgaggacgactgagccgcggggcgcgcgtgattcaagcctagcaacgcggagtgtgatggcctagctggcatcggtacgtgccgcgcaatgatgactgggtttcttagtttgacagtgacaggggtgcgcg

SEQ ID NO: 12620 - DNA, 3255 bp, Oryza sativa
  ref <308>: DATABASE ACCESSION NUMBER: AK109968
  ref <309>: DATABASE ENTRY DATE: 2002-08-28
ggtggaggccactaccatcatctcgaccgggtaagcgtcgatacagcaaggcactgggtgggacgagtggatcaaggatgagcgaggatgggcaggatgtgcgggcgttacggcgcggctttgaggcggtgacacaaggcacgcggcggtttgggagccgcgacgaggtgctgcgcttctatgctgcgccgcttgcgcggctatttggacgggaccagctgggtgcgctgcaggcattcgggtcagaagcgtcggtcgaggtggacgtgttgctggttgaggcaatgcaggagtcgctgctggtgcgactgggtgtcgactgggcaacagcgctgggttcggcgtggaagacgctgctggagctcacgttctttgggtcggtggccgagtcgtgcgcgaggcaggcagggatggtacagcagtgtgcgctgcgaaccgtgtcgcgcgtgttggcgacggcaagtggcgagacgctcgagcagacggtgcagctctgtgtcgcggcaagggagaggatctcgctacgcgcaatggtggcggcagtggcggcggaacccaacccggcacgcgcgcgcgtagcgtggaccgaggcactgcggctcctcggcgcgctgccggacagagtggcgaacgctaccaagggagatgtgccccaggcgctcaggggcgaatgctggatcgatgcaacgctcgtgcgcgggctgggcgatgctctgcaacatgcaaacgacaagaacgaggtcgagctgctcagagatgtgctcgtcaggctggataggttgggacatctgtcgcgtgcggccgactcgagcaccaccgggttctggccaacgctcctccgtacaacagcgacgaagagcacaacgacaactcagtgggcgaaactacgccgtatcgcgggaagcagcctacgcagacgtctcgacacgacgctgctgcagacacttcaacatgcagcgatgcgcgggcttgcaggtacactcgttgcaccgacagagacgggcaagccgggtaccgagggaagcgcgtttctctcgtccgcaacccacgccgtcgtagccgcatccgcccacgtcttgggtctctttattccgcccgactcgcccgccgactcgagcgactcggacaccgataccgaagccctgcactacgtgcgcacgttcaacggcaccgcgctcagccgtgtcccgcaaagcccagtgctcgcgtgggcatgggcaacctacctcctctccgcgcccgcgcgtgatcggctcgactgcctgacagccgcattcgagcgctggaccgacgcggcgcgtctcgcgcgcgcgctcgtcgacgaagagctgttcctctccgccctcatcgtgtgcattctcgcctcgatcgcggcaggcagtcaagagctggaggacgcgttggtggcggtggcgcactcgcgcgccgtgctcgacggggtgtcggcgcacctggcacacgctgacccgctcgtgcgccgcacgggaatgctggtgggcgaactgctcagcgagcgcactgcgcgtcccgggagtaagacgctcagcttcggcgcggccatctggaacggcaccggtgggggccgcgaggaagcgcgtgtgctgcgcgcactctaccatgcctggtcgcaccattcggacgccatcgcagcacgcgccgccacggtcaaacacgacagcgtcgccgtagatacgctgctcgggccccagcaggtggtacctgtatcaacagcgcttgtcgcattgggagcggagaggaagaagtccgacgggccaaagacgagacgactgccgcagagggtggatgcgagagacacgcgcacccgacctctgatcagtgtgattggggactcgggcgacgaggcgccgctctcggtctcgccgccacgccaagggccattgcgcatgttctcggccccggttcgaccgcatactccgagcgagacctcgtcgtcctcatccgactcggacagcgacgcggacggtgcggaccagcacgagatgcacaagctcgccgccgacctagctggagtgagcaccgacgacgctgcgccgctgttcgcctctgccgcaccctcttcatcccgcacttcggcaggggttggcgatatggacgcggaccgggaagcgcatgcgccgcagttcgagcggcgcgtgcgcgcgcccgtgtacgtgtcgcagctggcgcctctgctgaagacgtcgtcgcgcgcgtcggtgcggatggggctgcggagtgcagcggcgctggtgacgcgcaaggcccccacgcgcacgtttggcggcgaggtggatgagaacgccgtcgacctcacgctggcgctggctgcgctgcacgacaactttggcattcgacggttcgagcagatgcggcgggaggcgctggtcgaggtggcgtgtgcggcgcccgtgcgtgtggggggcgtgctgaccgaacaggtgtttgggagtcagtacagcggcgtacagcgcaccgcgatgctgtatgcgctcaccgaggcggcggtacggttgtccgggaaagagcagcagggagaggctgggcacagggcagaggcggtagccgcgcgtgtcgtcagcgagacacggcgcgtgggcgaacagcgggtaccgcagctgcgacgcgaacggaacttgcgactcgacacatcccggtctgcacttgtacaggagatccggcccggcacatcgcttggcgtcggttcggacgggcagggatgggcggctgtggcggcaacgtttgtgtttccgttgctgaaccggtaccttgcgtatcaagcactaccctctcgcgggtcgctcttcgaaccggactcgctcgcactgctgttcgatacgctcggcgtactgatctcgctggcgccggcttcggtgctgcgtccactcggcccggtgctactcgaagcgctaggcacgctgcttatctcgccctcggcagggcccgagacagccgcagcactcagcgcactcgccatctttctgcacgcgcatctcgagctcgacggtgcggcgtcgctgctcaacgaccgcacgggcgtgcgcatgctcaagacgctcctgccgcgcgtccagatgctcttcacccagctcaatgcgcacacgggcgggacgcccgccaaagtcgccgctcgcgctgcgaccgtgctcctccaaatggaccagctcgaccaggcccagacccaaaccatccaaaacgcactcggcttcatccccacctgaacccccctcacacagctctttgccaaatggaacaaag

SEQ ID NO: 12621 - DNA, 3464 bp, Oryza sativa
  ref <308>: DATABASE ACCESSION NUMBER: AK109969
  ref <309>: DATABASE ENTRY DATE: 2002-08-28
gaaccggaagcctggttacggtgccgaactgcgcgctaacctagaacccacaaagggtgttggtcgattaagacggcaggacggtggtcatggaagtcgaaatccgctaaggagtgtgtaacaactcacctgccgaatcaactagccccgaaaatggatggcgctgaagcgcgcgacccacaccaggccatctgggcgagcgccatgccccgatgagtaggagggcgcggcggccgccgcaaaacccggggcgcgagcccgggcggagcggccgtcggtgcagatcttggtggtagtagcaaatattcaaatgagaactttgaaggccgaagaggagaaaggttccatgtgaacggcacttgcacatgggtaagccgatcctaagggacggggtaaccccggcagagagcgcgaccacgcgcgtgccccgaaagggaatcgggttaagatttcccgagccgggacgtggcggttgacggcgacgttaggaagtccggagacgccggcgggggcctcgggaagagttatcttttctgcttaacggcccgccaaccctggaaacggttcagccggaggtagggtccagcggccggaagagcaccgcacgtcgcgcggtgtccggtgcgcccccggcggcccttgaaaatccggaggaccgagtaccgtccacgcccggtcgtactcataaccgcatcaggtctccaaggtgaacagcctctggccaatggaacaatgtaggcaagggaagtcggcaaaacggatccgtaacttcgggaaaaggattggctctgagggctgggctcgggggtcccggccccgaacccggctcaaccaccacaactgtccaactctcgtcatgtcggaccctacgccttccaaccctccggccggcaacccgcccaagcccgaggcggccgacgacaaggatgctgctactgccatcctgcgccagaagaaatctcccaaccgccttttcgtggaagaggctaccaccgatgacaactctgtcatctgcatctcgcctgctaagatggaggagctaggcctcttccgcggcgactccaccatcgtcaaaggcaagaagcgccgtgactcttgcttcattgtcctctcggacgaatccgtcgaggatggtaaggtgcgcctcaacaaggtcgcacgtaacaacctgcgcgtgaagctcggcgatctcgtctcggtacatgcctgccatgacatcaagtacggcaagcgcatccacgttcttccctttgacgacagcatcgagggtctcaccggtaacatcttcgatgtctacctcaagccttacttccttgaggcctaccgccctgtccgcaagggcgacaccttcaccgtccgcggtggtatgcgcgcggtcgagttcaaggtcatcgagacggaccctgccgagttctgcatcgtcgcgcaggacacggtgatccacaccgagggcgatcccgtcaagcgcgaggacgaggaggccaaccttgccgatgtcggctacgacgacattggcggttgccgcaagcagatggcccagatccgtgagatggtcgagcttcccctgcgccacccacagctcttcaagtcgatcggcatcaagcctcctcgtggtgtcctcatgtacggccctccaggaaccggtaagacgctcatggcccgagccgtcgccaacgagactcgcgccttcttcttcctcatcaacggacccgagatcatgtccaagatggccggagagtccgagtccaacctgcgcaaggccttcgaggaggccgagaagaacagccctgccatcatctacatcgacgagatcgacagtatcgcgcccaagcgtgagaagaccaacggtgaggtggagcgacgtgtcgtctcgcagctcctcacgctcatggacggtctcaaggctcgatccaacattgtcgtcatggccgccaccaaccgacccaattcgatcgaccccgcacttcgtcgtttcggccgattcgaccgcgaggtcgacatcgccatccccgaccccactggccgactcgagatcctgcgcatccacaccaagaacatgaagctcgccgaagatgtcgacctcgagcagatcgccgccgagacccacggttacgttggttcggacgtggccgcgctctgctccgaggctgccatgcagcagatccgtgaaaagatggacctcatcgacctcgacgaggacacgatcgatgccgaggtgctcgactcgctcggagtcaccatggagaacttccgcttcgctctcggtgtctccaacccatcggcgctgcgcgagaccgtggtcgaggtgcccaccaccacctggaacgacattggtggtctcgagaaggtcaagcaggagctccaggagaccgtctcgtaccccgtcgagcatcccgaaaagttcctcaagtacggcatggcgccttcgaagggtgtcctcttctacggtccccctggtactggtaagacgctgctggccaaggcgatcgccaacgagtgccaggccaacttcatctcgatcaagggtcccgagctgctcaccatgtggttcggtgagtcggaggcgaacgtgcgagacgtgttcgataaggcgcgtgctgcggcgccctgtgtcatgttctttgacgagctcgacgccatcgccaaggcgcgtggctcttcgtccggcgacagcggaggagcgggtgaccgtgtgatcaaccagatcctcaccgagatggacggtgtcagctcgcgcaagaacgtcttcatcattggcgccaccaaccgaccggaccagatcgaccctgccatcctgcgtcccggacgtctggaccagctcatctacatcccgcttccagacgagccttcgcgtctgtcgattctcaaggcgacgctcaagaagtcgccgatcgccgccgacgtggacctgacgttcctggccaagcacacgcacggcttctccggtgccgatctggccgagatctgccagcgtgcagccaagctggctatccgcgagtcgatcgaggcggatattaagcgcgagcgcgaacgcatggccaccaaggaggccaacgccgagggcgaggtcaagatggaggaggacgcgactgctgccgctgaggaggaggaggacccggtgcccgagatcacgcgtgcccactttgaggaggcgatgcgtttcgcgcgcaggtccgtctcggatggcgacatccgccgctacgagctgtttgcgcagaacctgcagtcggcccgctcgttcggcacctcgttccgcttccccgagggccagaaccccggccagaccggaggcgccggcggcagcggtgctggcggcagcggcggcgctgctttcggcaacgacgacgccggcgacgacgacctgtacgcctaaaagcgttggcaggtcctagaagctcagttccaagggccagtgcccacagatttgtgttgaagagatctcaattttgatttgtgttgttctc

SEQ ID NO: 12622 - DNA, 3259 bp, Oryza sativa
  ref <308>: DATABASE ACCESSION NUMBER: AK109970
  ref <309>: DATABASE ENTRY DATE: 2002-08-28
actggttctgtgaagggttcgagttggagcacgcctgtcgggacccgaaagatggtgaactatgcctgagcggggcgaagccagaggaaactctggtggaggctcgaagcgatactgacgtgcaaatcgttcgtctgacttgggtataggggcgaaagactaatcgaaccatctagtagctggttccctccgaagtttccctcaggatagctggagcccattacgagttctatcgggtaaagccaatgattagaggcatcgggggcgcaacgccctcgacctattctcaaactttaaataggtaggacggcgcggctgctccggtgagccgcgccacggaatcgggagctccaagtgggccatttttggtaagcagaactggcgatgcgggatgaaccggaagcctggttacggtgccgaactgcgcgctaacctagaacccacaaagggtgttggtcgattaagacagcaggacggtggtcatggaagtcgaaatccgctaaggagtgtgtaacaactcacctgccgaatcaactagccccgaaaatggatggcgctgaagcgcgcgacccacaccaggccatctgggcgagcgccatgccccgatgagtaggagggcgcggcggccgccgcaaaacccggggcgacaataccttcgccctgcaaggatgctcaacagatcaatagcatcggtcgccgcagcaacagcagcagggacatcgtctctagcaggctggtccgcgtcgacgtcccgcgcggctgcttgctcggctgctctcgcacggcaagcctgcatgatctgctgcatgccgccaccaacgcacatcgccgtgctcggtcgaggcttccagacgtctgccctcgtcgcgaggggtggcccgccacgaggcggctccaagtcgggcggagcggctcgcttcggcagcggcaagggcaaggacaggcgcgaccgctctggcaagccccgattcggcgacaaccgggggaagaaacgcatcgaggccgacttttcgatacccgaaccacccaccgcacagcacgttgcgcggcagctcgtagacaagatcgagtctttgtcgggcaaccctcattttccggcgcagctcgtggtgtacgggatcaagggcgatgcagcgcgtcaagtgctgcagctgtatacaccgtccaagacaccactggcggatcaggagctggcattgaagctgttcaggacgtggtccgaggaggcgcaggacgagatgatgaacatcgcactgctgcacgacggcggggaggtgcatcggcccgtggtgtttggctatctgccggacgccatctcgtccttcacggtcgagggtgaggcgtgtctgggccgcttctgcctgtctgcgtttctggactggatggacagcgggtacgcgcgcgtcgagacgtccggcaacgcaggcgagatctcgctggctcggtcgcagctgatgctgctgcgttcgtgcatggatctgcgccttccggcgcaccagtatccgcgcgcacgcacgatgctgcgcagcatccacctgcacgtcggcccgaccaactcgggcaagacgcacggcgcgctcgttgcgctgagcaaggcgcgcacgggcgtcttcgccggtccgcttcggctgctcgcgcacgaggtgtgggaccgcttcaacacgggcaccatctcgcccggcgtcgcgccgcgcgcctgcaacctagtcacgggcgaagagcagcgcaccgtcgacgcgctcgccggcctggtgagctgcacggtcgagatggtgtcgacttcgagcagcgtcgacgtgggcgtcatcgacgagatccagatgatcggcgacccgcagcgcggctttgcctggaccgccgccgtgctcggactgccggccaaggagctgcatctgtgtggcgaggcgagcgtgatcccgctcatcgagaagctcgccgaggcatgcggcgaccacctcaccatccaccggtacgagcgtctgacgccgctgagcgtcgctgacgagtcgctccacaacgacctggctcagatcgagcgaggcgactgcatcgtcgcgttttcgcgctcgggcatctttgcgctcaagcgcgagatcgagcaaaagacggggctgcggtgtgcggtggcgtacggtgcgctgccgcccgagaccaaggcggaacaggcgaagctgttcaacgagggcaagctggacgtcatggtcgccagcgatgccatcggcatgggtctcaacctgcgcatcaagcgcgtcgtgttcgacacgctcaccaagtggaacggttcggaggaggtgacgctgtccgctagtcagatcaagcagatcgcggggcgtgcgggacggtacgggacgcaatccgcctcgaccaagcctgcggatctgggcggcattgtgaccacgcgccacgagcacgagctcgaggtgctgcgcgccgcgctcgcatctccgctgcgtccgatcacgcgtgcagcgatccggcctgcgcgcgaggcgctgtctcagctctcggcgatgctgcccagtgccaagccgggcggcgggctgcgtgcgctctcgcagctgtatgccgacgtggcgctgctggcgcgcatcgaggcggcacactactttgtggccgacttttcgcagcagcttgccatctcgccgctcgtcgagtccgcctcggcaggcatgctgaccgtggcggagcgcgagacgttttcgaatgcaccggccaatatgcgcgacgaacgcgtggtggcctttctcacctcggcggtcgcccagttctcgcgcggcggcctggtgcgcttcgaccaagccgccgacgcactgggcatgctcgaggtggaagagcagctggtcgagctgatggaacaagccaccgaagcgcggcgtcgcgccaccgaatcggccaattccaccaccccacacagcgacccccttccgctcgtggcctacctgggccacaacagcggtgcgggtggaggtgggagtggcgcgcatccgctcatcaacatcgccacgctgctggtggtggaatcgctccaccgatgcttcaccctctacctctggctgagtttccgcttcccgctcgccttctgctaccgtgccgaggtggaccggcgcaagaagcgcgccgagatcgcgatcgatttcgtgctcgagggcatccgatttggaagggccaagcgactgcaggcgctcggaagggcaccaccaccgcacaagcgatagcatcatgcagaacacaaaagcacaaaatggcgtgttaacctttc

SEQ ID NO: 12623 - DNA, 4856 bp, Oryza sativa
  ref <308>: DATABASE ACCESSION NUMBER: AK109971
  ref <309>: DATABASE ENTRY DATE: 2002-08-28
ccatctgctccttgtccacgcacagatacggaaacgatgaagaagccggtcaaggaacgctacaatgccaaggcgcgcggctcgaccgtcggcggatcctcgcacaagaacaagcgctccctgcgccaacgcgaggccgacgcttacgactccaacgcccagctcatcgtgcccggcagccaagatgacctccgcaggaaagaggcagagcagcagcgcaggcaacttctcgagtcctcgggtcaggatgcagacgcacccatgtcgtccaagaagcgcaagcgcctcgacgcctacatcgcctcgcgcctcaagaaggaggagcgcgtccgcatcatgtccaagctggcacagtcctcggcagagatcgaccgcaccacgctcaagtccgccgccaccctcggtaccggtcgcgcaaagaccatggaggagaggatcgataccgccggccaaaagtcagatcgagccggaaaacgccgcagaaggaccatgaacggcgccatcatgcaaatcgacgaggacgacgacgatgcagacctcgacaacatgcagaacgacgtccaagacgacgaagatgaaggcaactttacgtcaccagaggatgtagaggatgacggagaggaccacgggcccattggtgaggtagaagaggaccccgttcgcagagccaggatcctggccgcagccagcctctttgacaagtccaagcaaccaccagcatccgccgctaccacttcggcagcttccacaacatccgcaccagtcccaggctcggccatcgccgctgctaggctcggatccgcgcttgccaaggatgcaagtggcaaccccatcatgcccaccatgcgcaagcgcgccaagaaagccaaggccgcccgtgtcaatgcggccacgcgtcttcagcaagctcgtgacagcgactcgagcttcgacagctccgaatccgaggccgagtccgcatctcgcccggccgcttccgcatcccgccccccacccatggtcgacgccgaccgcatggggcctgctccccgcgcgtcgctctggcgcaagacccaggaaaagcaggccgctcaagccgccctggcagcccaggcagcccaggaagccagtcaggcaaatgacgtcaagggcaagggcaaagccaaggccatcacctctggtccaggatgggaccaggacgactccgaccaggacgacgcagacgccccatctcagggcagcatcgaccaagacgacgaagacgaactcgatgaggaggtcgacgatgacgacgacgacgacgacctgggatccgaggagcccgacacagacgacgacgaggaagccgtcttcctcgaagccatgcgtctccgaggtttgctcccgtccgaatcctctggcaacgacgcacaagcctcttcctccgcatccacctcgaagcgtgtcgagcagcaaggatccgatccatccgacagcgacgatgaagatgaggatgagcagatggtcgaggctacaccagctcacgactccgatcagagcgacgatgacgaagaagcatcagacgacgacgaatccagcgaggacgacgaagacgacgacgaggaggaagacaccgaggagtaccgctcgcgtcggcgcggcattggcactaccaaacgctcctcgggcttcaaagactgggcgcgcgccgcgctcggcatcggcgggtctgcatccgcgtccaccaacgcaacgggcaccgacgctgccgacgccagcgcgcccgtcgacgacgacacggcgtacaacctggagcccgtgggcggcttcaagatcaaggtcggcgatctcatgcccagcgacggcgtggcgcgcggcccgctcgggcgcgacgaagagagcgtgcgctccacctcggcctttgccgccaagcactacgccgagctcgaagcggcgctatcccccgacatcgccaccgacgcgcccaagccgctgacgcatgtcgaggtgcagcggtccgagaagctcactgcgtcgcggctcaagctgcccgtggtggcggaggaagagacgatcgtgcgcaccatcatgcagaaccccgtgacggtcctctgtggtgagacgggatcgggcaagacgacgcaggtgccgcagttcctgtacgaggctggattcggcagcaagaacagtctcaatccgagcatgatcggcgtgacccagccgcgtcgagttgcggcggtgagcatggcgcagcgcgtcgcctcggagctcagcttgcccgcagaccgcgtgtcgcaccagatccgatacgacgccacggtgagcgcggacacggcgatcaagttcatgacggacggtgtgctgctgcgcgagctggcggccgactttctgctcaccaagtacagcgccatcatggtggacgaggcgcacgaacgcagcatcaacaccgacgtgctcatcggcgtgctgagccgcatcgtccggctgcgcgagaaacgctggctcgagggcgagaaggatgcacgaccactccggctcatcatcatgagtgccacgctgcgcgtcgccgactttaccgagaacacgacgctcttcaccaccccaccgcccgcggtcaacatcgacacgcgacagcacgaggtcacgctgcacttcaaccgcaagacggtgcaggactacattggcgagtcggtgaacaaggcgaccaagatccatgcgcgactgcctcccggcggcatcctgatcttcctcacgggacagcaggagatcacgagcgtgtgccgcaagctcgaggcgcgctttggaagccgtgcgatcgagcgcaagaagcgcgagcgcgagcttgtccaaaaccgcactggtcgccgccgcaacagcatcgaggaccaagatgccgatgcggacgtggatgccaagatgaagatcacggcgcgcgatgcggacgtagaggcggtagaggtggatctgggcgtggaccgcgaccttgcggccgatgttgatgatggtgctgccgatgcggacccggatgcgctggatacggacgatgaagccgatggtagcgacgacgacgcactgcccgacgagctgaaggacgacagcgacgtgccgatgcacattctgcctttgtactcgctgctgcccacagacaagcagatgcgcatctttgacgcgccgcccgctgatgcgcggctggtggtggtggcgaccaacgtggcggagacgtcgctgaccatccccaacatccggtacgtcatcgactgcggtcgcagcaaggagcgcaagtacgacctgacgagcggtgtgcagtcgtacgaagtgtcgtggaccagcaaggcgtctgcctcccaacgcgcgggtcgagcgggtcgtaccggcccgggtcactgctaccggctgtattcgagcgcggtgtacgaggagcactttgcgcagttctctcgcccggagatcctccgtacgcccgtcgatgggctggtgctctcgatgaaggcgatgaacattgacaatgtggccaactttccgttccccacgccaccggatcgcgtggcgctgcgcaaggccgagcaggtgctcacgcacctcggtgcgctgtctgcgcctgcggtggcgtcggtgagtgtgggcaaggggttgcgcaaggtgcagcatgcgcaggtgaccgagctcggacgcaccatgacgctgttccccgtagcaccgcggtatgccaagatgctggcgcagggcgagcagcacggctgcctgccgtacattgtggccatggtggcagcgctgagtatcggggatccgttcatccgcgagcagctgctggacgaagagtacggtgaccgccgtgcgcccgcttcatcagcggcggaggagggggacgactacgaccgtgcgttcggcacgatggacggcgacgaggagctcgacgccgagctgcgcaacgtgaccaacgctgagctgctcgacaaggagcggcgcaaggctcggcgcgccaagtactttgccaccatgcgcaagttcgaggccttgggcgctggactctcggacaccttccggctgctgagcgtggtgggcgcgtacgagtacgccgggggcagcagtgcattttgcgacaagaacttcctgcgccccaaggcgatggaggagatccacaagctgcgtgcccagctctgcagcctcatcagcggcacctttccgaacctcgctcgcggcctggcggatcccaagctgaccccgccgagcgaggtgcagctcaaggtgatccggcagttgctggcggcggcgtacatcgaccaagtggccgtgcgtgccgatttgatctcgaacgagggtgtggttgcagcgtctgtggcgcacgcggacgagcggaccgaccagatgctgttcaagctgcgcaccaagggcggcggggatcggatgcagtcgacgcgcggcgtgccgtacaaagccatgggcgtcgccggcttcgcgttcgtccacccgacctcggcgttttaccacaccaccccgcctgcctgggtggtgttcggcgaggtgcaccgcagtcaaccgcgcgtggccgcggggggcgaggacgcgcaaaagggaacggtgtggctcaagacactgaccaagatcaatcccacctggctcaccacgctgggccgcgcgctgtgtagtttcagcaagcccgttccggtcgaggggggcgtggagggggtcaaggcgagcgtgcaggcggtcaaggcgggccaggcggggacgagggaagtcgtggtcacctcgacctacgcggtgggcagcgagaatgacggtctggcaggcggcctcggttggcctctacccgccctccgtgctcagcagaagctcgtcgacggtcgctggatcctccttcttccctgatcgcatttgaatgttacgattgcatctac

SEQ ID NO: 12624 - DNA, 2859 bp, Oryza sativa
  ref <308>: DATABASE ACCESSION NUMBER: AK109972
  ref <309>: DATABASE ENTRY DATE: 2002-08-28
attcaccttcccttcctatcttcaccaaacccgacccccagcccgcctgtcctctacaaagcttcttctcccttgcagacgcttcccagcctgcagtggtgtcgacgctcctgaataccctctcctaacccaggtcccatcttgaaccgtcgtacgaggtgacgctggccctgacagcgcttctttagacatgttccgccgtccgctcacggtggcgccccgcgccggtgcgcgcctcgcctcgacctcgtcgtcctcgtccgcctcggctcagcgtcgcgccttgcccaaccgctcggtgctcgtcgctgtggctcttgctggtggtgcggccgccgcctactccttgtccaagccctcgctctacgcagatgcacccgacaccgtgcccggcgacacccgcccgcatccgctctggtcgcccccttcgcgcgcacagatgctcggagcgctccgccagtcgtccgcaaagagcctccggcccaacgcttcgcgtggcaacaacgacaacgccagccttctgccgctcgccaaggactctcgctctagcagccccagccccgctgcacacgagcagtccggtggcgcggctgcctcgcgcagcggcgacgaggacgacgagggcttcgacatcctcgtcgtcggaggtggtgctacgggaaccggtgtagccgtcgacgccgctacccgtggcctcagtgtggccatggtcgagcgcgacgaccttggtgccggcacctcgtccaagtccaccaagctcgtccacggcggtgtgcgatacctccagaaggccgtcttcgagctcgactacgagcagtacaagatggtccgcgaagcgctccacgagcgcaagaccttcctcaagatcgctccttacctttcggatcacctgcccatcatgctgcccgtctacaagtggtggcagatcccctacttctgggcaggcaccaagatgtacgacatcctcgccggctccgagaacatggagagctcctacgtgctcggcaagggcaaggcgctcgaggcgttccccatgctcaagtcttccggcctcgccggtgccgtcgtctactgcgacggtcagcacaacgacacgcgcatgaacgtcgccctcgccatgactgctgtccaccacggcgccgtggtggccaaccacaccgaggtggtggcgatccacaagaagcccgtggagggcaaggcggatcagatctgcggtgcgcgtgtgcgtgacatgctgacgggcgacgagtgggacgtcaagtgcaagtgcctcatcaacgccaccggtcccttctcggacacgcttcgcaagctcgacgcgcccactgcccaggagatcgtcgccgcttcgtccggtgtgcacatcacgctgcccggctacttttcgccgcgcgacatgggcctcatcgaccctcagacttcggacggccgtgtgattttcttccttccgtggcagggcaacaccatcgccggtaccacagacacggcggcgcccgtcgaggctcacccgcgacccaaggaggaggagatccagtggatcctcgacgaggtgcgcaactacctcagcccagacatcaaggtgcgacgtggcgacgtgctgtcggcgtggtcaggactgcgaccgctggtcaaggacccggcggcgaccgacacgcagtcgctggtgcgcaaccacatgatcaacgcgtcggaatcgggactgctcaccatcgccggtggcaagtggacgacgtaccgcgagatggcggagcagacagtggaccgcgccatcgaagagttcaagctcaagccgcagcgcggatgcgtgaccaagaacacgcgtctgctcggcagccacggctggaccaagaccatgtatgtcaagctgctgcagcgattcggcctcgagacggacgtggcgcgccacctgtccaacacgtacggcgaccgcgcgtggagcgtgtgctcgatcgccgagccgacgggccagaggtggccggtgcacggcaagcgcatcgaccagctgtacccttacattgaggccgagatccgctacgcctgccgcagcgagtacgcggcgacggcgcaagatttcatcgcgcgccgcacgcgtctgtcgttcctcaacgccgaggcgacggtggatgcgctgccgcgcgtgatcgacgtgatgggcgaggagctcggatgggacgagaagcgcaagaagcaggagtgggcggagagcgtagactttatggcgagcatgggcctgcagcctgcgcgcgtggatcagctcaaggcgacgtcgctggaccagatgcgccagcagcgcgagaagcagcagcgggcgctcaaggtgtcgtcgctgggcgcggcgtcgctggacgagaaggatgcgctggcgatctctgcacgtgcgtcgttcagctccgaggagatggaggagctgcgcgccaagttcaagctgctcgacgtcaacaaggacggcaagctggactcgaaggacctcaaggaggtgctgcagcagatcggctacgccgacgtggacgactcgacgctgcgcggcattgtgagcgaggtcgacttcaccaagacgggcgcgctgcactttgaggatttcctcgacgtgtttgcggcgctcaaggacgcccgcctggagaacgcctttacgcacattctcagcgagatggactcgcgcggtctgcagccgccgtcgcacgaccccgtcggaccggcggccaaggagaagtcggaacgccgcgatgccagccgcaccatccccgtcgagaagagcggcggtggctggtgagccgttgcccgtcgctggatctggacctgaaacaaaatcactatcgacatttggaagcccggatgcaatgctatcgttttcgcgcgacg

SEQ ID NO: 12625 - DNA, 3303 bp, Oryza sativa
  ref <308>: DATABASE ACCESSION NUMBER: AK109973
  ref <309>: DATABASE ENTRY DATE: 2002-08-28
catccgcttcgtccaggccgctgcggcgacgaccggcaccgatcttggcccgctcccgccgctcttcgcccaggtgctcgcgcaggcgtcgacgcagacgaccatcagcccgtacccggacttcaacccacccaactgcaggtcgggtcagcagttcgacgtgctcggcgctgttctgcgcacgctgcagggcctcacgaccacgctcaacgtgcagtcgagcgacaagctggacgactacttcaccaacctcaacttcgtccagcagcctgtgccgaccgagacggaccgcaccgcgctgtacctgctcggccccgcaggtgcgccgatcgtgcagaacattgtcgaccaggccgtgctcaccgtcgccatcgccaacatcaccagcgtcaccaacagcggcttcgacgtctcgctctcgggctcgctcacgggcaccggtccgtttgacgcgcagatcgagttcaccgagccgctgacggtcacctggcagggcaggaacatcgccaagctcacgctgccgcccatctgtgcattcgccaacgtcggtgtgcccaacctggtcacgagcggccacttgaccatcaccaacctcggcgcgttcaccgactttgccatctacattctggccaacccgggcttccagtggaccgtctcgtcgaacaggctcaccgtgcgtgcgctcgagatcgtctactccaacgtgatcatctcgaagaacatcgacttccgcgcattcaatggcctgccaggcgtgacgacgttcaacttcgacgtgtacggcgagacgagcgactcgctgctcatccgcaccggcgcctcgatcccgaacccggccacgctgggtatccaactcgacacggccaacttcgagatcttcttcatgggcaccgacatcggtccggtcagctccgccaacctcttcctcgccgcgctcgccacgaccaacacgacgctgcagggtcagatcaccgccaagtccggccgcgacctgcagaacacgggtatcctcttcaccaacttcttgcggggcaagacgcaaatcctccaggtcaagggtgtctcggtggtgacgcaggccaacggcaaccagcccgtcaactggctcagcgctgcattccgcacgctcacgctcaacgtcgcgctgcccggccagatttaccagatcatcttctcgatcacgctgccggatctcacggtgtttgtcaacggcaacccggcggactcgtacacggtgccgtcgagctccaactcgacgatcgcaacgtttgccaatccgttccgcttcagcctgcagccgatccaggcgttgtcgcacatcaacctgtcgtacgccggcggcaacacggcgtacctcgacctgccgctgtccaacgtgcaggccggcacgtcgcgcgggccgcaggacttccaggcgctgcagctcatgtggcgcaggcagaacatcgtcgcggtcgacaggcccaacttccaggcgttcttcgctcagctcaccgacacgcctcgtggccagtttgacctgcgcggtggcacggacgtcgtggccaagacggtgatcggcaacatccccatcggcggcattccgttcaacgtgaccacgacgctcgccggtatcaacagcttcaacggcgtcgcgacgctgtcgcaggtcacggtgagcagcggtacgtcggcgttcctgtgggtaccgctcacggtggcgctcacgaacccgtccaacctgacggtgttcaccaacgaggtgttcctgcccgtcatcttctcgggcaccttcgtgggtcgcgccgagatccctgtgctgggcctgattccgggcgacaacagggtgcagtcgtacttctactatgcgcccgtcaacgccaacgacacgacggctcagcgtctgctgcagcagtacgtccagcccgacgaggcgaacggtggcaagcagatctctcaactcaccatcgacggttcgcagagcccggtgggtcaaggcaacctcacgccgtacgactcgctgcgtccggcgctggcaggcgtcaagctgaccacccagctcgagggtatcgcctcgcgcatcgtcacgcacatcaacgtctatctcaccgcgcagacactactcacgggtctggctggtctgctcaacccggctgcttcgccgcccatcgtcgagatcgacctgacggcgatcaaccaactgaacaccaacctgtacctcgtcgcgctgcagacttcggccaagaggacgggcgagacgccacgcgacgcgacgaacccggatgcgcgcgtgtcgtacacgttccccaacggcggcttcgagatccccgtgggcggagcagaggtgacatcgccgagggtgcccaatgtggtgctgcccaagggtctgattgcttcgctgcccgtgattggtcagaacctggacatctacaacaacctgcccgtgcgcattggtccctcggtgggcgacagctacctggtcccgggtctcaactacaacgagttcaacatcccgacggactacgccttgtcgctcggcggagtgaacatcccgctgggaccggtggaggacatcttgggcctgctgaaccagattgcggcggcgggtgtggatctgacgcagatcctcggctcgacgctcacgcagctcgcgcagggcaatgtgattggcggtctgagcacggcggcgcagggcgtgctgtgcgagatcaccaagctcacgcccggtctgggcttgtcgattctcaatcccattctcaaccaggccaagtgtcccaatgcgcccggctcgtcgtcgtcggcggtatccgcctcgtcgaccgccaacccggtggcgccattggcagcgggtgcaagctcggcggtctcgtccgttaccgaggccgctgccggtgcggtgagcacgctcacatcggctggcggcggtgtagtcagtctcgtcacgcaggcgctcggcggcggtagtgcaagcccagccgctgccacggcgtcgtcatcgtcgagtggcggcggcggccttttgggtctcggcaccctcattcgcagagccgaacccacagcctcaccacactatctctagaccacccactttccttcacttctttgcttcgtctagtctctgttttcccccccggtattctatagtccctgcccaaaccacacacactcacacactctcttcggatcgcgcctgccatatcgaggcgggcatcccacacacactctcttgtttttcccacatcgctctctctcgtgtgcgcgctgcacccaggtgtaggcccccttttacccagttcggaatgctaggtcttgtttcagttcgat

SEQ ID NO: 12626 - DNA, 4771 bp, Oryza sativa
  ref <308>: DATABASE ACCESSION NUMBER: AK109974
  ref <309>: DATABASE ENTRY DATE: 2002-08-28
cgcagccaccttcatgcgcggcttcaagttcgttcagatccccaccaccctcctcgccatggtcgactcggccgtcggcggcaagaccgccatcgaccatccgctcggaaggaacctcatcggcagcttccatcagcccaactacgtcttcatcgacgcagcctggctcaagaccctcccaccccgcgagttcagcaacggcatggccgaagtggtcaagactgccgccatctgggaccccatcgactttgccaagctcgagtccagcgctcccgccatccgctccgccgtccttggacccttcgccgccgacgccccgctcgaccagggcaggaccctcgacacgcgcaccgaatcccagtcgctcttgctcgacgtcatccgcggctccgtcggcgtcaaggcgcacatcgtcaccatcgacgaaaaggagaccggcctccgcaacctcgtcaactttggccacaccatcggtcacgccatcgaggccgtcctcacccccgagatgctccatggcgaatgcgtctccatcggcatgatcctcgaggcagaggttgcgcgctacatgcacggcctcagccaggtcgccatcggtcgcctcacccgctgcctcaaggagtacgacctgcccgtctcgctctccgactcccgcgtcacccgcctccccaagtcgctcaacgtcaccgtcgaccgcctcctcgacatcatgaaggtcgacaagaagaactcgggctccaacaagaagatcgtcctcctcagctccatcggcgacactgtcgaggacatggcatccaccgtcagcgatgacatcattcgccgcgtcctctccctcggtgccaccgtcacgcccatcctcgagcagcccaacaacgccaaggtcaccctctccactccaggctccaaatccatctccaaccgtgcgctcgtcctcgctgccctcgctggaaacacctgccgactccgcaacatgctccactcggacgacacccaggtcatgatggccggtctcacggacctgcacgccgcgcgcttcgagttcgaggacggaggagagaccatcgtcgtacacggcaacaacggtgatctccgtcgccccgccaacaacaagcacatctacctccagaacgcaggtaccgctgcgcgcttcatggccaccgtcgtcaccctcgttggaaacgacggcacccaggatcccgtcgtcatcaccggcaacaagcgcatgaaggagcgcccgatcggtgccctcgtcgacgcccttcgatccaacggcacctcgatcgactacctcgagggtcaaggctgtctgcctctcgccgtcaagggaaccgccagcggcttcaagggcggcaagatccagctctcggccaccatctcgtcccagtacgtctcctccatcctcctctgcgcgccttacgctgccgaagaggtcctgctcgagctcgtcggcggtcaggtcatctcgcagctctacatcgacatgaccatcgccatgatggccactttcggcatcaaggtcgagcgcctcgcagatcctgccaccggccgcctatccaacacctaccgcatccccaagggccgctacgtctcgcccgccgtctacgacatcgaaagtgacgccagcagtgccacctacccgcttgccatcgccgccatcacgggtaccgagtgcaccgtcccaaacatcggttccgcctcccttcagggtgacgcccgcttcgccaaggacgtgctcgagcccatgggctgcaccgtcgtccagaccgccacgtcgaccactgtcgttggccccaagctcggcaacctgcgtcagatcggcctggtcgacatggagcctatgaccgacgccttcctcaccgcctcggtcctcctcgccgtcgctgcccagccgccggcgaacggctccacctcgactgctcgcccgtccacgcgcatcaccggcatcgcaaaccagcgcgtcaaggagtgcaaccgtatccgtgccatgatggacgagctcgccaaattcggcgtcgacaccaaggagcacgaggatggcctcgagatctttggcatcgactatcgtcagctccaccccgacgttcgtgtccactgctacgacgaccatcgcgtcgccatggccttctccgtgctcgccagcttggctcccggtaccattctcgaagagaagcgctgtgtcgagaagacctggcccaactggtgggacgacctcgagcgcaagcttggcatccgtgcccatggcgtcgatcccgagtgctcgcccagcctctgcatctcgccttcgcatttcagcaaggcgagtgtggccaagccaagcgccaacggcaagcagcctgcctcgctcgccgagcttgccggcggccgcacgctcctcccgcgcaaatacagcaaagatgctacgatcatttgcatcggcatgcgcgcttcaggcaagactttcctcggcgcaatcggcgctgctgcgcttggacgaaccttcctcgacgccgatgtcgtcttcaacgagaagctaggtgtcaaggatggcctcggcgactatgtcaagcagcacggctggcccgctttccgtcagaaagagctcgaggtgctcgaggagttgttgcaccgccatcctaccggcgcgcttatttcgctcggtggtggcgtcgtcgagaccgaggcgtgccgcaacatcttggccgactacgccaagagccgaggccccgtggtgtacattgtgcgagacacggatgccatcgtcaacttcctctccaccagcgatcgccctgcttacggcgagcccatcatggacgtcttccgtcgtcgcgacccctggttccgcgagtgctcgtcctttgagctcgtctcgtactcggaaggcgagttgctggccgtccagccgtccgccatcaacgtgcccgacccgtccttcacgatccagaagcgtttcggcctcgagtccgaggtggcgcgcttcttcaagttcgtcactggacaggacacgaaccaggttaacgatctggtcgttgacagccgcaacgccggccgtcgcacctacttcctcagcctcaccttccccgatgtcgtgcccaagctcgaattgatcgggagtatggagtcgggtgctgatgcgctcgagttccgcgccgacctgctcaatgcctctggcgagcctgtcacctcgcctcagctgcctgatgtcgagtacgtcaagagccagcttgcagccctgcgacaccgcacatcgctgccgatcgtcttcaccgtgcgcacgcactcgcagggcggtatgttccccgacggctaccagaaggagtactttgagctcatcagcgttgcccttcgccactgctgcgagtatgtcgacctcgagctcggctgggacgatgatgcgctggcggctgtcgtggccgccaagggctccagccagatcatcggctcgttccacgactggagcggcaagctcgactgggagagcgacgccacggccaagatctacgagcgtgcctgccgcttcggcgacattgccaagatcatcggcaaggccaatacgatggacgacaactacagccttgagcgcttccgcaccaaggtatcggcgtcagccaccaagccgctgcttgcggtcaacatgggtgcggcgggccagttcagcaggatcgtcaacccagtcttcacgcccatcacgcacgagaccatgcctttcaaggcggctccgggccagctctcgttccgtgaagtgcagaacgctctgacgctgatcggcaagaccgagccgcagcagtttgcgctcttcggcaaccccatcggccacagtctgagcccgctgctgcacaacaccgggtttgcagcgctcggcctgccgcaccactaccagctgcttcagacgcgcgaggttggagagacgctggacgccttcgtgcacgctcccaactttggcggcgccagcgttaccatcccgcacaagatcgccatcattcggctgctcgaccgcgtgacggacgaggccaaggcgatcggcgcggtcaacacggtgatccccgtgcgcgacgccatgggcaacgtcacgtccctggtgggtgacaacacggactggatcgcgaccgagacgcttgcgaggcgctcgctgcgcaccgtgcacctggccaaccccaagctgacgggtctggtgattggtgctggtggctcggcgcgtgctgcgatctttgcgctctaccgccttggtgtcaagcgcatcctgctctacaaccgcacgtatgccaacgccgagtcgctggttagggtcctgcccgtcgaatggaacgtcgaggtgctgtcgtcgctcgacgagattgcagccctggcgcccgaggaggcgcctagcgtcgtcgtgtccaacatccctgccgagggtacgacgctcgacagctctgccaaggggctgatctacctgccgccatccatcctgcgcaacccggcgggcggcgtggcgatcgacatgagctacaagccgtactcgacgagcctgctccagcttgcgcagcaggtcaacacgcagaccgagcttgcgatcggcacgaatacgaccaaggcgcccagcaggaagctctggtccacgtgccccggtatcacgatcctgctcgagcagggatgccaccagttcaagcgctggaccggccgcgaggcgcccagggcgcagattgagcatgccgcctgggaggagtacctccagcgctagggcgtgtcgtacagcgcgtgtgcgagccaaaagccggtagtactcgcagatgcaattgaatgtgttgtccagcaaaag

SEQ ID NO: 12627 - DNA, 3576 bp, Oryza sativa
  ref <308>: DATABASE ACCESSION NUMBER: AK109975
  ref <309>: DATABASE ENTRY DATE: 2002-08-28
accctcctttgcctatttcaatccggatccgctccgccgacgagccagccagccagccagccagccagcccagcagcaaacaagctcgctccagcgccgccgttccaagccaccccaggtagggaaccaaccccggttgcccgaaattcagcgacgaccacaagcaagcacccgaggaaggaagccgtccggcctaccaagatcaacaccgctacggacaagaaacagacagacagacagacagacaggcagacaggaagacagacaaacagacagacagacagagacaggcagaaagccagccagccagataaaacgtacagagattcacttcctggtccagcaagcctcgggcggcaactaacgcctttgcaacccgcgaacgctactgcttgcttttggccccgacttctactactcgcctatcacttacattgcttaaccttctttgttcggcccgtctcatctgccgccctttgcatcgagcgctgggcccgttggagcgataaactcaggctccagtcgccttcgcaccgagaattgaattgggccgtctgccaccaccaccaccacccacggccatcgacgccacccacactatctcacaccactcccccaaccggtacgaaagattcaacaattagcacatcgcagggacgggcagatcatcccatcgcatctgcacagcatccatctctctgtggtgcttgttcgctcgctcgtttgcttctgtccggtcgcgcgacgctgtcctttgcgttgtaccgtttccggcgagcctcctatttactagcaccgttgctgcccacgtcatagccctggacagtcgcaaatatccccggacgaggaagcttccctgtcttccctgcccttcctctcttttccctgtcgatcgacgttccctcctcttgcattgacgcatcacccggagacaccgctgcgccgtccaatacctggctcttcccgggttgtccagcacgctctgaatagccgggcaagcttccattggaggaagcgactgcctgagaccatttgaaccgccaaccgccggcatctgggcatttggcattctcgccatctcgaccgccaccaaatcagacacgcgcgcgcacacgcgacgataagccacgatcattgccctgcagcttcttgtctacggtcggcccattgttgattgattgattgattgacccagcatcgacccccttcccctcgattcaaatctccattcagattgagctgaccagccggagcgttcctgccgctttctccagcaatatgttcgccgatccgtcaggccaatcttctggcagccggtcagctggcttgacgctcaatctctcttcaaacaacccctttcgcaaccgcgctgcttcgcccaacagcatcggctccaaccagttttctccccccccacctcactctccttttgatgaccctcctccccgaccgacctcgaggaacccttttcttgaccctaacaacaacaccaactcgggcaacagcaactctttcccagcacagcagccgagagtcaaatcgccaggtagcatgtcgtcgaccaacgaaaagtcggctacggccttcgctgaggatctctttaacagcctaagcctggaagacaaggctgcgcagaagacgccgtctctgcagccttcgaaccggcccccaccacctcccagccgcccttcacggggcgagaatggccccccaccgcgtggccgcggcccacctccccgaggcgctccgcaccgaccaacgcgctcgcaagaagaagcacagagggcagcccgtacccacggcgtctctggctcgctcggcggcgagagaatgtttaactcgtctgacaaacggcctgagcggcggcctgagcggcggccccgtcgcaactctgacacgtccatcatcgagaagcccatgacagaggaggagaagaaggcccgggagatgcgccgccgtgagcgtgagcgacgccaccgcgagggcaaggacaaggacaagcccaagggcaagcggcttgatcttattgaccagcttgacgcgaccagtatttacggtaccggattgtttcaccacgacgggcccttcgatgccctgaacccccaccgtaaccgtggtggcacccgacgtgcgcccatggaggcgttccctgaaggttcgctcaacaattcgctgggcggctctggacctatcaacacgcgccccgaccacgccaccttcatgggcaaccatgacgatgaggggttccgagagtggagcggcgcgggtaaggaccggaacggctacgtagcccccgaggccaaggctgagggcggcttctttgaccccaccgcccgcggcaccatgctccacggagatgaaagcatggggctgggaacctcgacgttcctcgaaggtgccccggcggcccgcgccgatattcaacggcgccaggcagagctcgccgcacaggagcagggaggactgtagagaaagaagtctttagcccagcgcttccggggcatgaaccgcgaacgcccttcgcgcgattatgccggtgcccgtatgacgaaccccgagggtgcctacggaccgagatcgggcgatttgcccaccagcagcagcacgggagagcggaaccctttcttcagcgacttcgacaagggaggggaggagcgcatctcggtcaagaggtccgaggccatgtcccccggctcggcgggcggcaacagccccccgcgtggctacaacatggagcggcggccatcggagcaactgggtcaagcttcgccgacggatccttccgggaaaccccagggtggtggtggtttcttgtcgcgtgtcaaaagcttgaagggcgggcgaagacagcggcccgagatccccaaccaccctccgcctgcaaacaacgctggcacggccgtctagaggagccatgacacaaggaatccacggttgctaggtgatggcaaggctgcacggaaaaaagactggtcgcgatcacagccctgagtacgggtaagggatgtatggggattggcgccacaggcccatgtttgctgggtggcgagggaaccgcaccacgattttcgcatattgcaaagggggcagagtctggcccgcctgccagggcacaggggcggtccggcggtagttctccagcatcatgaacacctatgggctgcttcgttgatgtacccgctcggcgcccggcggcccggggagcatgtacgcgcatgaagcgtggcggtctcgtggctctttctttttttcggactcaccgcggcgcgagccttcagttggggagagggatctcctttacacacatacaccaacacacgcgagaaatacacccaggcacagctcgctgcgaaccgaggctcgttgcggctgccgcggtgggcaggtgagtacaggccccggggcctcgtggtatgacgagtttgcaggaggcttgtgtgtgtgtgtgtgtgtgttttccgtgggcgggctgcatcgcccatcggcagacatggacgcctgtcgatgtgcgacggggaacccgcagatcgtattagtggatcattggaactagagtatattaatttgttcttgttt

SEQ ID NO: 12628 - DNA, 2835 bp, Oryza sativa
  ref <308>: DATABASE ACCESSION NUMBER: AK109976
  ref <309>: DATABASE ENTRY DATE: 2002-08-28
gtccttgaccgctgtgctgcgctgtgtgcgattctccttgtggtgctccaatcccgacaggctctccctcaacctatcctatcccgcctatctgcgcctacgatccgcttcacagcctcacacagccgcgcagcaccacactcggtaccacctaatgcatgcgcctgcacacctcgcccggtaattcctcttaatatagcctttttcgaagattgggttgtgcgacaacaaactcgtggttccaacatagcaaccccccgaaacgcttgtcgcgacgagccccgaccgccagtctgacacgtgctttttcatacaacgcatccacgacacacctcaaacctctacaaggcggatacgcatacgagaaactggcggttgccgagtaatacctgggaattctgcttcgggtcgttgcccgttagcttatcgatatggcggaagtatccaagctccgcgcaattctcacactgtgcaagaatctggtgctggcagcattgctctacgcagccatctacggtgtcatcaccttcataaacgacccttccgtagccgcaaagggcaagattggcatccctaccttcttggacaaagctgggcctaccgaattgatcgagacgaccaaggcaggagtcaaagtcaagtttgcgggcaccaccaagaccgttactatcaaccctcacgccaatgtcttcaaccgtcctatcaccgctgtaaaaaacaaggacgattacttgggtccccgcccccatgtcgataccgaggccgacattgatatgctgattgaagagtgccggggtacttatgctgggattgagaagatgaggaggccgtttgactgtctgaagttcttcgctgagggcgaggaccgctactacagcctcccagagcccgccgaccgagccagtgcttcagacccccgcaaggccgacttcatcgacgccgacggacacggcaagactctcgagaactatacacctataaaagacgcgattgctgccaacgggtccaacatcggcacttgcccaggtccaatcatcccgtttcacacctactggaccggacctgctacgtggagagtcgaggcattcatcaagagctacctctacacccagaatctggcctgctctcgtctttggttatggctcgacaccgatcacaaccccaacgcggttgaaaacatgctcaacaaggacgccctattcgcccgattcattcccctggtcgacagaggtgacattgttgtcaagggttggaagttccccagccgcattccattggctactgacaaggaggacaagaacggcttcgactactacagcaaacctggagcggtaaacgccaagggagagaaggatgtggccgaaaacatcatcgaagacaagactggtcaacagtggctcgttctcactcaaaagcagatgaccttccttccagtcgcagtttccgatgccgttcgtttcatcgtgttgcatatctatggaggcgcctactttgacatggatgttctcatgctccgagacatgcgaccgcttctactaccaaaggagcactcttgggcagagcgatgggctgcacacccccaccctggcgactacaacacagccatcatgtcactgtctgcgaactcctccctctcgtcatacttgctctacggcggcatcagaatgggtgtcaacttccatccacgcgtgcttggtcgtatggcttggaaggacggacgcgatcaagagtttaagatgtttgagactgctgccttcgaccctatctggaccgagttcaactgggaccgtgagggacgatgcacagtaccatgcatccgcgattacagcgcagtcttcaagggcaagattggcggcgtcaaggatgaatgggagagctacgatggaccccaactagatcgcatcgacctcaaggacgcgcaacgcaaagagcttaggacggctggcgatgcattagccaaacgcggggaggaaaatgtgcccgcttctgctgctttacctacgcccaatcacggcgacaaagaacatcccgattcgtttcaagccacgcttgacgaagaggctgagcttcgcaaggccggtgtgattactgattacgttttggccgaagacaaattcccacccaacaaccgtacgttggagaacttcttccggggtgcctggacctaccacatccacaatcagtggatgaaacatcctgaaccttcgtcatggatctcggtcctcgaacacgctcacgacgggttcatcgctggcaagcgcacgaacgcttatggcgagaagtggacgggtcccagcattatgccatacaactactggccagagtatgtgtgagcctccggctgagccgaaccttaagcccccttctgcgatgttgagaagtcgaacatcaaggaggttgccgcgccgaatatcgcgctgtgacgactgcgactggttcttaccaacggcgagttactcattacgtcacacgatcaccagcatactccgatggacgtccctatatcactcatcatctcatccaacaccactttatggatcacgacaacgtcaagtcatcttcaccaaaataagcgcagcataaagccagatctacagctatctgcttttggagttcccggtgtttacatgtatcttcattgtcccgctcgctttggcggcatatacccttcgtttcttgttagtcttttcatcatcggtttgggccgttgatacttgtcctttaggggcgcatgcgccagccaaacttaggtttctaattcgtcacatcaaacataagcagagagatttaacgaggtgtcgtcatggccagaacaaaatagaaaatattacatcc

SEQ ID NO: 12629 - DNA, 3939 bp, Oryza sativa
  ref <308>: DATABASE ACCESSION NUMBER: AK109977
  ref <309>: DATABASE ENTRY DATE: 2002-08-28
accatcgcacctcatcgtcccccgacctcaccaattcgtggtcactggtgcacgctgggacatacctctcccacctcgactggaatcgagcgctgcatccatcttggaaggctaccgtggatcacttgcgtctctctcacacacacagacaccactcgcttgctcccatatcagcctagagccaaagacagccaggagcttctctttccccgccctcgcctggcactgcgccgcttcgccatcatgtcggtcaaaaacgcccatgaccccttcgcaacgcccctcgagaccctccaccacgaccctctcgcagagaccgctggactcaaggccgactacgacaagcgcgcctacggtgaagcgaaccccggcctcgtcggcacgctcgaaaaggatgacatcgccaaccgtcccatcgatgccgtcgaagaggtgcccaccaccagcgtccgcaagtggtgggtccgcctcacatggttcactacctggtggatcccttcctttgcgctcgcaaagtgcggcggcatgaagcgtcccgacgtgcagatggcctggcgcgaaaagttcaccatctgcgccatcatcttttggctctgcgccatcatcctcttctacatcatcggcttcggccgtcttctctgcccagactacgacaaggcttggaacgagtctcagctcagccagcacgcaggtcaggacgactactacgccgccatccgcggcaccgtctacgacttcaccaagttctacaagggcgaccactcggacatcaccaacctccagaccagctccgacctcatgctccagctcgcaggccaggatctcaccgagtacttccccgtgcccctcaccgtaggctgccagtcgctcgtctccgacacctcgctcgccctccagcccaccgccaacaacacccccgccatctcccaggccgtccacacctcgggcccgctccagtccgacgcctcctccaagctgcacgacatcgaatggtaccccgagcgcttcctccccttcaccaagaagctcaaaaagggctactacgtctactccaaaaagtcgatcgaggaccagggtcagtacaggaattgggccgtcgtcaacagcaaagtctacgacatctcggactacctcaacaccctcaacgtctaccagaccaacgccgcctacgatttcctcgactcgtcgctcgtcgcgctcttcaagagtcaggcgggccaggacatcaccgccggctttaccgaggtcatggccggcttcaacaccacctaccgcggcgccacccaggcctgcctcgacaacgtcttttacgtgggcaagaccgacttccgcaacacggcgcgctgcgaggtgcaaaactacctcctgctcggcttctcggtgctcctcgtcgccacggtgctcgccaagttcatcgcggcgctccagctcggcaccaagcgcacgcccgagcagcaggacaagtttgtcatctgccaggtgccctgctacaccgagtccgaggacaagctgcgcaagaccatcgactcgctcgccggcctcgagtacgacgacaagcgcaagctcctcttcctcatctgcgacggcatgatcgtcggcagcggcaacgaccgctccacgccgcgcatcgtgctcgacatcctcggcgtcgaccccaagatcgaccccgagccgctcatgttcaagtccgtcgccgaaggctccaagcagctcaactacgccaaggtctattcgggcctgtacgagtttgagggtcacgtggtcccctacattgtcgtcgtcaaggtgggccgtcccagcgagcgctcgcgtcccggcaaccgcggcaagcgcgactcgcagatcctgctcatgcactacctcaaccgcgtccactttgacgcgcccatgttcccgctcgagctcgagatgtaccaccagatgaagaacgtcatcggcatcgaccccgcattctacgagtacatcctcatggtcgacgccgatacgcgcgtcgaggccgacggtctcaacaggctggtggccaactgcgccgacgactcgcgcatcatcgccatctgcggcgagaccacgctggacaacgccgagggctcgtggtggaccatgatccaggtgtacgagtactacatttcgcaccacctcgccaaggcgttcgagtcgctgtttggcagcgtcacgtgtctgcccggttgcttctcgctctaccgcatccgcagctcggacaagggccgaccgctgttcatctcgaaccgcatcatcgacgactactcggagaaccgcgtggacacgctgcacaagaagaatctgctgcatctgggtgaggatcgatatctgacgacgctggtgctcaagaacttccccgccttccgcaccaagtttgtggcggacgccaaggcgctcaccagcgcgcccgagcgattcggggtgctgctgtcgcagcgtcgacgatggatcaactcgacggtgcacaacctggccgagctggtgctcatgccggagctgtgcggattctgcctgttttcgatgcgcttcatcgtgtttatcgatctgctgggcacggtgatcctgcctgcgacggcggtgtatctggtgtatctgatcatcacggtggcgacgcgcacggcggccatcccgtacatctcgattgccatgattgcggcggtgtacggattgcaggcgatcctgttcctgctcaagcgccagtggcagtacattggatggctgatcatctacatcctggcgtacccggtgttttcgtttttcctgcccatctactcgttctggcacatggacgacttttcgtggggcaacacgcgtatcgttgtgggcgagaagggcaacaagaagattgtggcgggcacggacgacgagccgtacgacgacacgatgattccggtgaagcggttcagcgagtaccagcgcgaggtgtgggaggagggagcggcgccgtcggtgcgctcgggcatgacgggcgcgagcgggccgtttggcaactcgcaggcgatcctgcacagcggaccgccgagcctgtacaaggcggggagcgcgtatgcgggcagtgcggcggggtcggagtacgggcagccgttgggcgggggcgactactaccagaacaccaacgtgctggcgcggccggcgcactcgcgacaggcgtccggagcggcgctgtcgcagatgggcggcatgggcggcatgggcggcggatcgcaggtgtttgcgggcacgccgagcatgtacggcatgccggggatgggctcgatgtacggcatgccgagctcgtcggcgtcgatgtacggcatgcctggcatggtgaacccgacggcgtcgatgtacgggatgccgccgatgatgcccaatccgctggccatgacgcattcaccggctgggtcggacattggcttgaccatgccgctctcgcaacaaaacacgggcagcaacatctgggcgcagcagcagcagccgcagcagccgcagcagccgcagtcgccgcagtcgccgcagcagcagcaggagatgcgaccggttacgacgtactcgacgctgaacgcggcgaatccgtttgcagcagcgcacgtgccgcgagcgcttccggtgaacgaggcgtcggatccgacggacgaggagattcgggcggcggtgcagacgtatctggcgtcgcaggcgagtctgatgagcgtgaccaagcgctcggtgcgcgaggcgctcgtggcagcgttccccaatgccgagctgtcgtccaagaagcagatgatcaacaaggccatcgacgccacgctctcgggcggtgcgcaggcctaagccttttaccctctccaacacactctcactccctcatacacgcgctctctgcgaagggggccgggcacacactctttgtttgtgtttatgttttcgttttgcgattgtttcatcaatgcacggactttctttttctcgatctgg

SEQ ID NO: 12630 - DNA, 3707 bp, Oryza sativa
  ref <308>: DATABASE ACCESSION NUMBER: AK109978
  ref <309>: DATABASE ENTRY DATE: 2002-08-28
tggcagcgttgttttcgccaagatcaccaaggttcccgagaacaagcgcagcttcgaggctacgctcgaccccaaggccgtctccaccacccctatcaagcacgtccccagcatcaccgccgtcctccccggcaccctcaccaaggttctcgtcactgccgcgctccccaccggcctcaacgtcaagctcttcggcatgttcgacgcaaccatcgaccgattccaccttcctgagctgcccgagggcaaggacattccagacgtatacaaggagggctccaagcacgtcgctcgtgtcctctgggacctgctcagccctccctcggcagcgctgcagggagagaacccggaacacgagcgcaagtttggtctttcgctcgctcctcaggtgctcccgctccaggcacccgtcgccaaggatcagcagctccttcagcacgcataccccatcggcacccccatcaaggtgaccgtcgtgcagaccgtcaccgactggggcctcatcgtctcggttcaaggcaccgatctgcgcggcttcgttcacatttctcaggtctcggacgaccatgtcgttgcactgccgccgtctagcgggccgttctgcaagggcaccgagcacaaggctcgtgtcgtcggccactcgcccaccgaccgcactctacagctctcgctcaggcgtccgtgctcgagcgcaagttcatgcgcgtctcggaagttgaggtcggcgaggtggtcaacgctaccatcatcaagctcggcctgcccaacgccatcttccttcagctccagggccacgtcgacggcgtcgtcttcgcaaaccactttgccgacgtcaagctcacccagcccgagaagcgattcaagccaggcctacaggtcaaggcacgtgtgctcgacgtcgaccccagccgcaaccgcatcgtgctcacgtgcaaaaagtcgcttgtcaagtcggacctgcccatcgtcggatccatgcaggatgcgcgcgtcggtgtcgtcacccatgccactgtgttccgcgtccaggtcaactcgatcatcgtcaacctttttggcggcctcaaggccctcatccccggtagggaggcgagcgaggcctcgttcgaggacgtcaaggccagcttcaccgagggcaaggtagtcaagatgcgcatcaccgaggtcgactacgagaaccagaggctcgtgggcagcatcaagcaggcttcgcccgagttcctggccaagctcaacgtggatgccgtcgaggtcggcgagaaggtggttggcaaggtcgctgcggtgcacaaggaggtggtggtgctttcgcttgtgccgtcgggcgtgcgtgcgctgctctccctgtccgtgctggctgccatgaggggcacttccgccgagcagctcctcgagagtctcgaggaggaccaggagatcgacaacctcgtcgtctcggtcaagaaccccgaaaagggcctcgtcattgtggcagacaaggtcaggtcgagcaagaccgctcgcgatgccaacggttcttcttccacgtctgcgcaggtcgagcagggcgccgtggtcaagggtcgcgtcatccagaagaacgaaaagtacctcgactgtgtcgttgcgctcggcaccgccacgcgcgccacgctgcacatcactgatcttgccgacgactacaccagcggcgtctcgctcccttcgcccggagacaatgtcgactgcttcgtggtgtcgctcaaggccaacggcaagagcggcgtggtctcgacgcgtgcctcgcgcatctcgccctcggacgccgaggtgaccgatgctgagatcacggcgatcaccgagctgaccaagggccagaaggtgcgcggcttcgtcaaggcgatcaccaacgtcggcgtcttcgtctcgctgggccgcaagctcgatgcgcgcgtccaggtgcgtgagctgttcgacgagtttgtgcgcgactggaagaagcgcttcaccgtcggccaggtggtcagcggaacgatcatggacgtcaacgccaaccagaacgaaatcgagatgtcgctcaagagcacgcctggtagcatcaagccgcgtgccgagcgcgcacaggagcgcgccgaggccgacggcacgaagcgtcccaagcgcctcaacgacttcaaggccggcgacaaggtcaagggcttcatcaagaacatcatcgactttggcgtctttgtccagatcgagggcaccaacgtgtcgggtctggcgcacatgaacgagctcagcgatggcaaggccgacgaggcgctcaaggcgttccgtgtgggcgacaaggtgcgcgtcatcgtgctcaggatcaacgaggagaagaggaagatcagcttcggcctcaagccctcgtactttgacgcggctgacttcgaagacagcagcgacgaggacgaggacgatgaagacgaggaggaggagatggacgaagacgatgtcgccgacatcggctctgatgccgaggacgacgcgagcgacagcgaagacgacgacgaagctgatgtcatcgagatggacgaggacagtgattctgaggcggatgctgcgccttccaagtccaagacgtccaaggttccttcgcttgccctctcgggtggcttctcgtggtccgcaggagctggtgacgatgacgcagcggacgagctggattcgtcagactctgactcggactctgactctgactccgaatctaaagcggccgcgcttaagaaggagaaggccaaggcgcgcaattcgcgcaagggcgctgcgctcgaggaggacctgactgcggaccttgcgaccaaggcgcccgagtcgtcgagcgattttgagcgccttctgctgggctctcccaacagctcgttcctgtggatccagttcatgtcgtttgcgctgcagctttcggacgtggacaaggcgcgcgagatcgcacgtcgcgcactcaaggtgatcaactaccgcgaggagcaggagcgcatgaacgtgtggattgcgctgctcaacctcgagaacacgtacggctcggacgagacgctcgaggcgacgttcaaggaggctgtgcaggccaacgatggattcaccatgtacctcaagatggtcaacatcctcgaggccgccgacaagaacgacgtggccgaagagatgttcgtcaaggccaaggcaaagtactcgacgacgccggatttctggatcgagtatgcgcgctacctgctgcgtactggccaagctgatgcggctcgtgcgcttctgccgcgtgccatgcaggcgctcgacaagcgcgaccacacgagcaccatcacgcgctttgcgatcaacgagttcaagctcggcgacgccgagcgcggccgaacgatctttgagggtctggtggattcgtacccgaagcgcctggatctgtggtggcagtacctcgaccaggagtcgcgactggacgacaaccagaaccaggtgcgcaacctcttcgagcgcacactcacgctcaagctcaccgccaagaagggcaagagcctgctcaagaagtggctcgagtacgaaaagacccacggagacgccaagagccagaatgccgtgctggccaaggccaagcagttcgtcgacgagatcgcccgcaagaaccaggctgacgaccaggacgaggatgacgagtaggcgtgtttcccccgcgtgtttcatatgtaccaagcagatgccttcaaatgctatgatatggtttcgctatt

SEQ ID NO: 12631 - DNA, 3086 bp, Oryza sativa
  ref <308>: DATABASE ACCESSION NUMBER: AK109979
  ref <309>: DATABASE ENTRY DATE: 2002-08-28
gacagcgccatggcttgccccaacggctactgacgcaaatcactccaacctccctctctctcgcgggtgtcgactcgtttctgcctcgctcatgctacgcccaagcctccacgtccacctgccctagtcctgccctcggcccctcgtgctctcgtgctctcgcaatcatgttgcccaacaacgcattccacatgcagccgcacatggctcagcagcagcagtcgcaacagcagcaacagcagcagcatccaggcgccatgcaaaacgccgccaactttgcaatgcagccttcggtctatgcacagcagcaatcgcagcagatgcagcctccgccatcgcaccaacagcagctccagcaacaccagcttcagcagcagcaccatcaacaccagatgcagcagcagcttcagcatcagcagcagcagcagcagcagcatcagcagcacctcgcacaacaccatcagcagcaaccgaatcatccacatcagcatcagcctcagccctcggtcgtctacgctggcggacctccttctgcggcctcggtgaaccaacccgtgcacatggcgaacccgtccgctggctcttccgcttatcaccccaccatgcagcagcaccaggcacagatggccaggatcgcacaggcgtctcagccacagctcggcaacccgcaacagcagcagcagcgtccaccccaaggctctgcactcacaccgcagcagcaccaacaccagctccaacaccagcagcagatgcagctcatgcagcagcagcagcagcaccaaatgcaaacgccgcagcaacagcaacacgccgctcagcaccaacaccagcaagtcatgttgcatcagcagcaacagcagcaacaacagcaacaacaacagcaacgccagcaacagcaacagcaacaactccatcatcctcatcagcatcccgcacagccccaaacaccgcagcctcagcagcctcagcagcagcatcagccgcagcagcacatgcccagtcactcgcaggtcacgctgcaatcccatcctcaggcgcagcaggctcagcaggctcagcaacagcaagcgcagcagcagcaagcatctctggccgcaccctcgctgcatcgtcaaaactcgctgccaccatctgcacagggacatcacagcaacaacaactcgcagcccaccaccgccaacaactcgcctctcccctcggcactcgcccatcgcgccgcacagcctggaccgcatcgtacgccgacgcccatctcgcatgccgctcatccgatgcagtccaccgcctcggccgcctcggcacctcccaacgccgcctcctccatgcccagcccacaggtcaacgctcccatgcccctccgccaagcttcggtgccgctcaatcatccaggacctcccactcccacgcacacccgccctccctcggctgcacccacgcccgcgctccagtccgccaatccaccggcgtcggccatgcccatgccgcgacccaacagcacctcgcccaacgcaagccagatgctccacaaagctgccgctcaagccttcgccacgcctgtcccggcaggcgccaacggtgcggtttcgatgggctcgtcgaacgtggatagcatggcgggcgcacccggcccgaatccgcatctccagtcgcacttcccaccgggagcgggcgtgctgaggctgctccaatactcggaagcgctagggagcggcgcgaatcggagcgacattgactactggcagacgtttgtcaacgagttctttgtgccgacgggcgtgtaccgtctgatcctctggaacgccacctcgcgcgaacaaaagggcttcgagatcccgacgtgcgtgctgccgcgcttcatgctgaccaactacgtctccggactgcgttcgtcgcagctgcagctcgagacgcctcgagagtaccagacgggctggccaccggtgaagccgctgccgcctctgccggcgtcgcacaagtttgtcaacagctttccgtcggccaacgtgacgcatcacgtggacacggagcaggcgacgtttgtgtcgagcttcgagagcggatggcaggtgcagatgtcgggacggctgcgggcgtcgtttgtgccctgggcgctcgagcagccgggcgaaccgggcaagatggatgtgcagctgcgtctggagtcgctcgacttcacggtgcatgcacatgcaggctatctgccacgcgtggccatccaaatgtccaaggtggatcacccgctgccctcgagcctggtggcgagcattcgaagcacatcggacaaggcggggagctcgcttcccaacggcaccaagaaggggcaggcgcgaggcactgcggctcgcaaggaagaggccaaggacgactcgaatcggggcgacgagggggcgccggcgatcaagctcgaggagggcacggggacgagctcggacgacgatgccaagagccagagcgggttcagcgtggcggtggaaaggacgttcgtgcccgactaccctgtcaacgagtatgggatcagcctgcgagccatgcggtgtctggagattacggagagcgtgtgccagctgcgcgatctgatcgacatgagcatgcgcgacaagctgggccccatcgatgcgctgcgcaagtttgcaggccagtatcgcgatatgcaatcgggccgagccacggcgcaagtgggagcagcgggcggcgcgctgggcgacgccaatggcaatggcaatggcaatgcagcgagtgctcagcagcagcagcagcagccagcggtcaactcggccgccacgccagggccgccgccgatgggacgatcgccaagcgcacacggccggccgctggagaacggaacgggctcgaaccatgcatctccagtggttgccaacggcgtgacgagcctgaagcgcaagggcaagacggcacccagtccgagtcccaagctggcggccaccgccaacccagccaagaggcaacggtgagccgccctccccccccaggctgtgttcgtttttgattgttctttgtacttgtatcctttgtcgatggtgtagcctgcaatttcccacgtcacctctgcccagagctgtattctc

SEQ ID NO: 12632 - DNA, 3396 bp, Oryza sativa
  ref <308>: DATABASE ACCESSION NUMBER: AK109980
  ref <309>: DATABASE ENTRY DATE: 2002-08-28
ggatctccgtcctttctgcgcttctcgcgcctctcatcctcgccacgccacgcctgccttgctacaggttggctgacgagcttggacgtccgccagagcggcccggcctgcgccccagccagtctccgtccgcaaagttggcgcggatgagacgctgaacgcaccaggtcctccccttcttcgactcatcctcctctgcaagcaagccgctcgtcatggcttccaacggcaacacccgcggcgcatccgcccagcgcggtgcttccaactcgggattccgcggagctggcaacaatcatgctggaggtcgcggcggcgccaatgctgccagtcgaggtggcgcctccgctggcggtccgcagccttcgaggtggggtaacggtccccctgccaacactggtgcttctgctccccacgctcagtctcgaaacgtgccaggcgcgaggcccgctcctgacaacagcgccaaggccgccaaccaacgcactgcagcaccgccgagccagtccaccaccaatcagcagtcgtccgcctccactgcctcggcccccgcttccgcccagggcgactcgcagaaactcatgcacgaccgcatgatgttcctcctcgtcacgctcatcggcaaccccgtcaccgtcaccgtcaagggcggctcccagtactttggcatcttctcggctgccaacaccgaaggcggcgagctcggcgtcgccctcgcctccgcccagcagatccctcccgcagacgccaaggacgcacagcctcagctcggcgctctcaagtcgtctctgctcatcaacgcaaaggacctcgagagcatccaagctgccgaggtgcgcgtgcaagatcaggcaaaggagatgcgtgaggcgcgcgaaaaggaggccttccgcaccgacaccgagatctccaaggccttcgacccgctcggaagcggtagagccctccaaaagtggtccgacgaccccgacctcgccgacctcgacgatcacagctccaagctcccagcatgggcctcccccagcgatgccaaagctagcggagcagggggcctcgaggactccaacagcaacaagccctgggaccagttcgctgccaacgaggcccgcttcggcatcaagtccaactacgaggagaacctctacaccacaaagctcgaccgcaccggcaaggacttccgcgaccgcgagcgcgaggcagaccgcatcgcacgcgagatcatgggccaggccaccaacaatccgcacatggccgaagagaggggtcatgccgacgactcgggcgtcaacgaggaggacaagtacggcgccgtcgtccgcaaccccaacgcctacgtcccgcctgcgcttcgcaacaagtcgggcgctggcgccgccaccgccgccgccaagaagccctcgccagctgcgccccctgccgctgctccggcaaagtctaacggcgctgctcctcccgctccagccgcgcccgccgacgtggtctcggcagcaccagctccccttgccaccaacctgccaaccgtcaacgtcaaggtgccgagccccagcattcctcaggagcccacgtccaaggacgccgcaggcaaaaaggcctccatcgacgctgccaacccgctcatgggcgacttccgccagttcgtcagctcagagcgcgagcgcctcgaaaagaagaaggcagcgctcgccaagaaggagaaggacacgcgtctcgccgatctcaagtcgtgggcgagctcgttcaagctcaagacgcccatgccgtcggacgtcgccgacatggtgcagaaggacaagcccgacgccgcctcggacaagccgcgcgacccgagcctgcagaagagcctcagccccacgccttcccactcggccgccgtggctgccgccaaggccgacgccagccgctcctcggccacctcgcgagcagcgcaggcttcctcgtccaacgtcgtcagccctaccggaggctcgggatccgccgaggccagccgcgacgcgcacaagctcgccgagagcaaagctctgcttcagaagatgaccatccccaagatcccgccgttcaaccctgacaagttcaaggcacgccaggcggctgccgctgcgggctccggtggcgaagccgacgacgccgccaaggcgccagccaagccagagggcggcatgccgtcctccatgagcacgtcatcgttcaagctgagcgccaaggcgagctccttcaagcccttcaatccgaatgcagccaccttcactcccggcggagcgagcttcacacccgctgcgccgccctcgaatgcggcagctgctgcgagccctgcacccgccgcggctgccgggccgtcgctctcggctcgtccttcgctcacctcgacgccgccgaccgcctcgacgtcggccgccgcgcctgccaacccgttcttcggcaatcgcatcatcaagaagtccaacacgccgctgcacattcgcgacgactttaacccgttcaaggtgagcaaggtgcctgatgccaaggcggtcggtcccatgtgggcctttagcggcaagccgtaccgccagcactttgtcgttgctcctcctggcgcgctcatggacgatggtcccggtctctacgtcgcgggtcccggtggaatgatgcagccgggcatgcaccccggcggtcagactccgcagcatgtcccacagcccatgcatcccggtcagatgtcgcagcccggtcccggacccgccggaccgggtcccgtgccggctcctgtgccgggacccgggccgacgcaaggacctggaccgccgcagcagccgtttgggatggtgtatcagccgtatgccggtgcgccgtaccagtatcctggcggccagccgccagcgcagggcatgcaaggtcgccagccgggcatgatgcagcccatgcagatggcgccgaacatgcagggcgcgcccatgccatacggtggcgtgccgcagcagttcatggggcagatgcccttctcgccacccatgcaccagcacggcgcgccgcaaaacatgtacagcccacagatgggcaacgtgccccccgcgggccaggcgcagtttatgcccatgccgcccccgggcgcgggtggaccaaggccgccaccgccgcacatgaagggccagccgcatccaccaggcgcccagccacacatgtactaccccggccagccaggcgccaacatgccctatggtgccgcaccgcaattcggcggtcagccccctcatgccggtccgcagacacagggcggcgctgctcctcgcgcgggaccgggtgagtcgggtcccgcttccagcgcggcgtcgtcgactgcatgagcactgtcgacgtcgcgtgggggaacgcttcaccttgcttagcttcaccctgcggatctgaagcagtctctcacac

SEQ ID NO: 12633 - DNA, 3740 bp, Oryza sativa
  ref <308>: DATABASE ACCESSION NUMBER: AK109981
  ref <309>: DATABASE ENTRY DATE: 2002-08-28
acatccttcgagcgagctgcgattgcatcctacctgctcttcacctccattccctactcggacatcgaaggctccacatccgctcgggcaccatgcatctttagtcctaccgcctctgtcgccgcatccaccgtgtccacgacgcgcgctctcaccatgcccaagaccatctcgtgtccgcacgccgggtgcgactacctcttctccaagccggtgcatctgcggcgtcacctgctctcgcactcggacgaggcggtgtggaagtgtccggactgcgaccaggagttcaagcgcatcgacagcttccagcgtcacaagaagcgcatccatccggaccagcccaacctcgcggcggtgcgcatcggcggcgatgcagacgccgacagctcggccaagtcggacgacgaggcggatgatcagatcgacgacctcgacatctcgatgcgagatgatgatgcaaagccgatcatctcggtcaagcgcggcgcgactagtccgctctcgcgcggtgcgaccgcctccgcttccgccacatcgcaccagatgagcagctacaatacgccctcggctctctccacacaacgctcgtccggatctacatactcgtcgccgtcgtcgtcgcgacaccatgggctggctaccgcaacagagccgtcggcctcgatgtacacccgcgcccaccactaccatccgtaccagcgcagcgattccgcacctcatgcggcacagtccaacaacggcgactcgtccgccgtcagtcacagccagtggccatcccagcccgcacagtcgtcgatgtacgactcgaacaacgctgctgcctcttcgtccttctcgttctatccgaatctgtacggcgcgcccatctcgtacaatggctatgccgccgcctcttcgtcctcgaccggcgcggatgcgcttgcggttgcgaacacctatggctcagcagcatcgggcgatgcgtcacagacggcggctccgctctcgatagcatcgctcaccgcaccgtccccctcgtggggctcgtccaactcggataccgaggcgcagacgttctttgacgacattctgcagtccatcctcatggattcgatctcgacgtttgtgccgcacgagactgtgggtgcgtccgatctgcacaacctcacgggtgctgcgatgacgcaggatgcgtttgggtttggtgatgcaggtagcgcgggccaggtgatgccctcggcacaaaactcgttgcaggtgcagcaaccgggacagcagacgcagcatcaaacccagccgccgtcagcagtgccacaggaagaccagcatcaacagcagcaagagccagtgcagcagggtcagaaccaaggtcaatgcgcacagccggcggaggtgcagtctgcaacggccacgtcgacctcgcagcagcagcagccaccacaaccgctggtgaatctggtgccgtttgcgacgtttaccgagtcggcgcacaattcggggcggtcgacgccggcgacgccgcgccatgcgcatgcgggcatggacgatgcggacgagatgacgcgctcggtggaaaaggtgggcgaccaggctgcgacgaacattggggcgcgcacgcgcgatctggtgttgcacggcgtcaacatccccaagaagccgccgcggctcactgccgcctcgctcttcagcgcggctacgcggcacacgcggtcgatgctgccgctgctgccgtcgtactggctgctagaccaccgtcgtttggctgccgaacggccgtacgtcttcgtctcgctgctggcgctggggacgctgtggcagccacgcgccgatgtcaaggcgtacggcgccgagctgtggcagctcatcttccgcagcatctgggcgggcgcggtgttctacctcgaccagccgcagctcatgcgcgaggcgacggcggtcatggcgtacacgcatctgtacgcgttcatgtgccgcgacgagaacatccgtcgcaagtcgatccacagcacgtatacgggcagctcgctcatccgcgagtacggatggcgccaaggtgtgtggttcctcgtagggccgtgggaagagtcgctccagcgtctgcttggtgcgaacattcagatggcactggtggagctcgaggtgcttacgagggatcagagcaccaacaggttgtcggcggagcaaaagaggctgttggataggctgcatggggtgtggaagcagtggtcggatgcggaggaggtgaatcgcaacatgatctgccacggcatcaccgagtcgcaccactcggagtttctcacgagccacggacagatgcgtagcatgggaaggatcacgtgccaggcgctcgtgccgagtgccgacgatgtgtgggacgccaagacggccatcgagtgggcgcggctcgtgctggaacacaagagccggcgcgaaaaccaccagcgtccactactggcaggcaagcgacagctcggaccgatcctggatgcgctttgggacgtcgatgccccctcgcctgctacggccaagcggcgcgattcgggcgagagcggagagctggacagtctcgaggccaagcgcgagctgcagcgcatgatgtgctttaccatcaaggagcactttgcgctgctgacgctgctcgagggactgcatctgctgtggatcgcgcgatacatgccgtcgttccgaacgggcacgtcgtacgccgccgactttagcccgtcgcagcccacgtttgcacccgggatcgagtcggtgttctgcatcaagggcggcacggcataccaccatctgaacgtgctcgacaacgagatgatgctcgcggcgctctcgaggtggatgcggctgtgccaccagtcgtacctgcccaaccccgtcgccaacggtacaggcttcagccagcccatcagcagcgatggccccagtgcggccgccgacaagtcggcagatgcgggcgtgccagccaagccacgcgtgcagagcatcggaccgatcaatgaccggttccagctgcatttccggttccacgtggtccagctgtcggtgctgttcaatgcgcaccatgtggtgcatgcgctcgtgtcgtcgtgtggcaacgaagaggccaacggcgtcggtcaaggtgcaaaggcggcagcggttcgtccgggcatgcagacggcggtgccgttgcgctgcgagagctgtacggatccagacatgtgcccctaccgcaatgcgcgtctgcagcgctgggctgcactgcatgccggagcggtgatcggcaactttatgtccatgccgcgactgtccaatgtgaccccgacgatcctcgagggtctcgggcaggcattcggcatcctggtgatcctgtgtcggctgcagcgaccgctggcgcagcgtcggaggaccatgtgtcgatgcgatgccgaggtgcgcgagggaagtgtcgagctgatttcggaccagtgtctgcatctcgatgccgaacgacccagcccgggagagggggtcaaggagaaggccagtgcgaggttcgagtcgagcagcgactgctggctccagcacggcacgctcgacgagggcgcaacgctgctagggcagccgatacaggagtgggcgtttgtgctgcaggatatgggcaatgagctcaagagcgtcgcaggcacctggcagaccgccgaggagttcctcgccgtctcgcagaagatgctcaacagttttaccttctatgtcgagtagcgtccgcatgcatttttcaatcggacggtgctgttcaatgg

SEQ ID NO: 12634 - DNA, 3426 bp, Oryza sativa
  ref <308>: DATABASE ACCESSION NUMBER: AK109982
  ref <309>: DATABASE ENTRY DATE: 2002-08-28
tggccggtcaatccggtcgatctcgtcaagaaatctgcctctgccggtcgctcgagccccgcgaccttcactgacgccgaatgcgtctcgtcacccgtgctgctttcgcccactgcgatacagcccactgccatccatgctttgccccaggctccgcaggcatccaccaaggcggctgctaacaattcgagcgccatccctgcttcaacgagctcgggtggcctgctcgccgttcccggcaccccaacgatgagccgcatgagctcctcccacagcctttcgaagcttgccaaggcggcagccgatccagtctctcgcactgcttctccagcggagaatggcgtgctcgtagagcctccgacgccgtctcgttcgccttcgccgtgccccactgaccaagagggccctcgggacggccttgtctctcgccagaccccgtcgccagccccatcatccctggccagccacgctatggaatccggtcagagtcagaaggccctcgagagggcctttgcagacactatgccgaaagcattgggaccctacgagctcgtcatcaaggagcgaatgatgggatgctacatggccgtgtacgtctggcgtggctgcaaggatcgtgtgcgcggcgcgtctcggtcgcacgtcaagtccggtctgctcgccggtcgcgttggcaacaaaggcggcgtcggtatctcgctcaaactcggcaccacgcgactgctgtttgtcaacgcgcatctcgctgcacacgaggacaaggtggcactccgcctcgccaacgtcgccaagatcaaggccgccctcaaggtggactcgttcttgccgcctagtgatcctcgttctaagctcgaggatatcaccgagcaattcgatcacaccttttggttcggcgatctcaacttccgcatcgacatctcgcgtcagcatgccgattggctcatgatgaacaagaagtacgatcaagcgctcgccttcgaccagctcggcaaggtgctcaaagatggagacgctttcagaggcttcaaagaggcttccatcaacttccctccaacgtacaagtacgacgtactcaagacgctcaagatcaagcgcaacaagacgctcacgtcgattcggagcggcgtcgacataccgggcgctggcaacctggctggcacgaccaaacccacgggcttggacctcgccggaacaccgattggcgaggtgattcctgaagagggtgcgatcgggtcagaggcacctggcaggcttggaggcgacgacactgacgacgccagcttctcctgcatcgcaccgggtgagcctgagccctgctcatcgcaggatgaatcggcacgcaccatccccattgcaggcagaccggaccgtatcgaggctgccatggaaacggtcgacctgcaggatccggatcgttcggacgaagaccgcttttccatcgcttcatcatcggcattcggttcggttgcctcttcgtctggctttgctcgtgccttcaaacacgaggaagcgcgtatgtcacagggcgtcgatccggcactggtacgcgagcgcgagctcgagctcgagcagcagaaacagctggcagagaacacgagtgcagcgcaggggcctcgcttcttttcgcagggcgctgcgatcaaggccaagttcaagatcatggatatagtcaggaatgcggccaactcgaatctgaagggcaagcttggcggtgctgcgtctgcagacggccagcccggcggcaagaagaagtggctcaacgtcctcaccgagtcgcctaggaagagcgccatgccagcctcgttcccgagtgacaatacctcgatcgtcgactcggttctgtcgatgccttcgcccaccaccgaatactctgcttccttcaccgatcacaacgatctacagcgaggaggagcgaggagaggcagccttctgtcgaacgacggccagctcagcagcgtcggacatggcgagattggcacgcctcgccgaggctcgagtggcgatgtgcagaccccgtccagcgagcactctgtggcgttcacgggcgcattgtcgcgacgatcttcggcgcagctggcacgaacatcggcgcaggctctggcggcgaaagcgcagcgggaggccaagtacccgcatctgacgggcgccaccgccgagcagattgacttcttggaggcgcagccatacgacacgagtgccaagcagcgcgtgccgtcgtggtgcgatcgagtgctgttccgatccactgtgccgctggacgacgacgatgcggacgagagcggcgacgcaagcgccaaggcggatgcgcacgaggccaggcttggctcgagggtgggcagcgcgctgtcgaatgcgctcatcacgccgttgcgccaggcggccgaacggcgccagcagctgcatgcgcagaggagcatgtcgagcggcctgattgccgccgttgccggcagcaccaccatcgcgttcgcgcaggatcacaaggtgcccgccgaggccagccttgtggatccggcggctaggaaagcgtcgatggcgcggcgggattgctccaactcggtcaaggaagctgcggcgccactcgagtcgagtccgcgcgccgagacgcggacgctggcaggcgtcgagcgcacgcggcctccgcacctgctgcagcgctttctgcacccaggccgacgccgacatcaggccaaggcgctcagtccgagtctcacgttgtcagagctggtgcacgagccgggcgccggcgcgagctgggcggccaagaacagcagcgccgagctgctgccgacgtcggcgagtctgggactggggctcggcgcgggcctggggctggcggggctcgagcacaaggcgctcagctcggtcgacctgccgagccaggtcgaggagcgcgaccggcgctttggtggcgtgccaaagcgcgtcgcttcgcccgcactcgcgccgggcgaggtgcaggcgcgcgtcgtcatcccgccgcgccactcgtcgtcggcggcctcgtcgccgatggtgcacgcagccgcgatccagccacctgtgcgctcgacctcggcgacgcacatgggcacgggcgccgacacctcggccgacgccagccgcggcgggtggatggacagcctctcgtcgcacctgcccgccttcctcgcacccgccttctcggcgctccgctcacaccgccacgggagcacggcgagcatcgatgcgacgcccgctccggctgccgacgacacggtggctgacgctgaagcagaccgcctcgtcggcccgcgccgaggcacgatcgagtgtctgctgtacaaggcgctcgacgatcgcgagatgcgcgtgctcgagggccgatccgaccaccggcccgtcatctttgtcggcgccatcggcatctgaaggcgttgtcccgcggacaatcacactctcttgcccgcc

SEQ ID NO: 12635 - DNA, 1576 bp, Oryza sativa
  ref <308>: DATABASE ACCESSION NUMBER: AK109983
  ref <309>: DATABASE ENTRY DATE: 2002-08-28
aaacgatgccacgccggtcagatgtcgccatctcccacgccctcggctagccgtccgagaccgtcacgcctctgatgaccgcagacacggtcactaccaccacagccgctgttgccgaacacccagccacctcactgtcgccatcctcacctcatccccaactccatccccgccgccgacatcaccaccgcctccacaatcacggccgccgtcgtcgctgccaccgacaccgccttcgcagaccgccgttgcgccgtcaccctccgccaccacgcagccagcacccgccccgacgccgccgccatgtcctcctccgccaacggcagccgacgatgccactgcccaccaactgccattgccggtcgatgccaacgccgcaatcactgccgcatccgccagtcaccgctagagccgtgtctgccacagccgccgcgccgtccacgggcgtcgcgtcgctgacagccgccatcagcgttgtcgccatagccgccgtcggtgtcgctagccgccgtctgccaccgcaatcaccgccgccgctgttgccagccgccgtcgccgctgccaccagccgcatcgcaaccgccagcacccccagatctggaggacctcgctgccgacaccgccaggacgagcgccgacgcgcccgaaccgccatagccgttgccgctgtcgccagctgccgcccgccaccgcagtccccgccgccgctgtcgccagctgccgtcggcatccaccgccgccgctgccaccggccgcgctgcaaccaccggcacccgcagatctggaggacctcgccgtcgacaccgtcagcacgagcgtcgacgcgtccaacaccagacgccgccgccgtcaccttcagcccccgccgccagccgcccctcccctagatccggccgggcccggcgcggatctaggcaccaccgccgccactcaaggcatccccccagccgccgagcgcgtggaggcgagatgaggccccaccgccgccgtcctagcttgtgggcgcaaggctttgccggtgcccgctcaggcggcggtgaggcggggggaggagacgtgaggaggaggaggacggcggcggcgtcgcctcccgagtcgcccgggggagggcgacgcgagagcgtttaatcgatgggagcaagttttcagtgcaatgctggatccactgatctttttttgagaactcgtccactgatctgagattttgtgactgatctttcggtgttctgaattctgaattctaccaacccctatttgctgcagtttctgaattctgactggaagatctgacactagcagggaggttgctccaaggtaattccctaagaacatctgctttatgatactgtagtaaccgaaaatttatcttgatttaattctgattcaattccttgaaagtgaatttactgtctgggcattcgcgaaaaaaaaaaaattactgtctgtactagaaaaaaaatcaactatcaacagtgacgaagacaagcctaacataattatggcttgagcgctaggctcgtccctttaatcccttgtaaatccttttaaaaattaatgaaaagtttgaagatttaac

SEQ ID NO: 12636 - DNA, 3401 bp, Oryza sativa
  ref <308>: DATABASE ACCESSION NUMBER: AK109984
  ref <309>: DATABASE ENTRY DATE: 2002-08-28
acctcccccgcctctccctgccgccctcctcctcatgctcatccgcatcgtgcgcgcaaacacagagcttcgtcctctgcttttccctctcaacccgttccttggcatccgaagcctaaagcgcagccgctcctgtacacgctgaggctccagcggtggcaactttgacggcggttgcgctcgttggctcgctgctcgctcccgtgctcagttcgtctcatgaagcgacaacttgacccgcaactcgccctgcacattacccgccgacgttcttgactccaatccgcccgtccctccaccactccatgcccgctgcacacctcttcgaagcagcagtctgaagcctcctcagggcatcgcaagcgcctcttgacaaccgcacgcgcatcctgacacatctttgccaccgttctccatcagcgtgcgccacaccttccaagcctcctcagggcatcgcaagcgcctcttgacaaccgcacgcgcatcctgacacatctttgccaccgttctccatcagcgtgcgccacaccttccacggcatctgaacgtcgccgcatcggaacctcgccgtcgcatcggcatccagccagagcttaccgaagcttcaagctttcattcacgcgccccttggctagccacttcggtgtcaactccgatcctgacgcatcctcaggcacccttctcgatcctccgcattcgatctcatccaagctctcgacaccgagccgaagcagatcaagacgacggctgcgcaaaacttccaccgctgccgctggcccccaccttcttcttctcctgctccccctcctcttcctcggtggctccaccgcaccgggcttcaacagccaatccgataaaaagacccaagtctcgagggcctcgcgacgtccctgtccactacgcatcgccttgtcgcccgttcttctgtccggtcgtgatcatccgttcgatcgcacaccacagctactgtcttgaccgtctcgcctcgacaccttccgacactgctccgttcgtgcttgccgtcgtcgcaagtctgcaactttacgcctttgcagcattttcatctcgataccctgtcgacgttcctcaccttctccttctgcgcccacttgcccacccctttcgaccatcgcacagtcaccacacaaactacgttgtcgacacgttgcttccgataatcgcagacgctccaactcttcaatcgtctagcctttctccagcgccataatccttgtcacttggcctttcaatctcatgccgatcgtaatgcgatcctccagcaaacacaacgacgaggtgctcgacgccgagcgcctccggcagatcgcacggcgcaaagagcagaaccgcaacgcccaacgtcggctcagggagcgcaaagaggaatacacgatgcagctcgaggcgcagctcaccgacttgcatcgtcgtgcacaaagccaagaggaagagtctcaatttctccgagaggcgcttgcccgcatgcgtgccgataacatcaagttggtcgagcagatctccttaatccacccagccgtcccatccacccagaccacacatcctctgcctcagcgtgcaccagtcgatctcggagtcgatctcttcgctcccaatgcaccgttggatcgcggccgaaaccgatcccagagtgtcacggccactgccatgcagaacttgggcttaggtcccgcaccggcgccgtggtcgctgacttcttcgcagcaccctctgcacgccacgcatcctgtctttgcctcgaccattgcacctggctccacgcatcgcgtcccgctcgcaagcaacacgtcgatggcgggtgcgccgccctttgctagtggactcgccttgccgtcgatgaccgactcggcggacgatagcatgcctcgatccgaagacgccagtcgccggagctcgtttacgcccctctcgcatcgccggagcagcacgctgctcagtccctttgacgttcgcgggaacctctcgcgccacggcagcgatatgaccgagcttaccgtaccgcccgaccattcggattccgagaatggaggctcttcgagaaagatccagcgcgcctaccacgcgtcgaatctagtcagcgcacctacggcgccgtcttcttctacgcttgcttctgctgccatcgcatcgtcggaagggactgcgggagcggcagccagcagcgacaagatggacgttggcacttcgagtgcagcgccagattcggacgaggtgatggcgagctgcctggacagcatccactcgatgccatacggcacgctcgaggaatccaagccttcggcagcagagccaacgccgtccaagatgcagtacgacggtggtgggtcctggatgtcgacggcccccgaaatgcctggccagctggcactctccgaacttcgccacaccgacatgtctggcttgtccaagcccatgggtatcaccccgggcgcgctcggtctgtccaacatcagcgcgatgggcggcagcggtgcttcgggcgatggatggacgatttcgccgtggatcaacatgagccagacgccctcggcggccggcgcgggtgtcgatgcagagtcgggcgctgctcggctgcatggctaaggccagcgcctcgatgcgggtatggcgtttggcgacagacagtcgctcgctgctcgccgcgggttctctggtagcctgaagctggagacgcccacactgtgaggatggcgcaccgtacacggagctgcgccatccacagctggttgtggcacgaagcaaggcttcatcaaagactcgttttgcgtcattgctcgctctcgacctcgccctcggccttttctgagccggatcccacagtctcgggtaacgagtctcggtactcgctggcatttcgtcgttcattcgtgtatgctatgcaaggctggtgcgggcgtcgacagatacgcgccgccccggccgtcggcatcgccatgcgtgcttttttgattcggccccttgcgaggtggctcctcgcttggtgcgtgacgccttctaatcagctcttccgctttcgcattcaaaaacctcggtcgtttcatctcgatccatctcttcttccacagccagggcagcatcatctgtaccattaccaagcatactcgaaggggcttccccacgcacttggctgctctgcgcttttcccttccccagtctcgtctcggcccactctcgttccgtcgatctctctctctctctctcggcctccatgggtgacatgcacgcacacctctctcactcgctaatcactgttactgctcgctgtcgtttcttgtcgcatgtttccatcctgtatcactcgcattcgcactcgtaggcttttttgcatgggtctcttaatcatactcgccagggacgctgcaaagctgcagctaggatcagtc

SEQ ID NO: 12637 - DNA, 1802 bp, Oryza sativa
  ref <308>: DATABASE ACCESSION NUMBER: AK109985
  ref <309>: DATABASE ENTRY DATE: 2002-08-28
tgagaactttgaaggccgaagaggagaaaggttccatgtgaacggcacttgcacatgggtaagccgatcctaagggacggggtaaccccggcagagagcgcgaccacgcgcgtgccccgaaagggaatcgggttaagatttcccgagccgggacgtggcggttgacggcgacgttaggaagtccggagacgccggcgggggcctcgggaagagttatcttttctgcttaacggcccgccaaccctggaaacggttcagccggaggtagggtccagcggccggaagagcaccgcacgtcgcgcggtgtccggtgcgcccccggcggcccttgaaaatccggaggaccgagtaccgtccacgcccggtcgtactcataaccgcatcaggtctccaaggtgaacagcctctggccaatggaacaatgtaggcaagggaagtcggcaaaacggatccgtaacttcgggaaaaggattggctctgagggctgggctcgggggtcccggccccgaacccgtcggctgccggcggactgctcgagctgctcgcgcggcgagagcgggccgccgcgtgccggccgggggacggaccgggaacggccccctcgggggccttccccgggcgtcgaacagccgactcagaactggtacggacaaggggaatccgactgtttaattaaaacaaagcattgcgatggtcctcgcggatgctgacgcaatgtgatttctgcccagtgctctgaatgtcaaagtgaagaaattcaaccaagcgcgggtaaacggcgggagtaactatgactctcttaaggtagccaaatgcctcgtcatctaattagtgacgcgcatgaatggattaacgagattcccactgtccctgtctactatccagcgaaaccacagccaagggaacgggcttggcggaatcagcggggaaagaagaccctgttgagcttgactctagtccgactttgtgaaatgacttgagaggtgtaggataagtgggagccctcgggcgcaagtgaaataccactacttttaacgtgcagcaacatccatcccctcggcctcatcgcggcagcgccgctcgtcgccctcccctcagacctcaccgccggtgcgcgggccacagttcatcgcaagcaactaagccacagcctcgggagggagtcggggggaagggggcggcgccgtccacctcagcttccagcacctcctcatggcggaggcaccggcagaaggccaggccgacacgccgctgtagctcagtgccgattaatttcctgttcgaaatcggagcaagccaacattggtgctctaatttatgagacggcggtggcgcaacatgagcaaagagcgacatgaaaatgacggacacaatcacgacacagcggcacaagtgcaaagccaaacagagaccgcggtggagttgcagggtgtttgccgacagaggcccagtgtcagagaggtgtcgaggtgtgggggcgaaggggaggcctggtccgccccggcagtagggctcctcctcttccccggcgcgatcagaaggctggtgcctcccccaagcgcggaggccggcaggccgccgctcccggttgtctcgtctgttcgaaccgaatctggtgcgctcccttgtcaaacggcaatctccactgttttgcttggtgtgtttgtggttgtgtgcataatctaggttggagttcttttttttagtctaattgtactggtatggttaactccatactcaaattatcaccactggtaaactaaactgtcttttgcaaagctacagaatttggagccatagac

SEQ ID NO: 12638 - DNA, 3242 bp, Oryza sativa
  ref <308>: DATABASE ACCESSION NUMBER: AK109986
  ref <309>: DATABASE ENTRY DATE: 2002-08-28
aaggtgcccgcttgacgttccccgtgctgcattccgtccatcggtcttgtgccatccatcgctaataccactcaccagccaccggctttcagtgtagcagaccacgactaagctgctactcgacacgcccttgatcacaccgcctgtgctcatccacctgctgtctatcgcccggctttcccttggcgccgacatccggcacggatcagccctaccattcactgccgccatgtccacctcgacccaaaacatccagacagccacagtcccgaccgctgctgcgctcgatccagccatgaacgccgtgaacgacgacaccgcggctggcgccgcacgctcgcgcaaaaagatgtacaagaactgcgatcgctgccgccaagccaaacgtgcctgctccgcccagtacgtcagcatcgccgaggcgcttgccaacaaagtcgcctgtaagaactgcaagaagaaaggagaggtgtgcacattcaacagcctcatcaactcgttcggcggcatccctcttgctggtctcacgggagccgctttcgccgaaagcctccaagagaccaccaacggcttcccttcagaaaacaccaacgccgctgcctccaattccatcaacatcgatgagaccctcgctagcgagccggagtcgagcaaagctgccgaacgacgtcgagatagccagtcttccatcgacaatgtcaacgccgtctttgagctgctcaacagctgtgacgacctggttcagccgcccgccaagcgacgaaaggcttcggcactcgacacgcagcaggacatttcgtcgtactcgggctttgtgcagccagcttccaatgctgcctccaactcgctcgtcctcagccgcgcacaatcgccctacgcggaagatgagtcggacacgtccgtgttcgacatcctcggcttccagatctggggatcagcacccagcgtacggctcgcacagacagcagaccgacagcatctcaactcggaccttctcagcgtctacgagggagctgccgaatccgccttccgcgtgtgggtcaccgatgccaccacgccctatttgctctgcgccgactcgttaacctcgacttcggccgccatgtccctcaacaaaaaagtgacgctgctggatcacgcatcgaagcgcatcttcaaggcggacaatgcaagtcgcaatgtcgagaagcgcgtctcggaggcgtaccatgccgtgctgctcgcgtatgcagcccaatggccacgacatcgcaacaaccagacggccagtcgcgccgaatggaagcccgacgaggcacgcatccggctctcgctctggaagcaggcgcgcgacaagctcatggacgccgcagatgcgtggtcgttccgcatcgtttttgcgctcatcctctttgcttggaccgagaagccgcgcgaggtgcccgacgacgaggcttggggctcggacagcgagccgcccgcacagctgcatgaagtgccttcgctcgacgaaaacagcacgctcgactcctcttcctggcagatcaacgccgaggccagcaccatgatgctcgccgccgccatgcgcaagctcaaggcattccggctcaagatccagcagctcagacgtaagggtatcgacctctggtccaccgaagagcccgggctcgaagcgtcgcaagtcgcgcatcgcagagcggaagcaacgctgctcgagaacacgtatcacaacctgtactggttcggctgcatgatggacaccgagctcagcgtgctgcgcaagtacgatgctgtgatcggcgatgaggactcggatctcaccgaccagcttctttcgccgcagcgcgcaacgagtctgcgcaacgagaccgagagctttgccacgggcgcaaatgcggcgcgcaagccggtgcgcaagatctgggacgaagtcatcccagccaacagccaaaagttccgacacaccttcgccaagagctggccatgctcggaagaggaggcgaagcgcactctggcgtatgccacgccgatcaaggtgctcctgttccgtcacgtcgggcggctgcagtcgagctactggcgccaggcttcgagcgagcagattgagcgacagatcgcccacgtcctctcagtcgtgcgccactggggcgagacctttgcgccgttctttgcgagctgcattgcgcaccaccacgagctgccgccgtccatccagagctggcacgtcatcacggcgaccaagtggaacctcgccgcaatcctgctcgtagagctggtgcagaccatcgaccgctccgccgcctcgtcggatccgttccagaacaccggcgagatctttgcctccctgcgcaccaaggtgtgtctcaacacggcggcgctcatcgatgccattcagcgctcgagcctggcacgcgtgccgagcgccgagtcgccgttcgagttcatccatgcgaccgacagcacggtgctgcacagcgatccgtggcccgagatctcggtgcacggctttgcgtgcgtggccaagtgcgagatcaagcaattcgcacagctggcggctcgcagtgcgtgggcggagctcgaggcggcagaacagcgcgtgcacaagtgcatttgggcgctcgaccagcttagcaaccgctcgaccatggccgtggatgcaagcgcagaggtggccaagctgctcgagattcactcgcccttcaagcagcagcagcgccaacagcagctgcagatgcacatggcgcgcgacgaggacgcaaggtcacagtcgatcgacgcgtcggtggccgcacagacgcccgctattgaagcgttcctggcaggtggtggcaacgtcgctccccccgcgcccatgccttctgctttcaccgacgaggtttgggcgtcttgcttgcagattctatccgaatcagaacccagagaagccacggggagtatggacgaaactccggacgctgcaagctcgtcactgctgtggccggacctcggcgtgccgtcgacgtcgtcgatgcccctcgcggatgatacagattcggcttcttccgatcactcgctctcgcccacgtacacctcttctacagtcacgtcgtccaccgtagccccgattgatccgctcccgcttccggctaccgcaccatacgccgattattttcctgacatgaaggaccacgacgcgatcctccccacactcgatagcttccccaattccttccagttccgcgtctagttcagctcaatatcacggttgtttggtccatcttcgg

SEQ ID NO: 12639 - DNA, 3964 bp, Oryza sativa
  ref <308>: DATABASE ACCESSION NUMBER: AK109987
  ref <309>: DATABASE ENTRY DATE: 2002-08-28
atcagactcctcttcttctctttgtatttattcattattggcacattaccatggctgtcgacgagccgctcaacatccgtatatccatcgatcgcggtggcacttttaccgatgtgcacgcctcgatacccggcagacaggacatcattctcaagctactgtctgttgacccagctaactaccaagatgcaccgacagaaggcatcagaaggatactagagctggcaaccggcaagccgcacccacggggtcaactactgaatcttttccacattgagtcaattcgcatgggtacaacagtcgccaccaatgcgttactcgaaaggaaaggcgcccgatctgcgcttctcataaccaagggcttcaaggatctgcttctgattggcaaccaatcccggcctaagatctttgacctctctgtggcacgaccagaagtactatacgagcaagtcgtcgaaatcgatgagcgtatcaccatggaggactacaccgaggaccctgaatctgcgaagacatttccaagtgccgcggcacctgagcttgttacaggtattactggagagactattcgtatcatgaagaagcctgatacagaagccgttaaattgcaactgcaaagtctgtgggatgcaggctaccgatcgctcgccgtggtctttattcactcatacgcctttccggaccacgaattggagatcggaaaggttgcgatggagatgggcttctccgtaaccctctcttcctctgtgcaacccatgataaatgtggttccaagaggcatgtctgcaatggctgacgcctaccttacaccggtaatcaaactttacatcgattcaatctctgcgaattttgagggcggtttcgaatctcacaacacgcgcattgagttcatgcagtctgacgggggactcgtggatttccgcaactttagtggtctgaaggctattctctcaggcccagctggtggtgtcgttgggtacacccagacatcgtgggatgctgaggagaaatgtcctattcttggtttcgatatgggtggcacgtctaccgacgtatcacgatatgccggtgtgtacgatcatgtgtttgagactaccactgctggcatatcagtacagtcaccgcaacttgatatccacaccgtcgctgctggtggaggatctatcctgacatacaaaaacggccttttccacgttggccctgaatcagcttctgcccaccctgggccggcctgctataggaaaggcggtcctctgactgtcactgatgccaatctctttgtcggtcgacttttgccagaatacttccctaaagtctttggacccaacgagaacgagcctctgaacagagaagtcacagctggaaaattccaaacactcacagaggagatcaacgaggagcgccgcaagcagggtcagtctcctttctctgctgaagacgtagccatgggctttctggaagttgccaacgaaggcatggctcgaccaatccgtgctctcaccgaagctagggggtttgagacctccaatcaccatcttgcctgcttcggtggtgctggtggccagcatgcttgctctgttgccgatgttctgagcatctccagggtcatcattcacaaatactcttctattctgtctgcatacggcatgtctctggctgacgtcgttcacgaggtgcagcgacccgctgccctgacttactctgttgacacagagcccgagttgaaatctcagctttacgatctcgaagctcaggcgcaacgcaagctgtttgaacaaggcttctctcccaagcaaatatcctacaacagctatctgaacatgagatacgcaggctctagcagctctcttatgatcctcaaaggcgacgactgggatttcaagcaaggtttcgaggcggcccataagcgtgaatttggcttcaacttcagtgacaagcccattctcgtcgacgatatccgcgtacgagctaccggtgccgctcatactcgtgtcgagaagagcccttacgcccagatgaagcttgtcaacaacgccgaggtcgcattaccggctgagaacggcaccagtcgagtctttttcgctcaaggtggctgggctgagacccctgtgttcgagctacaacacctgcccaacggggcacgcttgactgggccagccttggtcatcgataagacacaaaccatcgttgtcaccccgcatgctgtcgctacgatccttgacaactacgttgtggtcgatctcccgtccaatgcttcttctaagggtcagcaagaacaggagttcagtcctattcagctgtcaatctttggccaccgcttcatgtcgatcgctgagcagatgggtcgaacgctgcaaaaaaccgcagtatcgaccaacatcaaagagcgtctagacttctcttgcgcaattttttcacctgacggcggactagtcgcgaacgcgccacatgttcctgtccatctcgggtccatgcaattcgctgtccgataccagcataatctgtgggagggcaaactgaaagatggcgatgtgctggtttccaaccaccctagctgcggtggcacacatcttcccgacatcactgtcatcactcctgtgtttgacaatggtgccatcgcgttctatgttgccagtcgtggtcaccacgcggacattggtggattgctacctggatcaatgccgcctactagcagcgcactgtggcaagaaggtgctgctattgagagcaccaagcttgtaagcgccggaaaattcaacgaagacgaagttagacgacttctgctcgaggagccagcccagtacgagggctgctcaggctcccgaaagctgactgacaacatgtccgatctgaaggctcagattgctgccaatgtcaagggaatttcactcatcaaggacctcatcaccgagttcggtcttgtcacagtgcaccggtatatgtatgccatccaacatactgccgagcttgctgtacgagatctcttgaagaacactgtcgcgaaatttggcaatgaaccccttgaggcagtcgactacatggacgacggcacaccaatcaaactcaagatcactattgcagacgatgtatccgctgattttgacttcactggcacaggcccacaggttcttggtaacaccaatgctcctattgctatcacccacagtgctatcatatactgcctgcgagctctggtcgctacagacattcccctgaatcaaggctgcctgaaccctatcagcatccgtgttcctgacgccagtattcttagcccgaccaagggtcttgctgtggttggtggtaatgtgctgacctcgcaacgaatcaccgatgttgtacttcgagcattccgtgcctgtgctgctagccagggctgctgcaacaatctcacattcggtaccggtggaaaagatcctattaccggcgagcacaaggacggcttcggctattatgagacgattgcaggcggagcaggtgcaggacccacctgggagggtacaagcggcgtgcacgtccacatgacaaacacaagaattacagatcctgaggtgttcgagaagcgttacccatgcattctgcgggcattcacattaagagaaggatctggtggtaaaggccaaaatcgtggtggcgacggcacagtgcgcgatatcgagttcagagttcccgttcagtgctctatcctcagcgagcggcggacgaggcagccatacggaatggagggtggaggagacggttcaagtggtctcaatctgattgtgcggaaggatgaggaaggcaaagagcaggttgtcaatttgggcgccaaagctacaacacgactggtcgcgggtgaaagggtgattattcagtcgcctggtggaggcgcttggggttctcccaagacaaacagcatcaacggcgtcaacggacacgcataagagtgtgtaatagttcatatttcaattgcaagcgggtcatgatt

SEQ ID NO: 12640 - DNA, 3124 bp, Oryza sativa
  ref <308>: DATABASE ACCESSION NUMBER: AK109988
  ref <309>: DATABASE ENTRY DATE: 2002-08-28
accagcagccttgcgcccatacatatacacaccgcatccactcccgcagactccaactgttagccgttccttcgaccattcacccattccgcccgactgcatctccctccaaaagccataccctcctggagcaggaacccgtttcgccgcaaagacaaattccctccagcatcaccagaaagttcgatcatacctccgaccagccattgaccgcaacccacgccgcccctcgaccgatccacaacctcgaggcaatgacaccgcactcgtccgcacacggcgctcctcaaaaatcgcaatccaacaagcgtccgcaagccgctcccagtcgcgtggccattcctctgcctctgagtaaacctcgtgcatcaaaaccacaacctcagccgaccatcgatccggctgtcgatgcgccggcaaagaaagagctagctgcgcaacttgcgaaggacaaccaggcagggcagccaccgaccgcacatgatgaggccaagctcgaacaacccacatcaaacagtcgtccctacaatgcatcggatgcggacctaaagcctgctgcttcggcggctggcggtgctgctcgggaagacattacaattctgccccatgtgaacggtactccctctgaggagccacagggcggtcctgttcggcctctatcgccaacgaccgttgtttctcgtccgcaaaccagacctggcgatgtaccagcccaacgaaaaccttcaaacatccgcaccgagctccctccagctttcgtaccttccgcaggacagcatacaccgcaatcttcgacctattctcgtcagcctaatcaaattccccaggctttccagccacagattcattcctcacgaccaagcacgagcggcattgtgtttggtgacatcgactcgtccgactcttctcctgcgcctcctcagtcttccggatcagcatttgcgccgcctccgcagcaaatgccgaggcccttccagccacctccattcactccagtcaaccacgcacatcacttctccgaacctcaagcattcccggttttccctggcggctatgcgcctcctcagccatggaatccccagcgtggatactatcctgcgcaacaacatccgcctttccttgcgcaacctcaacagcaatatcgctatcccacgcaagacgcattcacgcctgtagaggtgtcgcagcccaacatgccctccgccctctcacgctcagcttcgccgggatctgtgtacgctgaggctttgcgggtcgggcaagatttgcgatcacccactgtgatagaaaagacgggtagtatgaaagcattccctgagccgaggcaacacttctcgaaccagcttcccttccgccaacctccattcgctagacagctgcctcctcaacaacagtctatcccgcctcccgagttcaggcttgacatggataatgctcaaatgctacgcgatcatgttcgttctcagttctccaaacctgctctcaccgattgttacctgcagatctcgcacgactcggatgctagcacacaaaaacttgacgctcacaagctcattttggctcgcagcccgaccttgctgagactcatacaagcctcaggcaatgttcacaagccgcaacttgatgtccacctaccgggcagatatctgagcctgcataccttcaacgaatgccttaagtacatctacggaggacaactgcctcctctcgacccgcctcatcgtccatcgccctctttcacagagcccgtgtctgcgcaggtggatcgaatggagcaggcattgcaacgtgttgctactggcgcctggctggaaatgccagcaatcgcctggcagggactgaatgtggcgaccaacaccatgacttgggacactctgcctaccgctcttgagtttggccttgaaggtggtatctctcccaagtggactctcgactatgggagtgaggagcgtggcagcgctacttcgagcgatgattctcacacgtctacaccgacctatgagcccttcgccaccccgcttcttcagagtatcttccagttcgtctctaacagtttcccactggacttttaccctgacaactccgcacctcaactgaagatctgccctcgcctgcctccgctcccgccaaagcaggcacagcagcacaagaagaacgagctctcccgctccgccgacccaaggctaagccagatccgctttggtgagctgccgtcgcaaggagctaacgctccacgaccctctcctgtcaccacaaccatctctagcctgctcttctcgctgccattcgcgctgctcaagttcctcctcgaacatccagttctggccgagcgcgtaggcttcgagacagtcggaagcatcatgcgccaaacaattcttgaaagagaaagcaggcgactacgatgcctcaacgctacatcaaccgccgcggttgcgcgtcagggcgagccagatgaggtagccaacctctactgggaagagagcgttgaggctaccggtcagggtcgtctcggcctgagattgtgtcgcaggcgaaagggcgtggagactcccgcttcctctgaagccacgagcaatgcatgaaaaacatgaaaaagcgccaacatttttaatgatcatttttcgacgtcgaacttcttggattttaatttttcggcatagcgagcgagtgctggatggaagggagctacattcacgtggctcgttactaaaagtgcgttcattttgttttttaattgttctcaatggcgttcgagcgggctgtgttattgatctcggacgacgaagactcgattgagtgttcacacatctggtgggaggctccgacaaaaagtgcgaattgcttctgaacggcaaatgtagaataggcatgacggatgggaggactttggatactactgtgtgagatgaaagatggaatatggtgagaggttggaaaaggcatcgagcctgttctttgggctatgtccctggtcacatatagcctgctttgggttctggtgagatagatgggcgtgagaggtcggtggcgggcgtgaggaaggctgtcgccagtgtatttagtattgatacctgttgatgaggtgtgtagcttgtgtaggaattacaaggttcctttgaacggc

SEQ ID NO: 12641 - DNA, 2953 bp, Oryza sativa
  ref <308>: DATABASE ACCESSION NUMBER: AK109989
  ref <309>: DATABASE ENTRY DATE: 2002-08-28
gctggacgcctgccaacatctttggcgccatgtcgtcttcgctggtcgaagactggtccgagggcgatttcgatctggatcacaccgctctgcgtacggagcacctctccctacacgatgaccacgatgacaatcccaccaccgcgcacgtcgacgacgactttcccgactgggatcatgacgaagatcaagacgcatcggacgagcagacggacaccatcaagctgtccaacatcgctggttccgcgctaaagcaaatgctcgaggccagcaaggcttccgcctcctccttgcccagcgcagatctgcatgccctcgaccaacaacttttgcatcatgatgcagatgtagatcggctcgatatcatgcgcttcgccaacagccacgacgacctcaacacctgctccactgcaagcctcagcacatcggcgagcaccagctatcgcagcatgatgggtctctccaccgatctcactgatccagacagcccacacagcaagcacggcacccgcaacaccaccatcacctcgtgctccagctcggaccgcgcccgctccgaccttggcttccactcctcagagcccgacgatgccattgacgagctcgactttgagctcgctcccaacatgaacaatctcagcctctgctcctccctctcccgcgctcgctccaacacctctttcagccacgtcagccgagatctgtgggacgaggagccgacgcttggcgcttctggcaccaccgaccagcccgccacctcttccaaaagcatatcgggcgagagcgatgcagatgacgaacacgaagaccttctcgacggcctcgatctccaaggcagcatctttgaacctcaatccaatcccgctgttcagccagcccccttgctcaaagcaaagctcgaggccatgctcgatctcaagcgctccggtcgtcaccccgatcaataccaaaatcctgcccacgtcacagactccgattcgggcatcgctgcaggcctcgtcatcactgacgacgtcgacttgtcgcccagtcgcatcacgtcgcgcggcctctccaacatccgcccaaatccttcctatgcgcagatcgcaaactccaggctcagcgcgcagaccatgatctcagacggttccggcgagcgtcaacacagctcgcacaccgtactgtcgcatcaccagcaacaccagcaccaccgagcgcccacaggcgaggcggcctcacagcaatccaagggcttccgcacggaaccgcgtggtccccgtcgctccctgcgcttcaagcgatccacgagcgatctgcagacacacatgtctgcgtcttccgccaatcctggcccgtccgcatccaaccgctcgcaaaatcgcgggtcccagctgacgcgcaagaggtctctcccgtccatgcgaacgtccccgccagcaccaggcagcgtcaacgctgctgcggtccagctgggcgcacacaccatcgccgtgcgccaacgccacaatagcggtgccagcacttcgtcgtccgtgccccgcaaccggtcccacggctcttccagactcaccgactcgaccgccgcatcgcgcgcacgcgcagccgaaaccgcagccgaccagctcgccagactgcacagagatgccaaagcaccagcccgtcccagcactcccgtctccattccgacaagatcgtcgcacaatccgccacctcgcatctcggtgagcacaagatccaagaccagggcggagcgccagggcttgtcgggcgaaagccagcccgccgctcggctcttgaagcgttcggcgccctacgcaagcggcgccgagctggacggcatcgacgaccttaccacttccatcagtccctccgtcaagcccatccctctgcctcccccctctacatcggccaatgcgggccggggcgccaccaagactgacgacggcgcatcgcagtttcagcgtggcggcaagtccaggcgcggcggcaggaggcatcccaagagcaagccaggcttgatccgctcgctcggtgtgggtggatccccaacgcagaagactgtcaaaggcatgcgttggaatgcacaggcgctccgatgggagggcaacgaagcggtgctccgggactttgaccaggtaatccagagcagcactcggcctgcgctcatctcgcagatcacaggcagctccaccagctcgcgcctcacgcacgccgcgggctacacgtcgcccatctcgcccgagagcagcacgttgatgaactcgatcgcctcgggcgcgcgtgtagtgggggacatgctgttcgatcccgtccagatgcgatgggtgcacaagtcgggcgacgaggaggatgacgtctttgctcaatttgacgaagcgctggacgaaggcgatgcgtcccacgacgcggcaggcctcggtgtcgatgcggaaggcgacaacacactgcgggcgcgcaggacacggtcgatcgaagctttcagccagtcttcgaacccttggacgcgtctgagtgcgagggagccagcagcgactgcgtcggacgacgaagcgtacgaacgcagcctcaaccgcaagcacgaccaggcgattcgcagggcgctgtcgcgcggtgcattcgcggcgagcgtgggcatcgagcgcgacatctgggatgcgtgcgtgcaggccgacaagcgacacgcgctcgaagtgggtgcgtggctcccccaccccgcgccgcatcgctcgcgcatgcgcacgcgctcgcacacctcggaccgcgccatgaccatggacgagatcgaccggccacgtccgcatctttactacctcgagaagattgcaaaaagcatcccgaggtccgacgcaagctgatccgtcccgccatcccgcagtattctaaattacttgggctaatgtttttggtcacctgtttctgtccatgctcgccgggcgatcgcttgtgaaatttataccccttcaatcgtgcg

SEQ ID NO: 12642 - DNA, 3320 bp, Oryza sativa
  ref <308>: DATABASE ACCESSION NUMBER: AK109990
  ref <309>: DATABASE ENTRY DATE: 2002-08-28
cacgagcaaagcatgcggacgatgccatggatcttgatgacgacgatcgatcagcagcgtcggacgtcgacgataccgacgacgcgcgatccgtcgcctcgtcgctcacagatcccctgtccggcctcagcgaccaagaaacgctcagcgaaggcgacgatgaagagctcatggatgctttgcggcaagtcgacggcgtccgagccaagtcgaggaccaagaaaggtggcatgcgcaaggacgcggctgacgcggatgcggagctctcgggtttgttcctgctccctcccaagaaacgctccatgcgcacccgcatcaaggcatccatggcgctgtccgaagaagaggatgccggcgatgagcacgacgacgaccaagagcaagaggccaaaacgaagtcgcgcaaaagcgacgtcgcggacaagtccaagagcgctgccaagcgcaaaggcgccaaccgccacgcagtcgacttttcttccgacgaggatcgtgactctgacggctattccgccacaacgccggtcaaaaagcgtagtaagtccggcaacgtcgccgatccaagctcgccgctgtcgtctgtgccctcgccaggctccatcgactccagcctcagcacacctccgccagtgccgcgtctgtctgcaaagcacaggctcgagaatgagcgacgcctttccgatagagagcttctcaagaagaagcgcagcaccaagcaggccaaggaccgcaaagccaaaagctctgactcacggcccaaggaatcggcttccaggcgtcgaaagagggaggaagcacgtatccaccgtaacgctattctcgacctcggcgacactgagtcgagcgaggaagacctcaccgatcgcgatgacgccgagagcagcaacaaggccacggctcgagatgacgcatcggaacgtggcagcgctgcctcgacgcccagagcatccaaggtcgccttgccagcagagagcgcccagtccccgcgcgaggccaagggtaagaaggccgcctccgtcgagagtcccaagtccgccgcaaaagatacccctagcaagacaaagaaggtgcggcggatcctgtcggactcggagcagagcagcgacgacgagggcaaggcagtcgcctcctctccatcagtgcacgccaaggctttgccgcaggtcaaggacgaagaggccgcagcccagcctaccgcaaccgcccaggctgtcgccgatgcgcccatgccagatgcagatgccgcagcccctctggaatcgctagggactgccaccaaagaggagggcagcgaagctaaggacgcccagcctggcgcggctactgccgcctcggaagttgctcccgcacccgctgccgcgcctgctcccgtgcccgaggtcaagaaggaggagccgagggtcaagcagtccctcgcagagtacaagcgtcggcttgcggaacgccgcgtgtcggaacagcagcccgcgagcgccagctccgcatccacggcagcggctcccgttccggtcatcgctacgcgcacgtcggaggtggcaccttcaccatcgccggctgtcgagaaggtcgatcctgtgcgagcccttccctcggtgagctccgagccacctacatcggaggcggtgagcgcgccagctcagcccactactgcgccagtcgaaccgcgcagcccggaaaagtctgcctcggcactaccgcgtggcgtcctcttcacctcgattgcagccccgacggccatccgctcggtcgagatccccaagtcgccgtctccagagccgccaagtctggcatctgcgcagcagccgagccaggtcggtgcggttgcaggcggcgcagcagcttcgtctgaggctagcgcgacgacctcggctgaagtgtcggcagccgcaggcgccggtgtcgacgcaacgcgagcacgcgctccatctgtgacgcagcagcctgtcggtcagaacaccgatactgccggagccaatctggcagcctctgaaggttccgtcaagccgcagactcccggcgccgttgccaccgcgcctggcgcagcgagcagcagcacaggcgcagcaactgtggcgccttctgccgctgctccgactccgtcgccgacgttaggacccacgcgctacccaggcagccgcgtgccgtcatcaccgtccggtccgtcgacgttcaacccgcccaaggcaccgcgcgcgttcatgagcccgcctggagtatctgctccagcgccgctcacctcggcatcggctgcgccaccctctacaagtgctgctgtggcgagtgcttcgaccaccacgagcgcttccgccggtgtcgcttcaactccggcacgatctgtggccggagtaggcaatacgccgtcgacggcgagctcgtcgagcaccgcctcttcgcgctatccggctgcggggctgacgtctccgacgcccaacaccaccgcgctgcctggctacgcaccacgcgcgtttgctggcgtgcccaagggcccagcgagcatgcgggaccccgatccgcgcgcggacgcgtgggccgaggcgagagaggcacgcgaggcacgcgagtatccgggtgcgcgccatctggacacgatgcgcgacggcggacgcgatatgggctggggcgagcgcccgcgcgagcccgtgggcgaccgcgacggaccacggggcggatggggtcgcgagcgccgggacatgatgcaccggggcgagccgatgggccgcgagccgtacgctcgtgatggtcgcttctttggacgggacgagcgcgatggcgcgggtgcggcggctgtgccaccggctggaagtggcggtgcgggcggtgctgctgccagtgcaggcagcggcgcgttgggcagtcggattgaccatgcccatgcgcatgcaccctacgcaccgtatcgccgaccgtcggcgagcgagtacgatgagctgcatgcaggcgtgggcgctacggggtacgatccgtacaaccgcggcattgtggtgcgcggccgcagtctggggcttggcggccccggtgcgagtgcgggccccagcggtccacccggtgctagtggcgcaggcgctcgcgagggccgaggcgaataccgcgactacgacgacatgggccctgggggaggcgctcagggcccgcccatgggcgctgcagcacgaggcatgcccggattcaggtccggctggggcggccgatcgaggccgcgaggcgcacctggtggaggaggaggccgaggcagaggttggatgcgatgagcaccagctcaacccgcttatttatttagtagacttcacgagtgggtttgtgcaaatgtacttgtgccggct

SEQ ID NO: 12643 - DNA, 3419 bp, Oryza sativa
  ref <308>: DATABASE ACCESSION NUMBER: AK109991
  ref <309>: DATABASE ENTRY DATE: 2002-08-28
atcgcatctgccacctcgttcgagagcgctctgtgctgcgccctaccttgcctagcgcctctcggtcccatcatgccttccaaggtggccaggtcaaacgccacgccggccaaggccaaggcaagtgccaagccggctgttgcgacaccttcgaagcatgctgtcgacaccgagcccaactcgaaacgacgccgccaacgtgccaccagcgatgtcgatgtcgtcgcacccacctcgtcgtcttccgcacctgcagctccacaaaagatcgtctctcgcaaccgtctctttgcgcccttccgtgcactcggtctcatcagcaacgacgtcccttttgctcttcagaccagattcggaggcaaggacgccaccacgcccgacgtcaatgtcatcacctgtttgggcgacagctgggccatgtgggacgcagagaggatgacgctcctctttgtctccacctcgctccccgcacccatctcctcgctcgtcatctcgctcagcccggacgccgtcctcgctgcggcaggcaccaaggtctatcgcttccgacgaggcaaggtcgatgccgtctacgacaccgtcgatcacatcatggccgccttcgacaagcccaacgggcacatggaggaggaggacgacgacgacgacagcagcaactccgattcctcctccgaggcggactcaaccggacaacagggaacacagctctcgtcgctgctcgtctttggtgacactatcgtggctctttcctccgacggtcgtcacgtctttgtctggtcggtcggcactgccgagctcatcaggcgcatcgacctgcccgacacgtttgtcgccagctccatccttcatcccgccacatacctcaacaagatcctcattggctccgtcgacggccagctcgcactttggaacatccgcaccggctctctcgtccatgcatacgacgccgagcagcttcgcctcgctgccgctggccccaacccttccacgccttcggcggccatcgtcaacctcacacagtctcccgccgtcgacgtcatcgccgtcggctttgcggacggacacgtgcttctccacgacattcgcctcgacgagagcctctttgccgtccacgccgccggaggtctttcgtctggctccgtctccttccgctccgatggcaagcagcactcggtcgccatcgccaccaacaccggcaacattagcatctttgacctcgagccgtccaccgcctccggccccagctcggcgcagaatggcccgcgcctcacctactcgatccaggaagcgcacgacggcgccgtcggcagcatcgagttcgtgccaggccagccgcttctcatctcgtccggcggcgacaacagctgcaagcagtggttctttgagtcggcctcgatgccgccgcgtctgctcaagggtcgttcgggccaccaccagccgcctcatctcatccgctactacggcgacgagggcaaggagatcctctcggccggtcgcggccgctcgatccgcagcatctcggtggtgcgcgactcgcgctcgcacgagctcagccagggcgagctgcagaagaagagcaaccagctctcggtctcggtttcgtcgctcaagcttcccgccgccagctcgctttcgttcagcttgacgcgcagccgcgattgggacgatgtgctcaccacgcacacggggcgccagtttgccaacacctggacggtgcgcgataagcgcatggggaaaaagccgctgccggcatcggcggaccgcaagatcatcgccgaggcaaggacgagctgcgtgagtgcgtgtggcaactttggcctcgtgggcaattccgaggggctggtggagatgtacaacatgcagtcgtatgcgcatcgccgcacgtttgacacgcgtccgctcgatcccatgggcgctgccaaggccaaggagttcgcggcgggatccaagaaggcgcaggctgcgctcaatgcgcgcgtcaagggctcggcggtgacgggggtggtgacggatgcgctcaaccgcgtggcggtgatcagcaccatggacggccagctgtcgtggttcgactttgcgtccgcggcgctcttgcatcgcatccccgtttcggcatcgggcatctcgtcgatccagctgcaccgcgactcgaatctgctgctcgtcatctcggacgacctcgtgctgcggctgatcgacatcgagacgcgccgcgtggtgcgagagtttgtcggattccgcgggcgcattctcgatgcgtgcttcagcaacgatgcgcgctgggtgctggcgacgtcgatggatgctgtcatccgcacgtttgacatcccctcgtcgcgactcgtggatgcattcaaggcggcgagcatcgccacgtcggtggcgttcagtcccacgggcgacttcctcgccaccgcgcacgtcgacagcgtcggcatctacctgtgggccaacaagacgcagttctcctcggtggcgctgcagggtctggacgagcttgccgaagtggtggatgaggacgaggcggtggtggcgctgccgacggtgcagggcgatgtggaggatgcggcgctggccgagtattccgaggccatgatgcaggtgggtgagcccgagctgcagcgtgtctacacgtcgccggtgcagatcgacgacgcctcgaacgacggtggcttggtgacgctttccaccatgccacgcgcgcgctggatgacactcatcaacctcgacacgatcaagctgcgcaacaagcccaaggcagcgccgcagaagcccgatgccaaacgtgcgcccttcttccttccgcaaaccgtgtcgggcgtcgagttcaagttcgaccccaccgctgccgttgccgatgacgccggtgaggaaaccaaggcggacaagtccaacatcttttcgtccgcgggcatcagcttcaagaccgagttccaggagcgcctcgaggcggctgcggacaagaacgatgtggacggcttttttgtctatctcgagacgctgtccaccccgcagctggatgcggagatccgctcgctcacggcttcggacgatctggtggcatttttggggatgatgcttgcgcggctcgatcagcaccgcgactacgaagcggtgcaggcgctactggccacgctgctcagggtgcacaccgacctcatcctgcagacgttcaaccccgagatcagcgaagacggcgacgacgacgaccagatgcagctgggtgcggacgaggacgaggcggagcgcctcaaatcggtgctgcgcaggctcatccgtgcacaggtggccgagggccgcagactcaacggcctgctcgaccaatgccttggcacccttgccttcctgcgtggcatccccatgacctaaacgtcacccttgaagctggttctccgcatgcaatggcaaaccactgccgaacc

SEQ ID NO: 12644 - DNA, 4414 bp, Oryza sativa
  ref <308>: DATABASE ACCESSION NUMBER: AK109992
  ref <309>: DATABASE ENTRY DATE: 2002-08-28
gtacacccccccgtccctcttccctctatcgatccccccaaaataagccgccgcaatgttcgatatcatcatctagagtaccacggcgactttttgaaagtctgctcgagtgctgcgacgacgacaacgacgccgtcgctgattgcacatctctagtcccattccagcacccaaagaccctctcccctccaaactcgcctctccttcctttcagtccttctcgttccgtccgccctggaccgcgcccagtgtttgtacgcccccagcgtgtaccgagtgtgtgtgcgcgcgtgtgttctcttagtacgccggtggcattcacttgcactctcgcgacaaaagacgcctcacgcagattcgcccctccccggacgagtcacccgccaaccgaccagcgttccagcagggttctcttggacctcgtagcagccttcgccatccccgtgtgccgttggccgtgttactcagaaaccggacttgccattcccgttgacagcagcaccggcttctgttgctcaccacttcccgctacttaccatttccaattctacctaaacttctaatccgccaccacgtatacccccggtgttcactcgccaaatcactcattgttgctggttcattcatttctcgtcatcccggtcctgtcctcgctcgccacgcccccagggccaacttggacgacccgttttcaggctcctacgcgcgccttgtcccgctcagctcagcgttgtctagctgagagatcgaaaaaggtacctgttctttcagattaggcctccctcagctgtgccacagccgctcccggtgcgcacgctcataccacctgtctgcctattcgccttccaggcctttggtagtcagctctctttcacgcgacgactcatcgtccgactccgctccatctaattcgccatcccccccgtcgttgcctcccatcgaatacttctgttataagggtcctccggtctcgccatcatcacccatccactcaacgcggctgctatccatgttcttttaggttgttcagtggttgcagcttccgtaccgtaccttgcatgatctatcccgcctgaacgcgcctgtacacgctatctgcccctccgatcgcgctgccgctgcatcgaggcctgcccggcaccaactgcaagccaacgccgacggggctctccggtaccgccgacttccccggtcccgacgacacgcctcgacttcacacgacccagtgactacgttgggttggtagaagcctgcagttagacacgcttgatgcatatctagctgctcttctgcctcatcatcaccacccccctcctatgattctataatcgcaactcgataccgcaacatgattcttgcggaaaccgactactcaactccagtcgcccatcttgctctgtcctccggtctgatcgttcgtgaaaactcggctgccgacatctaggtctgcaccgacttactgctctctcgatttcccgcggtttcctcgacagccacgcgcctgccgtcaggaaacctctgtcgatagcatttcacgactcgttccagctacacggttaaccggttgactctgcatccaacggcgactggaggtatattcccgtggaatcttatcttcgaacccgtaccttcaagatgatgtgcagcgacagcgactcgctgcctttcatcaggaccgccattttcaatggaccctaccacacctctctagcctcctcggcctcgtcctcgaccgcatcggtctggtccgatgcctcctcccaactttccgacgacactactcttaccgcccccacctccaactcgtcggagccatgcgattcatattgccactcgcaaccttcgacttctttccaggccccggacgtgtcttgcgaccaagtcaaggcgacggcctcgtggatgcaccagacgcagctgcagactgccgtcgaagttccccgagagctccgccagaatccaagacggacttcgagcagtgctgttaccaagtccgggcggccacccgtcctcacacgccagagcgaccggaaggtcaactttgtcgacaacctcgttgactcctccacgcagatcgtggaagccatctggccgctgtcctcggtggcataccgcgccgagcttggaagcaaggctgttctgcccctgcgcactttcatccaagagaccctgcgccgatctcgcaccagctactcgactctccaagtggcgctctactaccttgtattgatcaagcctcatgtgcccaagcatgacttcaccatggagcagccggacgatgtccacgccaaccgggtactgcagtgtggtcgccgcatgttcttggcagccctgatccttgcatccaagtatctccaggaccgcaactactcggcccgtgcttggagtaagatctcgggcctcgcgacccaagagatcaaccagaacgaggtcgcatttctactcgctgtcgactggaagctccacatcaccgaggctgttttccagcgttggacggagattgtactcaagtacactccgtctcagccacctgcgccgggtactggatgctctcaggcctacgagcgcgaggttcaggactggaagaacgtcattctgctcctcgaccccgagctcgacaacatcgacggataccgtccctcggtgccgacgaaagtgacaagccgccgcgccctctcccccgtctcgccccggtctctgctcgcagcttcacgagaacggagcagtgtcggtggtagcgagtcgaatgatgccacgccaacgcctcgaaacttcagcatgcccatggtgatggagccttctcccgccactgtgtacacgcccggccgcctcgcgccggctctgggtcttcttcccactccgcgtctcacccctcagatgactggtgccagcattcctgccgcgagtgctgcgtcctgtctgctgagcgggaggggctcgatgggctatgccatggcccaggcgtccaacacaagtgctgcacagagtctggatcggtggcccgtttccatgacgtcctcgccgcagagctactgccccgtgcgccgctcctctcttgccaactccatttccaccgcgtcttcacccgagtcgatgatttccgattcgtcgcgcacgtctcgctcgtcctcaatctcgtctgcttcgtcgttcggtactgcgccgtcgtccaccaaactggatgttcaggcgcgatgccgctacgcgaagcaatgtagtgagaggtacagcctgagagcggccatcgcctcggtcccggaagattacgagatgaacggcatctcgtcgtcgcccgagtcctacaccggcccggtgagcaaagacttgatggacatgtcgatggagacccccatggcgcgtcgcggctgcgaggcagacgaggcagccgatgcggcacgtgttctccaggagcttcacaactaccagcacgcccactcgcaacccagcacgggttccaagaggagccggccgctgtcgatggacaatgcgctgcaggagaatgtccgcgaaatgctgagccagcagtactacgccggtgcgcagagggagtggctcgagacgactcagtgtccccgaggcaccgcggccggtggccgcaagcgagtctgctactcggccgatacgtcggcgcccccttcgcttccatcgctgcaccccgccatgggcggagtcggcggtgtgggcatgtgggggaaccttctcaactagggcgcccgtcgcctcgaccgtctctacgtttcacaacaccgcctgggctgtttgtgacgaatactactactacacttcctttgtttccaccgaagcgggtgagaggggagagcctttgataccacctttgggggacagctagtccatagccgtttagatggcgccaggtgagggaagaaaagcgtgtcgtcttgcatgcatttccaggatcagtgcatttggcgggagggggcgtcggttgttatgtgtacgatgagtaggagattcgcaatcacggtgttccggggcatatgcgcgcacgcgcgttgctattctcaaaggatgtttacctaatgggcttgggcggagcgaaagtccccgggctttgggggggcggccgtcgcgcttcggccgcggccttgagcattttcggagttggtttgtcgtttggccgctgccggccacagagacgaagaagaagaaggggctcgcgacgacagtacgatgatcagggctccgtcgaaatgcggttgtattggtcacgggaccgtcgatgccgcacaaaagggagcggcttcctacttttccatctatctggcctgaaaaggtgttgcggctacgatgatcgaaacggcctgcgaagagaaggacctcgagcaggcgtggagagagaaaacacaacctcgcagatagtatacaatgcagaccaaaacgggtttacgccggc

SEQ ID NO: 12645 - DNA, 4025 bp, Oryza sativa
  ref <308>: DATABASE ACCESSION NUMBER: AK109993
  ref <309>: DATABASE ENTRY DATE: 2002-08-28
ctaaacttcgcggcggctccttctcctcctcctccgcctccaagccttccaagccctcggcttccgcatacgacccttccttccacccgggcatcctcaatctcggcaacacctgcttcctcaactcggtcatccaggccatcgccaacactcgcgactttcgcctcctcatacagggtcccgacgccgatcagcgcccagcctcgctcgctcccacaccaccgccctcgaatcgccacacccaatggcccaaccgtgaccagagcccggcattacgcgtcagcgacaccgagcacggccggcgcatcgaccacccgcccaatcccaacggcagtctcgattcctccctcgcctccatcgccactctccctgcacaagatccggctgccaccatcaagccacccaagcactcggctcctctcgaccatgccgcaccactatccactcgagccacccccgactcgtcagccgcgccgccatacgagcccgacgtgctcgatctgcccctcaacaccgccttccgccacgtgctcgaaaagttctggtccgacgcccacaagtcgcgcagctccatcaacgtgaacccaaagcgtttgctcacccagctcggcaaaaagtacgaccagtacctcgaatacggtcagcaagatggccacgagctcatgcgtcacctgctcgacgcctgccgcatggaggagctcgacctcatcaaaaagatgcgccctcgtcccgccagctccgaagcgccaaacacgcagctcgtcaccctcccagccgctacatcccgcgtcgcacctggcgccccgcccaccgacgacgaagcgcttctgccctttctcgacctgctcttctgcggcaagctcgcgagcatggtcgtctgcgaaggctgcaaaaaggtctctcacacctacgaagacttttacgacatcagcctcagcttgcgagacgacgacgcaaatccaaagtcgcgtcgcagagaccgtttgcgtagcatggcagatcgctggaggcgcgccacgcagggtcgaaccatcatggaccgcaagtcggccgccgccgccaccgccgccgcatccaactccgaaacacccgtcggaactccgcgctacagcgagaacgacaccagcgacgccgactccaccgctctccagcgtaaaaagtcggccaacctcctttcgcccgacgagcccggccgcggccgcttccagctgcgcacccgtagcctcaggaagagcgccggccgccacgagaagcttggcgccacctcgggaagcgagatggagcccgactttcccgacatggcctcgctctccctggctcccagcggcgtctcccgtccctacgtcgactcggcccccgcgtccgcaggcgaagacaatggcgatgcgcgcacgggcacccgtgtcgctcgcatgctcggaagcgctcgccccgccgcagatgccagcagtcgcgagaccagccccaatccaggtgttgctcgctccgccgctcccaccttggccgccggcatgcgtcccccgctccgtgccaccaagtcctcgtcgcaccagtcggcctacatctctcgcatcatggccgacgaccccaccaccccggccaactcggcagctcctcgcaaagcaggcgctccctcgccgctcttcgacgccgtgtcggccgcggcttccgcccagggcaagccccttcacggcctcttccgctccgtcggcgctcatccacgctccagagatccatgcgccgactttgagcccgatccccactctcgaggcgccaaacgccgccgaaaggtgcgccaagaccaggccgacacagggctcatcggctcgcttcgccagttcaccagcgtcgaggtgctcgacggcgacaatagctttgcttgcaagaactgctggcgactggccaacccgcccaacgcccaggagcgcgagcagatccgacgcaggcgtcgtcgcaaaggcgcacaagccgccgatgtcgacgatgacgacgccagcgagcccagctcgtccgacgccgactcggacctcgacaagagcaccaagacgccagtcggagacgccacgctcaccgctccacccagtagcgccgacatgaatggcactcggatcaccagctcgacgagtcagagcacgctggccaacagcagtgttgattccatcatgacgagctccagcgcctcgctctcgtcccgccaacgatccgacattcccaccatctcgatgacatcggccgacgcgtcggctgacagcatcgacttgactctacacaactccatcggcggcgtggagagcgtagacggcgtcatcgccagagactatgccaagccgagtggtgcagctgctgctgccgctccgccctctggccccaacggcgtcatgatgcatggccgcatgggctccgaatccagtctcagcagcgtcgaggctgccgcgcagcgccaacagcggaccggccttgcgcccaacaatggctacgacaccggcaccgagaccgacatgtcgggattctcaaccggcatggacgaatcgaacgcgtccacgggcgaaggcaccgacaccgacgagccaggtgcggctggcaacgaagccaagcgcgcgcctgggcgggatggacccaagcgctcggcgcagagcctgcctcggcgtgcgctcaagcgctacctgatcgcctcggctccgcccgtgatgatctttcatctgaagcgcttccaggctactggccgcggctttgtctctggcctggcgggcttcaagaagattgacgaccagatcacgtttcccgagtacctcgacattacgccgtggcttgcgccgcccagggaggagtacgaccgacgcggcaggctcaaggccacgagcgacccattggccatccggaggcgtgcggaggaggaggcgaccaacgcgggcgtggatgcgcgcaacgtgcgcgtcgaggtgtcgggcgtgcacggccgcggctcgcgccacgcgcatcacgcggacaagaagggcaggaggcacggcatgtggtcgtggcatctgcacgacaatgccaagcacccgcgcggcgcgcacgcagtcgacgccaagggcggtgacctggacgagggacccaaggtgcagtcgtcgacgggccacgagattgtgccgtcgatcatcaggcgacccaagaccgagtatcgcctgtacgcggtgattgtgcatcagggctcgctctcggctggccattacacggcgtacgttctgtcggatcggatcaagctcaaggagggtcagaaggagctcgtggccaggtcggcacccacgagccgcaccaacacgcctgcgccgccgggatcaagtgccgcgccggctggcagcagcaaggacacgggtggactggggcagttcttcctgggtgggagccggccggcgcgcaacggcacgtcgtcgcccgcgccggtgcctgttcgaccggcgtctgcggcgcctgctgcgtcggtggctatgacgagtgtggcatcgacaacgtcgctgggcaagagcagtgtgtctggcggatcgtcgcacgacattgcgccccagacatcgatctcgtcgctcgaagacggctcggtttcgtcggcggtggctgcgagtggcagtggaagcgagtcgtcggtggggcccaagcttgtgaggccacggccgcagctcaagccgatggcgtcgtgggatagcctggacgagctggaacagtcgcatgccacgggggctgcgacgccaacatcagctacggtggtgtcgcccgccgcgctggagccggcaccggctgtaccgacggtggcaagccagaacagcaatgcgcaccgacacgtggagacggcaacggcgagcgacgacgacgacgatgtggacccgcgcaaacacgacgacggccgaagatgggtgtatacctcggacacgatcgtgcgcgccgccacgatcgacgaggtgctcaaggccaaagcgtacatgctgttttacgagcgcatctagacgtcacgcatggtcaacaggaatggaagaatactattctacagc

SEQ ID NO: 12646 - DNA, 3416 bp, Oryza sativa
  ref <308>: DATABASE ACCESSION NUMBER: AK109994
  ref <309>: DATABASE ENTRY DATE: 2002-08-28
attgttgtctcttctttccattgacacgccgccagcgcgcgtgagagagctcattgccgctgcttcacgagatcgacgcctacaaggggagctcggactcgcctgactctccagcttgcaattataccaccactctcgacaccacaccaccgcaaaacccgcatgggtgtctaataccctctacgccaatccccaccgaccgccatcatggctgccaaaggcgccaaaccaatgcccgtcaacggcgtcgtctacagcaccaacgacatcgtgcccgcctacaaccaggtcaagcctaccgccagcaatgccgcccacactggcccgaacaagccagcaaaccgcaagaccgactacacatccgacggcgtcacggacaacaacatcgcctacttgaagagcagtgattgggaattcctcggcgcgcttacggtgctcgccttcttcgtgcgcctgttccgcatctaccagccttcttccgtcgtcttcgatgaggtccacttcggaggcttcgcgagcaagtacatcaagggcaagttcttcatggacgtacacccgccgctctccaagctcttgatcaccctcgctggatggttggctggtttcgacggcaactttgatttcaaggatatcggaaaggattacatcgagcctcgcgttccctatgtcgccatgagactgctgcccgccgtctgcggtgtgctggctgtccctgttatgttcttgaccctgaaggctgctggctgcaagacagctactgccgctttcggctcagctttggtcatcttcgagaacggtctggttacccagtctcgacttattctgttggactctcctcttgttcttttcactggcatgactgccctctcctggacctctttccaaaaccagcatgagctcggcccgaaatatgcttcccagcccgcctggtggttctggctggctgcgtctggaatcactcttggagctaccttcagcgtcaagtgggttggtcttttcaccattgcctgggttggctctttgactgccctgcaactttgggttctgctcggagataccaagaatgttaccaccaggatttggttcaagcatctgttcgcccgcacgttctgccttatcatcatccccttggctttctacatggccatgttcgccatccactttgtctgcctcgtcaaccctggtgatggagacggcttcatgagcagcgagttccagtcgactctcaacaccaagggtatggctgacgtgccagctgacgtcgctttcggtgctcgtatcagcctccgacaccacaacactcaaggtggctaccttcactctcaccaacacatgtaccccactggcagcaagcagcagcagatcactctctacccccacaaggacgagaacaacgtgttcctcgtcgagaaccagacacagccgatcgactgggccgctgaccccactggtaatacctccgttgctggaccaatggcatgggataagttcgacccggagtgggttgttgacggatcagtcatccgcctgtaccatgttatcactgaccgtcgggtgcactctcacgaccaccgcccgcctgtcaccgaagccgactggcagaacgaagtcagcgcttacgggtaccagaacttcgagggcgacgcgaacgatcttttccgcgttgagattgtcaagtctatgtctgacggcaaggaggccaaggagcgcctgcgaaccatccaaaccaagttcaagcttgtccacctcatgactggctgtgtgctcttctctcacaaggtcaagctccctgattggggtttcgagcaacaagaagtcacttgcgcaaagggcggcactcttcccaacagcatctggtacattgagagcaacaagcaccctgcactgaaggaagatgctgagaaggtgaactaccgccaccctggtttcttcggcaagttctgggagctgcagcgcgtcatgtggactaccaacgctggtcttgtcgactcacacgcctggactctcgcccttcttcgtggcccatccttcgccgcggtatcaacttctggggccgcaaccaccgccagatctaccttattggcaaccctctcatctggtggtcttctactgccgctatcggactgtacgccatcttcaaggcgctctcagtcctgagatggcaacgtagctgcaacgactacaacaacgccatcttcaagcgcttcgactacgagatcggcatgtccgttctcggctgggctttccactacttccccttcttcctcatgcagcgtcagctcttcttgcaccattacttcccggcgctcttcttcgccatcatcaccctttgccagatttgggacttcgccaccacccgtgttgctggcttcggcattaaggagaaccccatcatcagccgcgctggtattgttgtgttcctcgctgctagcatcgtcgtcttcaacttgtatgcacccctcggctacggtaacaagtggaccaaggacgagtgcaagaaggtcaagctcttcgacacttgggactgggactgcaacaacttctacaacacttacgccgaatacgccatcgacgacgtccccgccgccggtcctgcagccacttcccaagcccacgtcggcccgcccccaccagtcgccgaagaccccaaaaaggacgtcaacgccactccccgcgagcagcaagtcatccccgaaggcgccgtcaccgaggagaaggtcgagttccgcgacgagaacggcaacctgctcgacgcagagcaggtcaaagccatggaaggcaaggtctccttctccacccgctacgaaacccgcacgcgcctcgtcgacgaggccggcaacgagatccacgacggcattgtagagcagcagggcgagggcgctgaggcccagggcgttgcgggctcttacgctgagggcaggaaccccgacacgcaggacccgctgggcgaggctgaggccaacactgttccgccgcaggtcgctgctaaggacgacttgagcaaggagaagagtgtggaggagagcgttgttgtgcctgagcctgagagcgatgcgagcaagagcactggcaaggaagagctttgaatgtgaggagatttgaagcttctgtccttcttctttttcctttgtgtctcgagatagggcttatatcatgaatcgagaaaagaaacttgtatgatagaacgcgggttgcctccttcagatggtggtttagtgcttgttcggttcgtgcagttatcactatccggctggtggtgcgtttgtccgacaaggcaactgctacgatctgcgcacgttgtcgatgcatcacacggtctacggtgactatcacatgaattcgtagcactctgagacgtactagcgtgctgtgattatctttggacagaggccccccccatgcatcctttgagagat

SEQ ID NO: 12647 - DNA, 3092 bp, Oryza sativa
  ref <308>: DATABASE ACCESSION NUMBER: AK109995
  ref <309>: DATABASE ENTRY DATE: 2002-08-28
aactccatcaactactcgaccctattccgcttctcagcctcgtcaccctcacgcaactctgccgacgcgccaaacgcaccgcagaccccgcggctccaaggcttatcgagctcaaagcttgggctttccgagtgcagccgaagcggttcccacgcttaatcaagctgagcaaaagttgggcctctttcccgcgcttcattttgtcctttgcctccaagcttcgacgagcgacttggccgtcgcaaactcggacatcggttcgtccgtatcggtgtgcccccgaaagacgatatcccacctcgcttcggcttggccgataatcgtcccctttgctcgcaccgccactctgctacgacagctctcgaatcgacactgcatgcttgccatgcctacggcgtgaccattgccagcctggtgttttccagagaaagccgcgtgatcgatcggaagcccaccgcgtttggggccacagacgacttccccaacaatgccgcccgcctcttccatcggcagcagcaggcgcaagctcggccagcccaccgtctgcctcgaatgctacctccgcaaggtcaagtgcgatcgaaagcgaccatgctccacctgcgtgcgcaggggcaccgagcacctctgcaagaccttcaacaccagcgagctcgatcctgaaaccttgcaaaagaaacaggccaggcgctcgatggccgagatcaacgccatgctcgatgcaaccaccgacgatgccagcgaagacaccgatccgcagcagccgccagagcccagcgagacatccgaacatcccatgatggccttcatcaacctcatgctcaaggacctcaacaccaacgacgacgcatccatcagcaaccacgcttcacccgactcggcctcgcccagatcgagctcgctgctcccctccagagccgtggtctcgcagtaccagcagaagccatgctcgatcaagatgctcgagttctgctccattctgccggactggtaccacctgcaggctctcctccgaagctacctctggaacgtcgattggaagttcctcatcacctgccaggactcgctcgagacgcagatgcacgacctctggctccgcgtcatttctcccgccaagagctgcgatccctacgccgagtctacgcattcgacagccgccatcgcgttccagccgggagacctctcgcgtctggctttgcttgccagcgtgctcggagagacgatcgagtcgatggatccagacgccatcgctcaaagcatgcctgcctcgcgtcccggcgtcgctgtcgcagcgcccatcaagctcgaggccgacgcaaatgctcgtgtccgtgcgcttttgattctgacctaccacgtgcctgcgctcatcgaggagtgcgtgcgtctcgacgagatgaccatcgatctggtgcaggccaacctctcggcgttctcgctctggtcgaatcaaggcctgcatggcaccggctccaccgagtttccgcgctggaacgtcaccatccgagccgccaagcggtgcaatctgttcgaggatcccggcagcaacgccagctacacgcagccgcagctggaccatcgcaggaggctcgcatggctcgtctacggctacgaccacgcctttgccgtcggcgccaatacgcgtccgctcatcgtcgagtcgcagttcagcgtggaccagccgagcgatgctgcgccgtggtctgcgtgcggtgcgccgcccgatgcgtgcctcgccatgctcgaggtgcagggcggcaagatcgccgagctcgtctcgagcacgctctgctacgggccgccgctgcatcgcaaggccatggagaccgacagcaagatcatgggcatgatggcgcagctgcatccgtcgtacatgtgggacaacccggatgtgtcgtttgaccagctcgacccgttccgagcgcgtcgcagatgctggttgcagctcaccaccgcctggcagaggggctcgctgcaccggcagttcttctttcccaacggccgcatcaccaacggcgagctggccaccagccgccatatcgcgaccgacagcgcgctgcgctcgatcaatgcggtgcgcgaactgcgcaagatgcagaaccgcttttcggaccacatgggctccgcctggtggttccagtacctcaccgagcccagcatgacgctcgccacggccgcgctgcttctcatccgcagcagaggacagggtgtgcccggactggcgaatgaggcgagttgctggccgaccatgatgcacttttccaagatgatcgacctgtgcgtcgaggatctggcggcgtcgatgcagaattcggccgcctgtctgccgtcgttcctgacgtttggacagggctgtttgaagctgatcgagcagctgaggggcgcgatccagacgagctttgacgcgtttgtcaagtcgcagcccgacctggcgcgggtggagaatctcaggatcgacgaaaagatcattgcgctcctgcatccacggtcgaggcagaagagtccgagtggcgcaacgcccggtgcgacggcgcacagtcgcgaaccaagcaccagcggcgtgaccgcggccaagggcgttaagcgcgcgggcgatgcttcggcgagaggcgctttgtcgtcgcgcaacagagtgggaggaagtggtcaggagcagcgcgccgagtcgaggtccatctctccacgctcgtcgctggcggttccggcgtttgcgggggtgggggcgtcgaacctcatggctgggtatgggaacgcagtggggccgcagctgtcgtcgccggaccacgaggtgccttcgggcgagctgagtttgtcgtttgcgccgagcatgtcggcgatggcgccggctgcggtggcggcaccgcactttggcgtgccggctcctgtgcccgagggacagttgctgtcgcctgcggagccgtttgcgctgcgtgagttttataccgacgacggcgtacagcgcgccacgtccgactggctcacctcgatccacatgagcgccatgcttccccagcctcccccatcgtaagctcccccatttcagtgtagccagccattcgatagagacggttgataatatgtatttgcattcg

SEQ ID NO: 12648 - DNA, 3110 bp, Oryza sativa
  ref <308>: DATABASE ACCESSION NUMBER: AK109996
  ref <309>: DATABASE ENTRY DATE: 2002-08-28
ccgaagcatccggcgcgcatccgcgccacggcgcttacgagcgcgacgcgagcaggaccaccgagcttccgtctcggatgctctccgacactcgcaacgcacctctttccggctcgcgtcacgctctcaacgcctctcgcgatctcgccgcgcagccctacaactcggccatgtcgccgtatcctgacgcgcattccgatcgttacgagtcgcatccgccgctgcctcgccgcccagacgaacgcagcatccatcaacgcgtactttctcatgcaaccgccgaggctgtcgacgccgatccgcgccgtcccgacactgcatcgtccgcttggtcgtcggtgcgatcgtcgtcgtccggcgtcaagcgctcgcctccgcagcagcatgccccttacctgcctccctacgcccgagaagcgcccatcccggctcacgcccagtcatcctatcctcacgaccgagacgcccaggaacgcctgccgcacagtggcaagccagcggtcacgcagcgatcccctccggcatccgatggctttgcttcggcgcagccgccgctcggcgccattgctcgcggccacgctgcgatggcagcccaatcggtcgccgcatccatgtctgcacagcacccgatgcagcctaaccgcaagcgtctgaggatctcgcgcgcgtgcgacgagtgccgacgtcgcaagacccgctgcgacatcgtcggcgccttcccaggcgagcccggccatccactcaccatctcgggcgccgtacctccgctcgaacccaacatggagcccaagggcgagatgctcatcttgcagccctgcatgaactgccgccgcagcgaagtgacgtgctcctactctaagcgccctctcaagcgagggcccagcaagggctatatcaaggatctcgagaggcgcctcaactcgctcgagtcccaaatcgtctcgggctccgaccgcaccgaccaggacacccacgacgttcatcaggacgcccttccgcttagcacgaacgccagtacagctccgggtgcgccgccagcaaacaagccaaagattcgcaccgaggatcgcatcagcaggctcgagagcgtcctcgcgcgtccctccactgctaaggatgacgatgaagatccgccggccttctccgacgccacatccagcgaagtctttgcagcgcaggtcaagaccgaggcgagcagcgacgtactggataccgcctccggccttgcttctgaagcaactgcggaccttgaagctgctcgggcatcgtcctccttttcgcccctactggacccggtcgtcgcctcagttgctgcagcgccaagcagcccgaccaaagcatccttgcccaaactcaacggtacgtcggaccgctcctcagccagcttgaagggcaagaacaaggacaaggctgcgtcgcgagcaaacgcccgttcgagtgcgtcccagaccgacgtcgccgacgtcaaggccaaagtcgccggctctttcctccatgccaccttcccagtcatgcaaggccgcgccgagggcgaaggcggcagcagcagcagcaacagcaacatcgcccgtctggaagaccgagtgctggcaagaggtttgcgtttgctcgtcgagccggtcgagatggtcacttcgcaaccggcttcgcgcgacgacacgcccggctcgcagggtgccaaggcgcagcaggcgcatgctgtgcgcgtcgccaacctcatcggccaggcgtcgactggcctgggtggagtgcgcgacgagctggtggaacggggccagtcgagcctcgacagcctgcgggcgctgcgcaaggtggcgcaccggctgtcggcgcaggaggcggacctgctgatgctctgccacctcgaccacctgcgcaacgggcgcaacaacaactcggcgctcgccgccgccgtgtccaagctcggctcgggcggtaatgtgcagaacgagcgcgagacgtaccggcgccggacggtgctttttatgctcgatcggtggcatgccgtggcgtttggcacgccgcatctgctcagcggtcgctttggcatggagcgcgacagcttccgctcgatgaagctcgccttgagtgatgccgaacagtcgccgctcggcgatgcggtgttcgaggtgctgcgctgtgcgatcatgctgggccagctgaatgacctggtgcagaacaacggcggctggaagggtgtttcgaagagcgatgtggatgcggtcatccacagcgccatggacgagaacgagcgcaggacggcgaccgaggcgagcgatgcgcgcaacggcagcagggcggagcacgactcagcctcgaatggtgccgacgtcgaggggggtgaggcgggaccgagtctgttgagcaccgaggcgatgcggtacagtctggagcaggcggtgcggtgctactatgcgctgcatacgctgccgaacgcgcgcgatgcgcgcatgcaggacgtgcaccgcatgttcaacctggccgaggcggtgattgtgctgggcacggccaagacgccgatctcgctgcagggcaagctgatccagtctgcgatcgggccgacggtgctggcgattgcggcggtggcgttctcgtggtgcctgcgtgtcatctgcatgctggtcgcctcgtcgcgtgcggacgagagtgcctcgactgtcgcctcgagctccacgcctggcgttgttgaaagtacggcggggggtggggagagtacgctgtaccagcttgagttttaccggcgcaagatgctcgactacgtgcgcatgtgtgggcccttctgcctgttttcgggcggcccacctacggcaccggcgtcgtttgcacccgtgtacctgcggctcgcgctgttcttcaacaagaccgtctcgctcgcctcgcagatgggctcgctcgtctcgcccgagccgcccaagacgagtccagtccaccacgaccccaccgcgctgggtaatgatgcagataacctgctcgacatgggccgcgaaatgggcttcctcggctacgtgctcgcctccacctcccagtccgaggcatggaacctcctcaccggctccgctgcctaagaccacccccgaaaataatcggcaatcaatgcagttgctgccttg

SEQ ID NO: 12649 - DNA, 3713 bp, Oryza sativa
  ref <308>: DATABASE ACCESSION NUMBER: AK109997
  ref <309>: DATABASE ENTRY DATE: 2002-08-28
attccaccatctcaatcaaccccaactacaaggagtcacatcctctccatctcaatccactctccgcatcaagccaacctatgctcgaccccagttgtaggccctatctgcgtgcttcatctcttgtacgatctcaggccagccgcctttgcatgggtcaactgcttctcttcctggactcctccgaccgtcctccttaacccgcgcatctcgctacaacacaccatcttaaacgcgcgttcgcatcgcaccacacacacaacgagcttggcctctcctgccaaccgcctgctgtagccaacccatgatcgcccacatcttcggcatcctccgtctctccacccgcttggcttgaatcccacgctgctgggccatcctccccgatcccagcaccaccttcaaaccaccttgatccgcaccaccgccaccaccgctcctacgcatcttgacttcttctcatcctcggccctcttcccgtagcaactccagctctgcatacacgtagccggattcaacgggaatggtagctctcgcccttcctcgtcgccacaaggaacctattcaagccatcgcatcccccgcatccaacatgctgcctcctactcacaccaccaaggcatcgcccgagctcgccgccgccgatcctggcgctgctcttcacccagaagcagagcgcatcaagcccaagcgttcctccagctttggccgcggcctcggccagctcgcctctctaaccggcgccaaacccagggccgtcgacctcatgtccttcggtcgcacaaagtctggcgcctccacaccgcagtcgccctcgcctcagagcactgctgacaacgtggcggccgctgctgccatcctcgccaaccctgccgccgccgccgctaacaaccacgctgccgccatgcgtccgccttccacaccggacccctctcacctcacccacttctccctcctcctcagcgatctcgtcaacaaggccttcgtcacctgctcccctggcagcgctcccgctgccactacaaccagctctgtcgcctccaatgtcgccgccgctgccaagggacccaccatccccaagatcaaccagatcacctacgagggaaagcatctgccggacaaggcaaagatcatcgagatcgcacaggttgtcgttggcgagctccgctacgccgaggcagtcgacgcctacctccttcgcgccgtctcgcgccagatcctcaaggcgctcaccctctttgctgcgcgcatcgactcgctcctcgtctcgcccacaaaggacgccggtgcgctccgcatccccaccaatgcaaaggagggcctccacctccccgcagccatggagttcaacctcggcctcgtcaccctcgagtggatcgtcgaggacagccttgagcgctgcattgagggcgaccgcgacgctcacggtgagctcatcgccgacgagaacggcgccgtacacgacggcatgccccactttgtctccgaaatccccacgcccgttcgcaagcgtatggagggaaccatcctgcacatcatccagcccatcctcgcacagacaaaggcctccatggcgcgatgcatctcgagcgccgtccccaccccctttgtctccaccgtcgccctctcgccttccaccacctcgggcagcgccactgccgctctgccatccgacagcggaaccgcctctcccccgctcgccgctgttggcgcagctgcgaccactccaggtgcggtccctggcaacgtctcaccccctctccgccctggagaggccggtcccggctccgcttggctgcgcgagctcgatggccgtcttgaaggcgcgcgaaagcttctgctgcctcgcatcgaagagcgctgcggtcaagacggcgagggctggttcatctcggtcgccatccatgtcatctggaagggactcatgatcctcacctcgcgctccgtctcgctgcccagcaacgccgctgccgagctgctcaccggatccaacgccgccagcacctccgccttcgaccgtcttatgggcgaggtcaaccagaagcgcagcccttcgcccgcccagcttgcccaggctctcaagtcggtcggcgtcggctcggcccgtagcaagagcaagggtcccgacgcaacctgcgccgcctccgactcgggtcgccagagcccctctcactgctccgcttcgggactcagctcggctacgcccttctcgctggtgagcgcgcgtctgtgcgcccatcagctcgccgagctgcagacgtttgaaaagctcatgctccgcttctgcgacggcttcctccgcaagccgggcacgcagtccaagaaggcgggcaaggattccaagcgatcgcgctttgcgctcttctcgtcgggtgcggccagcagcctcggtggttctaatgcgccgctggatctgtctgcctacgacccggatgaggaggatgagctggcgcgcgcggcgcttgccgaggccatgcatgcgctgcgcgccaccatcattgtgctgcaatgcctcgagcgagagccggcgaccatctgtgccggcctcgaggcgctcaagaggcttccaggcgccgaaagcagtgccgactcgctcaccggatccgacgcaggcacgcccagcacgcccgctgcggctggacccgcggctgcgtcggcggtcttgggttccgaggcggccaaggcgctggacgccatcccgaacctgctgcttctgcacgtcctctacacgcgtcttcccatcggcgcgggccgactcgagctgccgtcgccgccggcgctgtccggctacacgtggaccgactacgaaaaggcgatcgccgggtttgcgggtggcgagcagtgggcgcaagcggtggcgctgcgctataagcccgaaatggagaaggcgtggaagggtgtcgagcagcgtcgcgccgagaggcttggtgcgctcgagcagagaggaccacgaaccgctcgatccgtgtcgggctgctcgtcggcgcgtggagggtctgcactggcgagaggcggatccaagccgtcgtccgagggcgatgatgatgacgacgacgacgatgacgaggaggcggccgaggccatgtcgcagtcggtgccggagctgaagaagccgagcgcgcagacgaggaggagcagcgacgaggcgcagcgcgacgcaggtggtgcgcgcggtcgcgtctcgccgggccattcgccgcgccgcagctcgacggcacatgcggcgcttgccgacggcgctggcgctgcgacggtgggcgccactgctccgccgcgcttctggcgtcgcagcacttcgactgcacgcagcggcttccacctctcgtttgccgggctgcgcgcgcagtcgccgcgcgcgtcgccagcgtcggaatcgcctgcgcccggaggagcgccggcgacgccgcccgtgtcggcaacgacgacggatccgcttgcttcgccgccgcgcgcgtcgtcggccgctggctcggagacgcacgaggcccggcacgatgccgacgcgcagcgcatccggctcgaggcggcgctggagcgcaggtcgctgtgcgtgtttggcatggcgctcacgtacgctgcgcgcggacagatgcacatcaacctggcctaggtccccaacccccacgctcttgacaagaacaagaaccaatttgtacagaagatccgaaacatttagaccgcacggcacgctgcaatagaatgaatgggaagaattc

SEQ ID NO: 12650 - DNA, 2767 bp, Oryza sativa
  ref <308>: DATABASE ACCESSION NUMBER: AK109998
  ref <309>: DATABASE ENTRY DATE: 2002-08-28
cttcctcccctcccctccctccgccacgtctacatccacatccatacctcacaatccatccgtcccgccgtttcgtcattgtgttatacctcccctcccacccatcttggcagctgtcgtcgacaaagccgaatcgggcacacgacacattgcagcctcgctcagcagcacatccaactgcgacctcttccccgaccacttggagccacttggagcctctaccagatcgaccaggcactgcagtccatcctcgtaaagccatccactcgcaggccgcgcttcccggccacccttcgcagccatggtcgagtccgagggccgcgctgccccgcccagggccaagctcccgccgttgagcccttcactgacgcgccactcggacggcttcccgtccacctcgtcgctcggccacgttcagcgctcgcctccccagctccatgcgccgccgtccaagctgccaccacccatgcccactcgcctccactcctaccaccaccccatctccgcctcctacgcatcgtccaactcttccctccacgatcgcaaccgacagcctccacccccgctctggcacgagcatcgctcgcccccgctcgaacatcgctcgtctgacttttcgcgtcatctgccacccctctcctcctcctcgtcctcctccaactctgccacatccgcactgccatcctcggcctccaccaacgcttttcagctgccctccctctcggccagtctgccttcctccaccagctggcacggccgcgaagcacaacgcgctccatccctccacgccacctcgtttcgcacatccagggatccctccgccgccaacctcgactcgcgaaaagataccaagctgccgtcgctctcgggtcatttcggcgaccagcatgcgccacgtcctcctgcctcggatgccgcaagcgccggcctcgtctcgcccagcgccgaagagccttcgccagcggcgcgcaagcccgccaaggcgcacgttccctcggcctgcctcaactgcaagcgtgcccatctggcctgcgacgtgggcaggccgtgccgccgctgcatcaacctcggcaagagcgacacctgcatcgacgtccaacacaagaagcgcggtcgtccacgcctcaaggatcgccccgcatcgcagaccgccgtatccacgctccagacgctcgacgcaaagagcgacgtctccggctcgcccgcctcggcgtcctacgcgcgccagtcgcccggctccgagtcgggctactttcgctcacccacacgcacctcggagctgctctcgcctccgctcctctcgtcgtcggcggcggtgatgcacgtctcgggcgccacccacggctcgtcgatgcatccacgcagcgcctccaactcggtctcggcgtccagctatcccttttcgcgccccgaccatctgcgccgtcccaccgatacggccagccacgccgtcagccacgccgcatcctcgtggtcgtatcagcccgcatcgcacgcagcgcgcgatacgcccgcacacaccttgtcgccgccgctcatgggtgcgcgccaacactcgcactcgctctcgtacgaacaccaccatccatactaccatcctcagcaccagcagcagcaccagcagcagcaccagcagcagcactcgcaaccgtcggctcacggccacgcgcatcacgcgtcggcttcgtcgagcggcatgtatcacgcaggagcgggcacggacgcctcggatgcgggtttctccgcagtggtaacgatgatctgctcgaccaacctgcaatgcgcgcgcatctcggacgaggtgacagcgctgctcggataccagccgagcgagctcaacgagcgctcgctgtttgagctcgtgcatccgtccgagacgagccgattgcaggagatctggacgtcgctcattgatccggtgggcgtggtgccgcaggcggtgcctgcggcggccgaggtggtaatgagcacgcccgcggctcggctcatgacgccggcggcaggcacgatctttgtgcaggagaacatgcgtctgcgtcagcgcaacggcatgtacgacttctacagcgtgcggctgcatctgggcggcggctttggcgtggatctctaccgacgcgacacgctcgaccgcgcctacattgtggcgagcctgctcaagctcggcaacgatgcggtgcatcctgaaccggcgctgcttcgctcgccgtactcgaacgacgcggcgcagtccggaggcttccgcactccttctgcgggtgcagcaccggcgcagagccgcgccggcacgggccgatgggaggcggacgaggcggcatccatgcgtgcacctccgcacacggcccagtcgcccgacgctcgcgatgccaagcatgccgacgagcccgcacatcaagcatcagacagcgccagccgcggcgtcaagcgaagcagtgccgacatggacgaggacgagcccgattcgtcctcacagactgcccctccaccgagcgcaccggcctcgaacggagcggcagcatcgtcggcatacggctcgtccaagcacgcagtctactcgccgccgcccgccatgcgctccatgctgtcggaacgctcgcgcggcacgagccgtgatggaatcttatgttgaatggaataccacaggaaacggcagcacgaccacaggcaatggaggaacggaattcgatgtctctatgtatttctacgcgttcttccttaatcgctccagcaaccttgttacgttgatggtaatcttgactctacactcacg

SEQ ID NO: 12651 - DNA, 3162 bp, Oryza sativa
  ref <308>: DATABASE ACCESSION NUMBER: AK109999
  ref <309>: DATABASE ENTRY DATE: 2002-08-28
ttgtttgatggtacgtgctactcggataaccgtagtaattctagagctaatacgtgcaacaaaccccgacttccgggaggggcgcatttattagataaaaggctgacgcgggctccgcccgctgatccgatgattcatgataactcgacggatcgcacggccctcgtgccgacgacgcatcattcaaatttctgccctatcaactttcgatggtaggataggggcctaccatggtggtgacgggtgacggagaattagggttcgattccggagagggagcctgagaaacggctaccacatccaaggaaggcagcaggcgcgcaaattacccaatcctgacacggggaggtagtgacaataccaccgtcgctgctacgctccatccgctcctcgccatctgccatctgccatctgccatccgccgccgacatcgacagtcgcagccgcagtcgcagccgcagcaccgcaccgcacaccccagtgcccgtgccctgtcgtcccttagaacccggattcccgattccataccccgccgctggatacccgccgctcatcatggaacttaacgtcgacagcgccaagcagctcctcgctcagtccgaacaggagctgcaacaggcgcacgcacagcagctccaggcgctcaaagacgagcccatcaccgcggctaccagcgcaccaaacggtgccgcgtctcatgtcgcgcctgcccccgcagctcctgccccagtggcccctgctgtcgctcctgtcgctcctgtcgccgcacctgccagcaccctcgtctcgtcgtcgcagtctcccaacgcagcaggacgcatgcagctcatcgacgagaaccaaaagttcaacagcgcccactttggccctagcctcgaccaatggggccttgccgatgctggctttggctacgatctctgcgccgtgctcggctcgcagtcgacgggcaagtcgacgctgctcaacaagctctttggcaccaatttcgacgtcatgagcgagaccgcccgccagcagaccaccaagggcatctggatgtgcaagggcctcaagatgaatgtgctcgtcatggacgtcgaaggcaccgacggccgcgagcgcggcgaggaccaggactttgagcgcaagtcggcgctcttctccatggcctcggcagaggtgctcatcgtcaacctctgggaacaccaggtgggcctctaccagggcgccaacatgggtctgctgaagaccgttttcgaggtcaacctcggcctcttccaggcaagcaaggcaaagaccgcaggcgcaaaggacaagacgctgctgctctttgtcatccgcgaccacatcggcgtcaccccgctcgagaacctctcggccaccatcatggccgacctcaccaagatctggctctcgctcgcaaagccagaaggcctcgaggcgtcgcagatcacggactttttcgacttcatgttcaccacgctcccgcacaaggtgctccagcccgccgaattcgacaaggccgtcgatgcgctgcgcacccgcttcgtcgaccccaaggaccccaactttgtcttcaagaccgagtaccacaagcgcatccccgccgacggcctgccgcactacctcgagtccatctgggagcaggtcatgaccaacaaggacctcgacctccccacccagcaggagctcctcgcccagttccgctgcgacgagatcgccaacgccgcatttgcgctcttcgccacctccatcaaggacttccgcaagcacatcgaaggcggctccatcctcgacacgctcggcgccgatatggcgctgcatcgctccacggcgctcgcgagcttcgaccgcgacgcgagccgataccaccaggaggtgtacaagcgcaagcgcgtcgatctgctcgaaaagctcaacagctcgctctcgccgttcttcctgggccagctcaagaatctgcaccgccacatgctgcagaacttcaagcgcagcgtgctcgaccgcatgcgcaccgagcccaactacgatttcggcctcgtcgtgagcagcgagaagcgcaccgcgctcgccaagttcagtgcggcggccaacgcggtgctgctggccgacaccgactgggccgtagacgaggaggtggcgcagctggatgccgagatccaggcgatctcggacacgatgcgcgtcgaggagaccaagaagatggtggcgcagatcgagcgcacgttcaagaagaacattggcgagccggttgagatggcgctcaacgcgcccgggcccgagatgtgggatcaggtgctggtggcgttccgtcgcacgctcgagcaggccgaggcgacgtacgtgcgcaaggccaagagcttcaactgcacggaggaggagaatacggcggcgctggcggcgctgcggcgcaagagctggctcagtctgcgtgccaaggtggacgagcagacggcggacagtgtgctggcggcgcggctgcgcgggtgctttgaggatcggttcaggtacgacgatgcaggcacgccgcgcgtgtggaagcccgaagacgatatggacggtgccttccgcaaggcgcgcgacgagacgctggcgctcatcccgctgtatgcgcgcatcgagcccaaggacccggcggtggcagtgcagctggcgtcgaccgaggacgacgctgagctgcagggagcagtggaccgtggcgagggggaggagtttgactttgcacagacgctcgtcgtcttcagcgaggcgcgcaaggccgagatcggcacgcgcttccgcaaggaggccgatgcgctctatgtcgaggcgaagcggtccaccgtgtcgagcatcgcgcaggtgccgctgtggatgtacggcgtgctggccgtgctgggctggaacgagttcatggcggtgatctcgagccctgtgtactttgccttcctgctcgtgctcatcgcgtcggcgtatgtcgtgtggcggctcaacctgtccggtccgctcgcgagcgtcgtgggcgccgtggggcgcgaggtgcacaggctggcggacgaacagctccgcagccactttggccagcccgtgcttgcgcagcccgtgcccgcgacgacggcggcgcaaagcacagccccagaagagatcgagctgcaggagaagtagcacgtaaactgaccgcctgaatgaattcttatcgtcgct

SEQ ID NO: 12652 - DNA, 3488 bp, Oryza sativa
  ref <308>: DATABASE ACCESSION NUMBER: AK110000
  ref <309>: DATABASE ENTRY DATE: 2001-12-06
atccaccttcacctgaacctttcggtcaccatccaacctcgtcagactgctcaatcgcacttttcccacgtctgacaatcgaacacgccgacagtcgtcacactcatccggccgtccatcgacccggcgactcgcgtctgcctctggctcgtctctggccggcctcggcccacgcgcgcttcccttcttgtcgagcgtgtaggtcatgtcgacactcaacctcacgggtcatcccgacccaaagctcggctccgacccgctgctcctccaggcgctcgagtcgtacgtcgagcctatcaaggctgctctcgcccagaacaacgtcgaggcagctgccatcccatccaagtcgggctccctctccgcatccgacctcgcaaccctcctctttgatcttcagtccttccaggaagagtcgctcggcgtcaacgcgccccgccccgccgacccatccgcctcgacccccaacacacggcaccccgtccgcatccccgcagagctcttccttcccaccacctcccaccagagcaccgccctcgtcgacccgcacaacagcccactcaagctgctcttgcaagagtcgctcgcattcctcgcctccaacgccaagcaaacatggaatttctccgacccagcgcagaagcacgacaacgtcaagctcatcgctcacctccgtcaccagctctccaacgcaggcgtgctcgaacatcctaccgtcgccgtgtccccctccatcacagaggcagaggctgcatcgctccgacacatggctgagcagctcgagtgcaagtggtccgacgacgtctcggcagccacacacgtcctctacccatccgaggtcacgcccccctcctcgcccaagcaaggcgacgccgccagctccaccacctcggaggaatacttcaggaccatcgcatccagagcaggccgcgcactcatccacgtctggtaccgccccgactcctacgacacctggctccccgccgccgactttgccgacccggacccggcgcccgagaagcgtctcccctggaaggtcggcgcaaagtggctgcgcgacagcgtgcgcttcaacgagctcatgaatgcagaggactacgagcaggaagacgcgctcgacaccgctgccgcctcggccgacgccaccgctaccaccgagtccgccaccgatgccgccaagagcaagaagcgcggcctgcccgacgagatcacagacgcctcctccgccgccgctgcagccgagtccagcagcaaacgcatcaagctcctcgtagctgcgcgccccgtcggcgccgtacccatcgacctctcgggctcccagcccatcaagggcaaaaagtacgagaacgaacccgtgcccagcggtgttctcggcaacctcccctcagagtcggcaggccccaccaaggtcgagggcgagcagcccgccgtcaggccagccaacgacgccgacgccaccatggccgatggcaccgcctccgacaagcccaaggacgcggctgtcgacgagtccaccgaggccacggtcgaccccaatgcgcccgtcatccagcccgacgctgccgccatcgagcagcagcgcatccgcgccgaggagatcgccaaaaagtacctcgcctcgcagacgcaggaggtcatcatcccctcgtactccacctggttcgacatgtccaccatcaatgccatcgagaagcgctccttgcccgaattcttcaacaacaagaaccgcagcaaaacgcctagcatctacaaggactaccgcgactttatgatcaacacctaccgcctcaaccccagcgagtacctcaccttcaccgcgtgccgaaggaacctcgcgggcgacgtatgcgccatcatgcgcgtacacgccttcctcgagcagtggggcctcatcaactaccagatcgaccccgagacgcgtcccgccacactcggccctccctttacgggtcacttccgtgtgctcgtcgacacgccgcgtggattgcagcccatgcacccaggcacacgcctcaacctgcccacctctgccaatgccaccgctgacggcattgcggcgggcgccgacaagccagacatgaacctcgagctgcgcaagaccatcttccagtccaccatgaaggggtccaagcccgtggatctggccgaggccaactcgctggcggcgcaggccgacgcggcggtgcagggcggcgcgggcggcgcaccgcgctacacgtgcgacacgtgcggcagcgactgcacgcgcgtgcgctaccacagcatcaaggccaagaactactcgctgtgcgcgtcgtgctacctcgagggccgctttcccagctccatgtattcgggcgactttgtgcgcatggaggactcggtgctcaagcagagcggcggcgtcacgggcggcgctgcagccgcgcaggacgactggacggacgcagaaacgctgcgcctgctcgagggactcgagatgtttgacgacgactggtcggcggtggccaaccacgtcggcaccaggagccgcgagcagtgcatcaccaagtttatccagctgcccatcgaggacggcttcctcgacggcgcgtcgcaggcggacctcggcccgctgcagtatgcgcgccgcgatgcggtcgacaagctgggcaagcccatcgtgccgtttgcgcaggcggacaacccggtgatgagcgtcgtcgcgttcctcgccagcgcagtcaacccggccgtcgccgccgctgcggctcagagcgcgctcggcgagctgacggacaacctgcgcaagcgcgctggccaggccaagtccggcgatgctgccgaggccgacaaggctgccgaggcagaggacaaggaagacaagagcgagggcgctcgggccaatggcgatgccatggacgtggacgccgagcccgaatccgctgctgcttccaccgacgtcgccgtggtggactatggcaaaaagagcgctgctgctggtggggccggtgctgttcctcgaaacgccgtggagcgggcggcggcgatcgcgctgggcgcggcggcggccaaggcgcacgtgctggcgtcgttcgaggagcgcgagtgccagcgtctggtgggccagctgatcgaggcgcagctcaagaagctcgagctcaaaatgtcgcagttcgagcagctcgagacgctgctcgaggccgagaagcgcagtgtggaggcgggcaggaggcagctgtacgccgatcggctggcggtgcagaagcagctggcgctcgtcaacgagttgctccacaaggctgctacggcgccggagaaggtgagccagcaggacctcgtcaaggcctcgagcgccgccaatgggctgccccagcaaggccccgtggtgagggaggccaatgtgcagcctggcgacgctcccacgggcgccaacgtcgcctcgatcggttaaaaagaccgagggttgaacggtttcgtgtattcttccgggtctcgatgttgtgaaatgaaaagatcaagtgccagac

SEQ ID NO: 12653 - DNA, 3069 bp, Oryza sativa
  ref <308>: DATABASE ACCESSION NUMBER: AK110001
  ref <309>: DATABASE ENTRY DATE: 2001-12-06
cggatgggggccggcgatgcgccccggccgtatgcggaacggcttcggctggtccgccgatcggctcggggcgtggactgttgtcggccgcgccggcggccaaagcccgggggctccgcgcccccggcagccgtcgtcggcgcagccggtcaccgcgcgcctctggcgcgcccctcggggcgctgcgccgcaacggcctgcgggctccccatccgacccgtcttgtaacacggaccaaggagtctgacatgcgtgcgagtcgacgggttctgaaacctgggatgcgcaaggaagctgacgagcgggaggccctcacgggccgcaccgctggccgaccctgatcttctgtgaagggttcgagttggagcacgcctgtcgggacccgaaagatggtgaactatgcctgagcggggcgaagccagaggaaactctggtggaggctcgaagcgatactgacgtgcaaatcgttcgtctgacttgggtataggggcgaaagactaatcgaaccatctagtagctggttccctccgaagtctccctcaggatagctggagcccattacgagttctatcgggtaaagccaatgattagaggcatcgggggcgcaacgccctcgacctattctcaaactttaaataggtaggacggcgcggctgctccggtgagccgcgccacggaatcgggagctccaagtgggccatttttggtaagcagaactggcgatgcgggatgaaccggaagcctggttacggtgccgaactgcgcgctaacctagaacccacaaagggtgttggtcgattaagacagcaggacggtggtcatggaagtcgaaatccgctaaggagtgtgtaacaactcacctgccgaatcaactagccccgaaaatggatggcgctgaagcgcgcgacccacaccaggccatctgggcgagcgccatgccccgatgagtaggagggcgcggcggccgccgcaaaacccggggcgcgagcccgggcggagcggccgtcggtgcagatcttggtggtagtagcaaatattaccactcacccactcactgcctcttggctccaacctggtagacaactaccgccaccactcgctgcaccctctacctactgctcgctaccacctacaacataccgttcggtagtaacaacatcaacattaacacagcagcctgagctccacaacaatggagaagactgccgacgaccaggtgaccgccggtcacaggtccaactctgttggcctggccgcaaccgccgaccctgagcgcattgaagcccctgtcacatggaaggcctacctgatgtgcgccttcgcctcctttggtggtatcttcttcggttacgactccggttacatcaacggtgtcactggctccgccgtcttcatcagactcgtcgagggcgacgccttcgtcgatgctcagattgccgctggtgacagccctgccctgactggcagcaacctgtccttgatcacttctatcctttctgctggtactttcttcggtgcccccatcgctggtgacatggccgatatcattggccgcaagtggaccgttgtcatgggctatgccatctacatcattggtgtgattcttcaaactgcttctgctggtcttggcctcatcgttgccggtcgtctcatcgccggtatcggtgtcggtttcgagtccgccattgtcattctgtacatgtccgagatttgccccaagaaggtccgtggtgccctggtcgctggataccaatttgccatcactctcggtctcctcattgccgcctgtgtcaactacggagtccagaaccgcaccgacagtggcgagtaccgcatccccatcgccatccagttcgcctggggtctcatccttggcggtggtattgcatgccttcccgaatctcccagatactacgtcaagcgccagtacatccccaaggccaagaccgctcttgccaagctgagaggtcagcccgaggacagcgagtacatcgagtccgagcttgctgagatcattgccaacgaggagtacgagcgctccatcattcctgctggtagctggttccagggctgggccaactgcttcagcggctccgtctggaagtccaactccaacctgcgcaagactatccttggaacttctctccagatgatgcaacagtggactggtgtcaacttcatcttctactactccactcccttcctgtcatccactggcgccatcagcaacactttcttgatccctctgatcttcaccctcgtcaacgtgtgctccaccccgatctccttctacaccgttgagaagtggggtcgtcgtcctctgctcgtctggggtgcccttggcatgctgatctgccaattcctcgttgccatcattggtgtcactgttggattcaacaagaccttcgagaacgccgctggcgagacccgcgccatcaacatctctgctgtcaacgcccagattgccttcatcgccatcttcatcttcttctttgccagcacctggggccctggtgcatggatcgtcattggcgagatcctccctctccctatccgctcacgtggtgtcgctctttccacctcctccaactggctctggaacactatcatcgctgtcatcaccccttacatggtcggcgtcgacgagggcaacctcaagtctagtgttttcttcgtgtggggaggtctgtgcacttgcgcattcgtctacgcctacttcctcattcctgagaccaagggcctctcccttgagcaggtcgacaagatgatggaggagaccaccccccgtacctctgccggctggaagcctaccaccactttctcctctgctgccatgaaggatggcaagctggacacccaggtcgaggatgtcgagcgccggggctctgccttctaaacgcccagcataatctgtttggtgcgaatttcgtaatgtcgaggatgagtgatgctttatgggcattaaggaggaatagtaattagttttcatgcatgccataagtggcttgtcgtattatgccagcgacgtacaaacactgtatgacagacatgatattgcaagacttttac

SEQ ID NO: 12654 - DNA, 3124 bp, Oryza sativa
  ref <308>: DATABASE ACCESSION NUMBER: AK110002
  ref <309>: DATABASE ENTRY DATE: 2001-12-06
aacgaccaccagcaaccttgaacaaggcgctcttcatctccaaaccgaaacctcatccctcacggccgcagtcagagatcacactgtcggaacccatccgataaaacactttcgttcccacgccgctcgactcgctcccaccggcatcatggcgtcggcatcggctcatccggagctgtcgcagcccgtatcgctgctggcacatccgagtgcagctccggccgaactcgcacgccacgctgcgctcccagccaccggattctcgtccacaaagtgctccaccgtcagcaccggtgcagcctacaagctatcgtcggatgcgaggacgctgcgcaggctcaagggcactctgcccatcctcgtcgctgccaatgcgctcaacctggtgaacccgcagacgcagacgcccatccagagcttcaccctctcttccgccgacacagcttcgtccgctcccctcacgctgctcagctcgctcggcgccggtcgatccctccgcaccacctacgtcggcatcgagtcccacaaacgctccaagtccggccgcgccgccgtcgccgcatctcacgagctgtgggcgttcgtcgaagaactctccgccaagggcaaggagaacgccgaggtgcagttcaagaaggaggtgctccccctcgacaagcctgtccgcctcatccacccgctcagcgatggacgcttggtgctcacccatcccgacgacagcctcacgctcgtctcgtcgtcgcccatcatctttgacgacgaagcctcggtacagaccgcatcgacgtcgatgcaggtggtgcagaccatcgacgcaaccaacggcgcgggccaccaacgctcccatttttacgtcaacatcctcgacgcaccttctgccaaagctctcgtctcgcactcttcgcagatcgaagaggcggctcttcttggcttgcgcatcgccgtcacctcggactacatccttgccagcacatctgccaaggccggcgacgattccaagaagaaaaagaggtcaaagcgctccaagaaggatgccagctccaaacccagcgccaaagatgcccaagacgacgacgacgtggccgcttcgagcggccatcttcccgccaagggcgcccccagcggtccgctcacgcttgagctcactgcatttgtcaagagcttcgacggcgcctcggacgcgatggctgctctggtcaagctaggaagaatcgaggtgccaggcttcaccagcgctcgtcacgttcaggatgtgcacttccactcggccggccgtctggcgcttctgggcatcgacggccaattgaccagcttcaagctctccacctccagcagcgctgagccggtgctggtccgaagcggcgcgagcttacttccggctctggctccggcgagcaatgcacgtccgtcgtcgtcgtcgaccgcctcgccggcgtgctgtctgcttctgagccgcgaccatgcgctggtcgtcggcgtgacgcgcgccacaccggctacgcaggacaaggagcgcatcgcggcgctcatcgttgatgtggagctgggcgcagtgctgcgtgagatcgactgggccgttccgtttgttgcgccctcgagcgcggctgcatccacgctcggcctgctgcagcgcatgacgaccatctcggcaacgcgcatcgcgggctcgaccagcgtcatcgccatcggcgctcccacggtggcagcgcgcatctcggactcgtccgccaacgcagaggcactcctgcagctgcagcagcgccgactctgcgtgctctcgatgccgtttgtggtgcccgaggcgagcgtgctgcgcgatgcactcggaaagggcgatctcacggcgcgatggattcagacggctgccacggacgcagcggacgcagctggcgtgtcggcatcggatgcgagccgagcggacgtcttggaccagatcaagcgcatctcacaggcgaccggcaatgccaaggcgaagggcgccgagatcaacacgcccatcagccagtggatcgaggcttctacggcggacggacgcatggtggagaccatgtctgcacccgaggcggatacggcgttctttggcgagctgctcgacgtgctgcttccggcgccgtcttcacgcaagggtagcgcgtctggcttgactgcatcggcggcattggtgacgatgctcaagcatgcacgggtgcatccgtctgtgtttgcatcgctgcagcccacggcgggatcgacggcggcgaacggtgcggttgcgtcgccctccaacgcagcacgtctttcggaattctgggcgaggatcgggagcagcaacgagccgaagctggtgcgtgcggcgattgagcggcttccggaagtgtcggaagagacgctggtatcgctgctcatgacggcggtgcgagggcttagcgcgtcgagcgcatccaaggcggcagctgggttcatggcgctggtggtggagctggtggaggtgccggtatcgcgggcggctctgaggagtgcgctcaagacgcagctgcgcgacgatgtcgagtcggcggtggcgctgctgcagatgtgcaacgcgtggatcagccagacgattcaactgcctctgcaggtggtcgagcgcggggatgacagcaagatgcccaaggcggaagcggcgatggcgctggcgacggatgtgctcgacacgttcttcccgctgctgctcacgacgccgcgcacgcacgctacggtggaggcgctctcggcgacgatcggacgatatgtgcagctgatgtcgacgctgcgacttgtgaatgcgccgctgtcggcgtttgccaagctgcagcaggagaatgcgctgctgagcgaggcggcgagccgcgacaagaagagcagcaagagaggcacgtcgttggcggcgagtggcgccatggcgtcggcgggcaatgccaaggtgcacgcgagcagcaaggccgaggcgacggcgagggccgagatgggcggtggactgggactcaagctgggcaccatgggcgaggccaagacgcgccgtctgcaactgttggagcagagcatgctggtgggcgcctacagcttcgagcgtctcgagatctgacatccctcaccactcaaaaaaatcaactctcttctctcaagg

SEQ ID NO: 12655 - DNA, 4674 bp, Oryza sativa
  ref <308>: DATABASE ACCESSION NUMBER: AK110003
  ref <309>: DATABASE ENTRY DATE: 2001-12-06
acactctcatcaccagcagtccgtcttggtcggcgatcccgacaagcccatctgcactgcgtctacgtcggctcatccgcactcccaccaccacatgctcaagagccatgtcgacatagcatcgcccagcacccacactcgatctcacgttgcggctaagccgacagcgcacaccggcagcagccaatctgccaatctgcaactgcgtatgctcaaggcgcagctgcttctcatcgcatcacactcaccatggcgcccgactcgccctgttggcagcaacggcacgactccattcgtcacatcttgcaaacacgctccgtcaaggcagctctgcgcgacttccagttcagcctgaacaatctcgacaacattcgctcaatatcagatgcatcagatgcatcacaggccgaccctagcagctcgagtcatgtccatgcctcttccgccgccaccttgggtcgattcctcgacatcagcctcgtcatctcgtggtctgccgacggtcttgcagcgagcaccgacccaaaccccttccggattgcagccgctcccactctcagagacctacgctcgctcagcttgcaggtacaagacttcaagtctatcaaggtgctccagaagagcgcaggaagccttgtcgaagtcgtaaagagccgcctcgatggccgtgtctacgtgctcaagtcgctcgtcaagggctttgcccgtcgcaatgccgccattcagactcccatcaacgagtccaagctgctacagcgccagccccactcctcactcgagtcgcatcaacaccaccagctgctcacgccacagctgctcgccgcgtttcagacgcaaaattccgtccatgtgctcatggagtatgtacccagcggcgacttcagcgagcttcttatggctgcaagcagctgcggccccgactatcccggccgcgctcccaccggccttctcaacgaagactggatcctccgctacagcgtcgacatggtgcaggccatcgcttgggtccatgctcagggctttgcccaccgcgacatcaagcccggcaactttctcctcgaccgcagcggccatctgaagctgtgcgacttttccagcgccgcgcccttcagcgactttgcctcccaagcccacactgccagcacgtcatccaagccagaccgcaaggtgtgggccttctactgctctcagcccacaggcacgtgcgactacctatcgcccgaggtgctcgaagccgaggaaacacgcgtcctccagcgtcagcagcagtacgacttgtccaatcttgacgacttcctcggcgtccaacgtcgcaccaatccatcatcacaggctggttccggctcacaacccgagtgcacgcccggcttgtacggcccacaagtcgactggtggagcttcggcgtgatgctctacgagatgcgcttcggcgtcctacccttcttcgccgacaagatggaggagacctacgaaaagatcaaggcacactcgacctcgctccgattcgatgcttccgtcgcatgttccacccagctcacactgctcatccgcggcctcgtcacagaagcagcacgtcgtctcggccgcgactcggcacaacaagtccagcagcatgcattctatgctgccgagcgcatcgactggtccaagcactggccgctcgacgcccctttcacccccaatgctccgggagatcccgcatcggaccagcggtcgaccacgcgcgacggtctcgcaggccaaaatgccaatcccgcgcccactggcattgctgcccacttcaaagacagctccatgtccgtcgtgtccagcttaccctccttctccgccctctacgcgggcaatccggacgactttcccgcctttgcagactcacgggaatttgaggcagactcggtcggacacaaacaggactggtggggaccggacgctggcatttctcaggagggtgagccagattgctcaagccatctcagagacgacgagacgcaagcagcgaataatgtgccgccgccttccagcgacctgtcgctgacagctggcatgaccaggtcttcctcctcgcccgccgtcgtgctcaacgcctcttcgtccccaagcgcaatgctccgcgacgcaaactcgtcgctcgcaggtactatctcgccatgcatctcgcgctcggctccgcgctggtccgattgcgacaccacttttgtcggtttcagctacttgccacacagagacgcttttttgcctccggcagacgcagcccctgcagtatcgacaggcgatttgtcgaccgctgccagctttgacgaccttgctcacaagtcgggcgcttctccgagcatctggcccaccagcacccccatcgcgtccacaccattccatcgaggcagctcgcaagcatcgcattcactcaccacgctcccgacgccgccgtcgtttgcgcccagccccgttgctgctgtcgagcccgcgggcgccgaagtgcgaaatcagcgttcgcagccgagacccccggcgcttcccttccagcatccacaaaactttgtcacgccggctcgcaagccgtcgtacatggccatccacgatcgattccgccagctccaaggtcaggaggcgcccatacccgaagacgcctcggccaactacacgcccgcggtgccatcgtcgccatatcccttccccatggccccggctgtcaagaactcgcactttaccggaggcaggaaggcggtgctcaaccggcgcgacctcgaacgcgcgcgctcggcaacccccggcggcggaagcgtcggttcggacagccgtcagtcgggcggcagcaatgccgtacgcgagatctcggagcgcgaagcctgggacgagatgatggctgccgtgcagaagagcgttcgaaagaagcaacccgctgccgtcgtgcctccgacaccgccaatctcgtcggctgtcaagcccacgggcctgccgcgctcttccaccgacccgcagctttctgcgtccaagcctgtcacaacactgccgtcccggcgtgtccatccccaaaaagcaggagacaacacgggctctcggcgggcatcgcgcaacgctctgcagcctctcgaggctccgcgtcaggcgctgcacccggcaaggtcagggcttggcgaccgccgctcatcggacgagaagcacggatccgtcgcacagtcgcaaggcgacgctcgtcaggctggcaacggagccaggctcgttgcgccacgcgctacattcaaggtggtcgctcccgagtcacccgagccgttgccagcggcgctcgtgccggacgactcgccgcgcgcgggcgggctgatgccgaaccagtatgcgctcgacatcgacatgtacgactcggatggctcagacgatgggcacgcggcacctcgacacctgcgacacaagaagagcgcgcgccagctgctcatccgagcgcaggaacgcggcacgccgaccaagcccaagcgggcgcaaagcccgcctctgaccgaggcgtttgcgtcggcgccctcggtggctgcggtgctggaagccgcgggcgcgcgcgactcgccgccgctgctgctgggcgaccattcggtgcgttcggccggctcgtcgcgcgacgtttcgtacgagcagagtgcggatcgcggcgtgggctcgtcgcgcgcccgagcactgtccatgcagcgatcgggcaagagcacgccagacggcagccgggagatcctctcgacgagcctcggcaagacgtcggtctcgtttgcccccatggcgtacgtgcccgtgctgggcgccatccctccgtggcgcgacgcgagggacgcagcgggcagtggcgatggctctggtgatggcaagggtctgccgcgcgattcgggacggggcacgcggacgatccgccgcaaggacagcggcgagatgctctcgcagtaccgcaaggccaaaggcatggggcgcgcgacgagcatgctgtcgctcagcgagcgcgccaaagccgacgcggacgcgccggcctcgcgcccggatacggccggcagcggcaacgcggcgctgtcaacctcgccgcccgatggtgatggagaggacgacttcatcttgggccacgtcgagagccggatgcggtcgctggcgcccggtggcagcttgcccgggcgcacgattcggcgcttctcgagcgtgctttcgctcaaagaacgcgagcgcgtgacgatcgagcggccggcgagccaggatggtggcggtaagagcacgcgcggcttcggccgcttccgcagccgctttgcgccgtcgacgctgtgcgaagagccgagcgaggacgctgcgggcgacgacgcgggcctcgcgcacgagcgggcgcagcggggcgcacaccgcagtcgccgcgtgggcaccaaggtcgccgacgacgacgcgggcaagctggatggcgggcggaggatgggcgagacgctgccgaggtcgtttgcagtgcgcgcggcgtcgatgggggcgagcgagtcgcccggtacgggagacgtgagcctgatgacggggctagggcagcgccaccatgcgctgcagggctcgctgctgggactcgagcagcgtctggcgcggctcaaggcgcggctggaagactgagccgcccgcacactttggaatgcatacagcagcactttgcattatgctcaaacggccttgaattttggg

SEQ ID NO: 12656 - DNA, 3972 bp, Oryza sativa
  ref <308>: DATABASE ACCESSION NUMBER: AK110004
  ref <309>: DATABASE ENTRY DATE: 2001-12-06
accatcgatcgcaccagccttcgcatcgcggcctcgacaagtccgaaagcggagtgggcatcctcttcaaccatgtcggagtccatgtcttcggcaagctcttcgagctcgcgctcgtccttcgacgggccctccacaccgcccgacgccgtgcgctcgctgcacaactcgatcaaggcggcacgacaggagggcggcatcgacgccgaactgccgctgtggaagaagaggcacaccttcttcccgctcgaacgccaagagcgctactcggcccccaccgacaagggctttgtggcgcccgagctcaccgagctcgtcgctcccaacatcgagtcgttcaatgcgctgtgggcagaggatccgtcgctggatccgccagcctccgccgtaggtggcttctacaacgagggcgtcggccttctagaaaagagtctgcgtcgtctggcgccgcgcatcgtctttgacggccagggcgacgccaagggcggcctcggcaaccgcatcacgctgcgcatggacagcgtcaacctgtccaagccgctcgtcaacgaccgcgccaagggcgtgcgcgagcgcagggtattccccaccgaggcgcgcgagcgtctcttcacctacacgggcaagctcaccgcgcgtctgtgctggagcgtcaacggcgatccggagcagagcgagatcgtggcgctgggcaactgccccgtgctggtgcgctccaaccgctgcaacctgcgcggcatgtcgtcgcgcgagctcgtcgcccaccacgaggaggccagcgagttaggcggctactgcctggtcaacggcaacgaacgtctgatccgctacctcatcgtcgccaaggccaacagcccgcaggcgatcgagcgtccgtcgttcgagaagcgcggaccgagctactcgaacaaggcgatcgtcatccgctgcctccaccgcgacgacctgatcagcgtgaccaacgcggtgcactacctgcacaacggcggcctcacgctgcgattcagctggcgcaagcaggagtacatggtgccggtggtgatggtgctcaaggcgctcgtcgacgccacggacaaggagatctttgcgtcgatcgtgcagggcgactttgacaacaccttcctcaccgaccgcgtcgagctgctgctgcgcaacttcaagcagtacacgctgtggtcgggccaccagtgcctcgagtacctcggctccaagttccgcgtggtgctcggctgccccgaggactggaacgacgcccaagtcggctcggagctcatccaccgcatcttcctcgtccacctcgacagcccgcgcgaaaagtacaagatgctcatctttatgatccagaagctctactcgctcgtcgccggcgagtcgtgcgccgacaacgccgacccgccgcagcaccacgagatcctcatgcccggcttcctcgtgggccagatcgtcaaggagcgcatcgacgaggccgtcggcaacatccgcgcccagatcgcgcgcgacgtgcgcatgaagctcaagggcgtcgactttttcgacgcgcgctacatcaagaagagcgtcgccaaggtcaacatcgacattggcgtcaagatcgcctcgttcctcgccacgggcaacctgtcgtcgccgtccggcctcgacctccagcagacgtccggattcaccatcatggccgagaagctcaactttgcgcgctacctcgcccacttccgttcggtgcaccgcggcgccttcttcgccgaactcaagacgacctcggtgcgaaagctgctgcccgaggcgtggggcttcctctgccccgtccacacgcccgacggttcgccgtgcggcctgctcaaccacttttcgcacacctgccgcatgaccacgcgccagccggacgtctcgcacctccacgcgctcctcaccagcctcggcatgaccgaggccgccttcagcgtcggcggcagcgtccagggcgcgggcgctgccaaaaacaacatcgtcgtccagctcgacggcgccatcctcggatacaccaccccggccctcgccaagcacatcgccaccgcactccgcatctggaagaccgaaggcctccacaaggtccccctcgacctcgaaatcggattcgtccccacctccaagtcgggacagtaccccggtctctacctcttctccaaccgctcgcgcatgatccgtcccgtccgtctgctccacaacaacaagatcgacctcgtcggcccctacgaacaggtctacctcgacatcgcctgcgacccgtcggaaatcatccaaggcgtctcgtcgcacgtcgagctcgccccgacctcgatcctctcggtgctcgccaacctcacgcccttctcggattacaaccagagcccacgaaatgtgtaccaaacccagatgatgaagcagacgatggggacggcgtcgacggcgatttctcgcaggacggacaacaagctgtaccggatccagagcccgcagacgccggtggtgcgaccggagctttacaacaagtacggcttcgacgactatccgaacgggacgaatgcgattgtggcggtgatttcgtatacgggctacgacatggaggatgccatgatcctgaacaagtcggcgcacgagcgcggattcgggtacggaaccgtgtacaagagcgagacggtggatctgcgggatctgcgcggcaaggcggcgagtgcgagtgtgccgacgctgcattttggatttgcgccgaactaccgcgcgtcggaggcgcagcgggcgatcctggaccaggacggcctgccgtacattggacagaaggtgatggcgggcgagccgatctgtgcctactgggacgaggtgagcggcaagacgtcgttcaaaaagttcaagggcgacgagtacgcgtacgtggatacggtgcgtctgctcggtgctgatggcggctcgggtggaggcgacagcgagtgccaaaaggtgcagatcatgctgcgcatcacgcgctcgcccgtgatcggcgacaagttctcctcgcgccacggccagaagggtgtgtgctcgcagaaatggccggcggtggacatgccgtttagcgagagcgggatgcagccggatgtgattatcaatccgcacgcgttcccgtcgcgcatgacgatcggcatgctgatcgagagcatcgcaggcaaggcgggagcgatgcacgggcttgcgcaggactcgacgcccttcacgttcagcgaggatttcacgccgacgcagttctttggcgagcagctcaaggcggcggggtacaaccacgtgggcaacgagccgatgtactcgggcatcacggggcaggagttgcgtgcagacatctacctgggtgtggtgtactaccagcgactgaggcacatggtgaacgacaagttccaggtgcgcaccacgggtccggtgcatgcgctgacgcgacagccgatcaagggtcgaaagcgcgcgggcggtattcgattcggcgagatggagcgcgatgcgctgctggcgcacggaacgtcgtacatgctgcaggaccgactgatgaactgttcggactactcgacctcgtacgtctgccgcacgtgtggctcgctgctctccgtcggctttgaccactcgcactcgggcgccggcggcgccatgtcgacgattgacgtgacgacgcagggcaccacgcccgtgctcggccccaacggcgagttctgccgcgtctgccgtgcggaggacgaggtgcgtcgccagcagggcttggaaccgctgcgtggcaagcgtcagcccatcggtggcgccgaggccaccatcggcatccctgcacacaacgtgatcaacaacgttagcggcggcgacctcgatgtggtggcagtgccgtacgtgctcaagtacctcgtggccgaactcgccgccatgggcatcaagatgagctttgcgctgtcgccctgatcctctttgtagcagtgcagtagtagtaattcatacagtttttcttcc

SEQ ID NO: 12657 - DNA, 3079 bp, Oryza sativa
  ref <308>: DATABASE ACCESSION NUMBER: AK110005
  ref <309>: DATABASE ENTRY DATE: 2001-12-06
tcttgctcgattatcggctcgattgtcggcttcggacctcacaacacctttgcgatcgaacgccaaatcagtgcacatctgcacccttgtcccacctgaacacaatcgtccaacatggctgaccaacaaagcaccgcaaatcgcaagcgccgtcgccagcaacaaggcgatccattcgatgcttcgtcgccactcccaggcccgtccaatgccaacacaccggcacgctcctcgccacctccctcgtcccttcctccgtccagtccgcccgccgccttctccgacttcaccgatggcgagctcgacgatgccgacgtcgtcgacgaagaacgcgaagcgagacagctcggcgaccactttcaagacaatgcagactcggacgacgaaggcgaggacctctttggcgacaacatggacaacgactacaccgagaacgccgccctcgatcgctacgacaccgcgctaggcatcgacgacgacaaccagtacgaccagatggacgccaacgcgcgcaggctcgccgaactccgcatgagccgccgcgaccgcacagaggccgccaacaagggcagccgatctcgcgctcccgaattcctccacagcgacgacggcgcaagcgatgcagacgacggcgtcgccatcctcaaccgtcgcagacgaaggcactacgacgaaacagcagcgagcgcagacgcggccgcctttgccgacgaccttccgctcgagcagctcggcgacgtcaagaccgacagcatcgccagctgggtcgccaccgaagacgtgcgcagggccatcgtccgcgagttccgcaacttcctcgtcacctacgtcgacgaaaacggtgtcagtgtctacggccagcgcatcaagacgctcggcgagacaaacgcagagtcgctcgagatctcgttcctccacctcgtcgactccaaggccatcctcgcctacttcctcgccaactcgcccgccagcatgcttcccatctttgacgaggtcgccttcgacgtcatcatgctctactacccttcctacgaccgcatccactccgaggtgcacgtccgcatcgccgacctacccacctcatccaccctccgcgatctgcgccagggccatctcaactcgctcgtgcgcgtcagcggcgtcgtcactcgacgcagcggcgtcttcccgcagctcaagtacgtcaagttcgactgtctcaagtgcggcgctgtgctcggccccttctggcaggacgccaaccaggagatcaagatcagctactgctccaactgcgagcagcgcggtcccttccgcatcaactcggagcagaccgtctatcgcaactaccaaaagatgacgctgcaagagtcgcccggcagcgtgcctccgggccgtctgccgcgccaccgcgaagtgatcctgctctgggatctcatcgactcggccaagcccggcgaggaggtcgagatcaccggcgtgtaccgcaacaactttgacgcgtccctcaacaccaagaacggcttccccgtctttgccaccgtgctcgaggccaaccacatcgccaagcgcgacgacgctttctcggcattccgcctcaccgaggaggatgagcgtcagatcaaggcactcgccaaggacgagcgcatcggcaagcgcattatcaagagcatcgcgccgtccatctacggccacgaggacatcaagaccgccatcgcgctcagcctctttggcggcgtgtccaaggacattggcggcaagcatcgcatccgtggcgacatcaatgtgctgctgctgggtgacccaggtacggccaagtcgcagttcctcaagtacgtcgaaaagaccgcgtcgcgcgccgtcttcaccacgggccagggtgcttcggcggtgggtctgacggcgtcggttcgcaaggatcccgtgacgcgcgagtggacgctcgagggcggtgcgctcgtgctggccgacaagggcgtgtgcctgatcgacgagtttgacaagatgaacgatgccgaccgcacctcgatccacgaggccatggagcagcagcagatcagtatctccaaggcgggcatcgtgaccacgttgcaagcgcgctgtgccattgtggcggctgccaacccgattcgcggccgatacaatcccacgattcccttcaaccagaacgtcgagctgaccgagccgattctgtcgcgattcgacgcgctgtgcgtagtcaaggacacggtggatccggtcaaggacgacatgctggcgcgctttgtggtgggctcgcatctgcgctcgcatcccaagtttgatgacgagacggacgagcagcttgtggctacgtcgctcgatgccgacatcctgccgcaggatttgctcaagaagtacatcatgtatgcgcgagaccacgtgcgtccgtcgctgaatgcgctcgaccaggaccgtatctcgcggctctatgcggatctgcgtcgcgagtcgatctcgacgggtagcttccccatcacggtgcgtcatctggagagcatgatccgcatggccgaggcgtcggccaagatgcatctgcgcgactatgtgcgtacggacgacatcgacgtggccatccgcgcaacggtcgagtcgtttgtgtctgcgcaaaagatgagcgtcaagaagacgctcgagcgcggattccgcaagtacctgcaccagagccgcgaccacgacgagctgctctcgttcctgctcggctcgatcgtcaaggaccgcatgcgcttcgtgcagctctcggcgggcgcgcgccgtggtgcccagcgcgatacggtggtgaccgttccggccgccgagctcgaaacacgcgccaaggaggtcgacgtgtttgacatccggccttacctcggctcgaaactcttccacgccaacggctacacgttcaacgctgccgaccgctccatcaccaagacgttcggcgccaagcggactggcttgtcggcggcaggtggcaacgctgctgccgccatggtggcctgagcgcgccacattctcattcccggtccgatttgtagtgctcccgtttcttctctgtattttctagctcctgcgtcacaatctcgatcggtctctagtcatg

SEQ ID NO: 12658 - DNA, 3391 bp, Oryza sativa
  ref <308>: DATABASE ACCESSION NUMBER: AK110006
  ref <309>: DATABASE ENTRY DATE: 2001-12-06
atctcgccctcgcaacctacgcatcacttcgaagcagcgacatcccggcctctgctctctctctctctctcgtaggattacgctcgcgctgcgtacacactcacgggccgctccttcaccgccactccctctgatcgagtaggccaccctggtcgcagcgtcggctgcattctaccatcacacgcgaggcggatctggtcagcttctcgattgcatcccgtcgccaacatgatcgcctcgctcgctcgcgttcagaggggtcgctccggcttctcagccgcccacaaggctatcggtgccaagcgcactctcgccactccagccgccgacggccgcgtccccaccttccacccgtcgcgagtgccaccctacgctgagctcctcgccacgctcgaggctgtccgcgcccagctcaaccgcccgctcacgctctccgaaaagatcctctactcgcatctgcgcaatccggaccaggacctcgccggcgtcggcgccgacgtctcggccatccgaggtaaaaagtatctcaagctcaagatcgaccgtctcgccatgcaggacgcctcggcacaggtggcgctgctccagttcatgacgtgcggtctgccgcgcaccgccatcccgtccagcgtgcactgcgaccacctcatccaggcctacgagggcgcagaggccgatctcaagcgctccatcgcctccaaccaggaggtgtttgccttcctcgagtccgcctccaagaagtacggcatcgagttctggggcccgggatccggcatcattcaccagatcgtgcttgagaactacgccgcccccggcctcttgatgctcggcaccgattcgcacactcccaacgcttccggcctcggctgtctcgccatcggcgttggcggcgccgacgccgtcgatgccatgacaaacacgccctgggagctcatggctcccaaggtgctcggcgtccacctcaagggcgagctcagcccctggtgcacgcccaaggacgtcatcctccaccttgccggcaagctcaccgtgcgaggcggcaccggcaagatcgtcgagtattcgggcccgggcctccaaaccctacctgcaaccggtctcgccaccatgtccaacatgggtgccgaggtcggtgctaccacctccgccttccccttcaccccggccatgagctcgtacctcgaggctaccggtcgtgccgaggtcgcccgtgccgccgagcgcgcagccggccagggcttcctctccgctgacgagggcgcagagtacgacgagcgcatcgagatcaacctctcggacctcgagccctgcctcaacggccccttcacccccgatctcagcacgcccctttccgagtttgtcaacaaggccaagtcggaccagcgcgaccacccagtcgagctcagcgccgcgctcatcggcagctgcaccaactcgtcatacgccgacatggcgcgctgcgcctccctcgcacagcaagcgcgcgaccgcggcatgaaggtcaagtcgagcttcgacgtcacgcccggttccgagcaggtgcgcgccacggtcgagcgtgatggcatccagcaggtgctgaccgacgttggcgcgcgtgtgctcgccaacgcctgtggaccatgcatcggtcagtggaaccgcaaggagctgcagggcgaggacaacgtcatcctcacctcgttcaaccgcaacttccgcggtcgcaacgacggcaactccaagacctggaacctgctcgcctcgcccgagatcgtcaccgccatggcctttgccggacgtctcgacttcaaccccatgaccgacaccctcaccgcgccggacggcaagccgttcaagttcgagccgcccaagagcgacgtactccccgccagcggattcgcacagggtgacatcggatacctgcccgcgcccatgcccgagccccagcccgacaccgaggtgctcatcagccccacctcggcgcgtctcgagccgctgcagcccttcgactctcccttcgccgccaccgccgcacagggcaagtacgagctgcccaccatgcgctgcctgctcaggatcaagggcaagtgcaccaccgaccacatcagcgccgccggtccgtggctcaagtacaagggccacctctccaacctcgccgagaacacccttatcggcgccaccaacgacgagctcgacgccgtcaacgccgccaccgactacgccacgggcaagcaggacaccatccccggcgtggccaagcagtacaagtcgcgccagcagccctggatgatggtcgccgaccacaactacggcgagggctcggcgcgagagcacgccgcactccagccgcgcttctacggctgcaacctcattgttgcgcgcagcatcgcgcgtatcgccgagaccaacctgcgcaagcagggtgtgctcacgctcttgttcgagaacgaggacgactacctgcgcatcggctcgggcgacgtggtggagacggtcaaccttaccgacctcattcgtcccggcggcgatctggcgacgcaggtcaagctgcgcgtcatcaagttcgagcaggacggcaccacggtcaaggagacgtttgagctgcctaccaagcactcgctctcggcggcgcatctcgactggatccgtgccggttcggcgctcaacctgatccgtgagcaggcggccgcttcgtcgagctccgccggtggcgtttcgggtgcgttcgctgcggcggcaggtgcggccaaggcgggtgctagcaaggtggcgtcgctcggtggcgtgcgtggctacgcgacggcggcagcgggcaggacgggaggctcgcgcaaccccaacgaccccaactacgtgccccccgcggcggaccctcgcacggatgccatccgcaagatggtctacccgcccgcggctgccaaggtggccacgtcggcttccgaagtgctgccgttcggcgaggcgtcggaggaggtgcacagcaccatcacgcgtgcatggttgctcttccagcgcactcagcgcgaggagctcgccgagcgcctcgacaagaagcacgcccgtctgcgcgaggcactgctggacctgcgtgctaccgaaccgcgtctttatgccgccgctacataccgcgtggcgcccaacaaaaggtcgccgcgcgagcaccgcaagctcgttgagctcggtctggtgacgctgcccggtgcgcagcccaaggcggatgcgccgacgggtgccgaggccaggagactggtcaaggcggtggccggaggcgccaggttggagggcttgttcccgcgcgagatgcgcgtgcccaccaactcgcccccgcgcaaggtctggcccgaccacgaaccgtccactctttagaatccgtgtgacttatgaatacaagcttcggtgggtcaaagat

SEQ ID NO: 12659 - DNA, 3066 bp, Oryza sativa
  ref <308>: DATABASE ACCESSION NUMBER: AK110007
  ref <309>: DATABASE ENTRY DATE: 2001-12-06
ctggagaggcgtcctcagcgacggaccgggcccaagtcccctggaaaggggcgcctgggagggtgagagccccgtccggcccggaccctgtcgccccacgaggcgccgtcaacgagtcgggttgtttgggaatgcagcccaaatcgggcggtaaactccgtccaaggctaaatacaggcgagagaccgatagcgaacaagtaccgcgagggaaagatgaaaaggactttgaaaagagagtcaaagagtgcttgaaattgccgggagggaagcggatgggggccggcgatgcgccccggccgtatgcggaacggcttcggctggtccgccgatcggctcggggcgtggactgttgtcggccgcgccggcggccaaagcccgggggctccgcgcccccggcagccgtcgtcggcgcagccggtcaccgcgcgcctctggcgcgcccctcggggcgctgcgccgcaacggcctgtgggccccccatccgacccgtcttggaacacggaccaaggagtctgacatgcgtgcgagtcgacgggttctgaaacctgggatgcgcaaggaagctgacgagcgggaggccctcacgggccgcaccgctggccgaccctgatcttctgtgaagggttcgagttggagcacgcctgtcgggacccgaaagatggtgaactatgcctgagcggggcgaagccagaggaaactctggtggaggctcgaagcgatactgacgtgcaaatcgttcgtctgacttgggtataggggcgaaagactaatcgaaccatctagtagctggttccctccgaagtttccctcaggatagctggagcccattacgagttctatcgggtaaagccaatgattagaggcatcgggggcgcaacgccctcgacctattctcaaactttaaataggtaggacggcgcggctgctccggtgagccgcgccacggaatcgggagctccaagtgggccatttttggtaagcagaactggcgatgcgggatgaaccggaagcctggttacggtgccgaactacgcgctaacctagaacccacaaagggtgttggtcgattaagacagcaggacggtggtcatggaagtcgaaatccgctaaggagtgtgtaacaactcacctgccgaatcaactagccccgaaaatggatggcgctgaagcgcgcgacccacaccaggccatctgggcgagcgccatgccccgatgagtaggagggcgcggcggccgccgcaaaacccggggcgcgagcccgggcggagcggccgtcggtgcagatcttggtggtagtagcaaatattcaaatgagaactttgaaggccgaagaggagaaaggttccatgtgaacggcacttgcacatgggtaagccgatcctaagggacggggtaaccccggcagagagcgcgaccacgcgcgtgccccgaaagggaatcgggttaagatttcccgagccgggacgtggcggttgacggcgacgttaggaagtccggagacgccggcgggggcctcgggaagagttatcttttctgcttaacggcccgccaaccctggaaacggttcagccggaggtagggtccagcggccggaagagcaccgcacgtcgcgcggtgtccggtgcgcccccggcggcccttgaaaatccggaggaccgagtaccgtccacgcccggtcgtactcataaccgcatcaggtctccaaggtgaacagcctctggccaatggaacaatgtaggcaagggaagtcggcaaaacggatccgtaacttcgggaaaaggattggctctgagggctgggctcgggggtcccggccccgaacccgtcggctgccggcggactgctcgagctgctcgcgcggcgagagcgggccgccgcgtgccggccgggggacggaccgggaacggccccctcgggggccttccccgggcgtcgaacagccgactcagaactggtacggacaaggggaatccgactgtttaattaaaacaaaacacatatctcaagatggcttccgctaacatttccaagaagagaaagtttgtcgctgacggtgtcttcgccgccgagctcaacgagttcttcactcgtgagctctccgaggagggatactctggttgcgaggtccgtgttacgcacgcccgcaccgagatcatcatccgcgccacccacacccaggaggtcctcggtgacaagggtcgccgcatccgcgagctcactgcgctcgtgcagaagcgattcaagttccccgacaactcgctcgagctctacgccgagaaggtgcagaaccgtggtctccacgccgtcgcccagtgcgagtcgctccgctacaagctgctcggcggtctcgctgtccgccgtgccgcctacggtgtgctccgcttcgtcatggagtcgggcgccaagggttgcgaggtcgtcatctcgggtaagctgcgtgctgcccgtgccaagtcgatgaagttcaccgacggtttcatgatccactccggtcagcccgtcaaggacttcgttgacgaggccgtccgccacgtgctcatgaagcagggtgttctcggcatcaaggtcaagatcatgcagggctgggaccccgagggacgtgctggcaagcccttccccctccccgatgccgtcaccatcctggagcccaaggaggaggcccccatcctcgcccccgtctccgagtcgcgccaggcccccgccgaggttgccgcccctgcccaggctgctcccgccgccgaggtccaggccgaggctgcctactaaacgggcccgcccagcggcacctgcactttccccttttgcaactctcgccctctctcttacccccgcttccctacactcccccctttctagtttcgaatgcaggatgaagcgcggctgtcttgcgacattggcgcctcacctgtcccatttggtcgtatcgacatgatcggccgtacacacaccacgcggacgcttcgctctccacgcactcgttcgcacctttccaacgggtggtctgttgcaagcagccctcgtctgggatgaaaaataacatcatcggccgtcgtgccacgttgct
